United States Patent Application Publication US 2010/0120628 A1 - sequence listing, part 3

SEQ ID NO: 3402 - DNA, 3104 bp, Homo sapiens
gaggctgagaaagctccccaggccggggctctcctgtgaggcaagtctcctggcagtcttcaggtgtggcaggggttggggtgggcccgggggtcatgtcccagctcagctggtcctgagaagctgcctggtagacagtcaccggcacagagagctggaaagtgccctcgaccccagaacctgggtcctgtgaggacatccaccctgtgtgaggccagggagtgctcagcagatgggggcagcagggggtgtcagcatgggtgggggttcctgccaaggcaggcagctgagctggccccacctcagagtgcaggggccctcagcttgatcttttctgggctccactcttgactgatggacccatggggcaccctggccccaccctgcctgccttgccccagctcctgcccttgccctgtagggctctgcggcctcccctgtgcctgtgtgcctggctcactagaccctggacctgtggtccctcagctccactctagtccccttactctgtccctctactgcctggcgtcgctcagctcctccctgcctgtccggcgcccagcatcctgtgcccatgacctcacatctgtccctctgcccgggtcccccactcacctgtgttttggtccatctttgtctgctgaccccactatagattttaaaaatacaaatatgcatgcacgtggttaaaaactcgctgatgtcagatggctgggatgaaaggactgcctgctgcctttcctcttgtagtgctcggacacctctgcaggcgaagctccttgtttttttgattctcccgcatctgtctgggccacatcgcctgtgtttccctggtggcgtggtgacctttccgcggcacacctgcggctgcccctctgtgctgtccttgctgttcctcccgtcatcttagcccacgtgtgtaaatgacatatgttcccctcccttgtgggtgttgtttttgatgtcctgtgaccgctgtcctggagtgtgggccagattcactggctgtcacagctggctatgcccaccctccctgcggcagggtcctcagtgagacctgtgcctactggttctgggtgatgagcgtgaacgttctccgtggctgctggcacgtgggcatgaccacagggtagagtgagactgcagagatgagggcagcaggcccctgcttggcacctgaagccctgggcaactggcaaggactgagccctctcctggctggaaggggctgggccacctgctcttgggcttgtctctggaaggccctctgggggtcttactacctccctgtctcagctcccaccagcctgtgaagccctgtgcagtccatacctgcaatcaaccccagccatggaggtggctgtaccccaggtgtctccacttagtgcccccccccccgacatgccccacgctgcccagcctctcctcttcccaccatccgtctggtcaggggtcattcttgtggtgcctgcccaaatcctctgaggagggctgcctggagtgcaggctccaggaacactcggaggtgtctggcttccttctggagtgtgacagctcggtgcagggcgcgctgcagaagcacctcgcgctatacaggatccggcggaaggtcacggtggagccgcacccggagctgcgagtgtgggcggtgttgcccagttcccctgaggcctgcggggctgcatcgctgcaggagagggcaggggctgccgccatcctcatccgcgacccgcgaacagcacgcatggggtggcggctcctcacccaggatgaaggcccagccctggtgcccgggggccggctcggggacttgtgggattatcaccagcaccgatacctgcaaggcgttcctgagggggtccgagacttgcctcctggggtggccctgcccctggagtccaacctggccttcatgaacggcgtgagcttcaccaaaggctgctacattggccaggagctgacggcccgcacccaccacatgggcgtcatccgcaagcgcctcttccctgtccggttcttggacccccttcccaccagtggcatcacccctggtgccacggtgctgactgcctcaggacagactgtgggcaagttcagggctggccagggcaacgtggggctggccctgctgtggtcagagaagatcaagggtcctctgcacatcagagcctctgagggtgcccaggtggccttagccgcatctgtgccagactggtggcctacagtctccaagtagtccgaagccttggctggcgcaggctgatggggaggctggggcctggggcctttggcctctgtccagggtcttcccgtcccatctgtctgctgcgcctactgggtgggagccctggtttccatctgggaaagtcccccttgtaggtgccctgcctggccccacccatgctcaggggccccaggcacgtgggttgttttctccctggacttcctgtggccccagaggagcccaccgtgtgagtgctgggctccagatggcgccgggtcccaatcgtggctccacacagggttgtctgggaggacgggacggtgtctctggccagcactggcagcttccgggccttgtaccccactctgcctggcatgagcctcatggggggttggtccctgtgcctggaagcggggtggtgtccagggtctgcaggctggggctcgggctttgggagttgtttcactgtgcttgcttccagcatgtctcagggtggggctatgcgtggtctagaggggtctggggcattggatcaggtggcatgtgggtgtctacacatcgagaagcacacagggatgagccactaggtatcccatgctggaggcttgtggaaggctgtgcccatctcccatgtttccccacctctgttcctcctcagagccctccaggagcgtggggtgggggccagcgcagggctcaggagccagcagggcagagttctgcctgtgtgtgctgggttttggcatagcctgtgtttgcagtgagagtgacttgctgtcagtcacggggcacagcctcctgttcacccactggcttcccccttcccactgaagtgtgagctctatgtttcagggcatctattaaagagtgagccacaggc

SEQ ID NO: 3403 - protein, 163 aa, Homo sapiens
MGWRLLTQDEGPALVPGGRLGDLWDYHQHRYLQGVPEGVRDLPPGVALPLESNLAFMNGVSFTKGCYIGQELTARTHHMGVIRKRLFPVRFLDPLPTSGITPGATVLTASGQTVGKFRAGQGNVGLALLWSEKIKGPLHIRASEGAQVALAASVPDWWPTVSK

SEQ ID NO: 3404 - DNA, 3226 bp, Homo sapiens
gaggctgagaaagctccccaggccggggctctcctgtgaggcaagtctcctggcagtcttcaggtgtggcaggggttggggtgggcccgggggtcatgtcccagctcagctggtcctgagaagctgcctggtagacagtcaccggcacagagagctggaaagtgccctcgaccccagaacctgggtcctgtgaggacatccaccctgtgtgaggccagggagtgctcagcagatgggggcagcagggggtgtcagcatgggtgggggttcctgccaaggcaggcagctgagctggccccacctcagagtgcaggggccctcagcttgatcttttctgggctccactcttgactgatggacccatggggcaccctggccccaccctgcctgccttgccccagctcctgcccttgccctgtagggctctgcggcctcccctgtgcctgtgtgcctggctcactagaccctggacctgtggtccctcagctccactctagtccccttactctgtccctctactgcctggcgtcgctcagctcctccctgcctgtccggcgcccagcatcctgtgcccatgacctcacatctgtccctctgcccgggtcccccactcacctgtgttttggtccatctttgtctgctgaccccactatagattttaaaaatacaaatatgcatgcacgtggttaaaaactcgctgatgtcagatggctgggatgaaaggactgcctgctgcctttcctcttgtagtgctcggacacctctgcaggcgaagctccttgtttttttgattctcccgcatctgtctgggccacatcgcctgtgtttccctggtggcgtggtgacctttccgcggcacacctgcggctgcccctctgtgctgtccttgctgttcctcccgtcatcttagcccacgtgtgtaaatgacatatgttcccctcccttgtgggtgttgtttttgatgtcctgtgaccgctgtcctggagtgtgggccagattcactggctgtcacagctggctatgcccaccctccctgcggcagggtcctcagtgagacctgtgcctactggttctgggtgatgagcgtgaacgttctccgtggctgctggcacgtgggcatgaccacagggtagagtgagactgcagagatgagggcagcaggcccctgcttggcacctgaagccctgggcaactggcaaggactgagccctctcctggctggaaggggctgggccacctgctcttgggcttgtctctggaaggccctctgggggtcttactacctccctgtctcagctcccaccagcctgtgaagccctgtgcagtccatacctgcaatcaaccccagccatggaggtggctgtaccccaggtgtctccacttagtgcccccccccccgacatgccccacgctgcccagcctctcctcttcccaccatccgtctggtcaggggtcattcttgtggtgcctgcccaaatcctctgaggagggctgcctggagtgcaggctccaggaacactcggaggtgtctggcttccttctggagtgtgacagctcggtgcagggcgcgctgcagaagcacctcgcgctatacaggatccggcggaaggtcacggtggagccgcacccggagctgcgagtgtgggcggtgttgcccagttcccctgaggcctgcggggctgcatcgctgcaggagagggcaggggctgccgccatcctcatccgcgacccgcgaacagcacgcatggggtggcggctcctcacccaggatgaaggcccagccctggtgcccgggggccggctcggggacttgtgggattatcaccagcaccgatacctgcaaggcgttcctgagggggtccgagacttgcctcctggggtggccctgcccctggagtccaacctggccttcatgaacggcgtgagcttcaccaaaggctgctacattggccaggagctgacggcccgcacccaccacatgggcgtcatccgcaagcgcctcttccctgtccggttcttggacccccttcccaccagtggcatcacccctggtgccacggtgctgactgcctcaggacagactgtgggcaagttcagggctggccagggcaacgtggggctggccctgctgtggtcagagaagatcaagggtcctctgcacatcagagcctctgagggtgcccaggtggccttagccgcatctgtgccagactggtggcctacagtctccaagtagtccgaagccttggctggcgcaggctgatggggaggctggggcctggggcctttggcctctgtccagggtcttcccgtcccatctgtctgctgcgcctactgggtgggagccctggtttccatctgggaaagtcccccttgtaggtgccctgcctggccccacccatgctcaggggccccaggcacgtgggttgttttctccctggacttcctgtggccccagaggagcccaccgtgtgagtgctgggctccagatggcgccgggtcccaatcgtggctccacacagggttgtctgggaggacgggacggtgtctctggccagcactggcagcttccgggccttgtaccccactctgcctggcatgagcctcatggggggttggtccctgtgcctggaagcggggtggtgtccagggtctgcaggctggggctcgggctttgggagttgtttcactgtgcttgcttccagcatgtctcagggtggggctatgcgtggtctagaggggtctggggcattggatcaggtggcatgtgggtgtctacacatcgagaagcacacagggatgagccactaggtatcccatgctggaggcttgtggaaggctgtgcccatctcccatgtttccccacctctgttcctcctcagagccctccaggagcgtggggtgggggccagcgcagggctcaggagccagcagggcagagttctgcctgtgtgtgctgggttttggcatagcctgtgtttgcagtgagagtgacttgctgtcagtcacggggcacagcctcctgttcacccactggcttcccccttcccactgaagtgtgagctctatgtttcagggcatctattaaagagtgagccacaggcagccccttgggagctctggtttcatttgggggagagggaggtgggggcttagtttttgtgatctggctgactggaccccgggaacagcgctcctttgagaacgcccagacctaccagatgaa

SEQ ID NO: 3405 - protein, 163 aa, Homo sapiens; identical to SEQ ID NO: 3403

SEQ ID NO: 3406 - DNA, 1620 bp, Homo sapiens
cacggtgtgctcctctgcccgggctccaggaacactcggaggtgtctggcttccttctggagtgtgacagctcggtgcagggcgcgctgcagaagcacctcgcgctatacaggatccggcggaaggtcacggtggagccgcacccggagctgcgagtgtgggcggtgttgcccagttcccctgaggcctgcggggctgcatcgctgcaggagagggcaggggctgccgccatcctcatccgcgacccgcgaacagcacgcatggggtggcggctcctcacccaggatgaaggcccagccctggtgcccgggggccggctcggggacttgtgggattatcaccagcaccgatacctgcaaggcgttcctgagggggtccgagacttgcctcctggggtggccctgcccctggagtccaacctggccttcatgaacggcgtgagcttcaccaaaggctgctacattggccaggagctgacggcccgcacccaccacatgggcgtcatccgcaagcgcctcttccctgtccggttcttggacccccttcccaccagtggcatcacccctggtgccacggtgctgactgcctcaggacagactgtgggcaagttcagggctggccagggcaacgtggggctggccctgctgtggtcagagaagatcaagggtcctctgcacatcagagcctctgagggtgcccaggtggccttagccgcatctgtgccagactggtggcctacagtctccaagtagtccgaagccttggctggcgcaggctgatggggaggctggggcctggggcctttggcctctgtccagggtcttcccgtcccatctgtctgctgcgcctactgggtgggagccctggtttccatctgggaaagtcccccttgtaggtgccctgcctggccccacccatgctcaggggccccaggcacgtgggttgttttctccctggacttcctgtggccccagaggagcccaccgtgtgagtgctgggctccagatggcgccgggtcccaatcgtggctccacacagggttgtctgggaggacgggacggtgtctctggccagcactggcagcttccgggccttgtaccccactctgcctggcatgagcctcatggggggttggtccctgtgcctggaagcggggtggtgtccagggtctgcaggctggggctcgggctttgggagttgtttcactgtgcttgcttccagcatgtctcagggtggggctatgcgtggtctagaggggtctggggcattggatcaggtggcatgtgggtgtctacacatcgagaagcacacagggatgagccactaggtatcccatgctggaggcttgtggaaggctgtgcccatctcccatgtttccccacctctgttcctcctcagagccctccaggagcgtggggtgggggccagcgcagggctcaggagccagcagggcagagttctgcctgtgtgtgctgggttttggcatagcctgtgtttgcagtgagagtgacttgctgtcagtcacggggcacagcctcctgttcacccactggcttcccccttcccactgaagtgtgagctctatgtttcagggcatctattaaagagtgagccacaggc

SEQ ID NO: 3407 - protein, 163 aa, Homo sapiens; identical to SEQ ID NO: 3403

SEQ ID NO: 3408 - DNA, 1742 bp, Homo sapiens
cacggtgtgctcctctgcccgggctccaggaacactcggaggtgtctggcttccttctggagtgtgacagctcggtgcagggcgcgctgcagaagcacctcgcgctatacaggatccggcggaaggtcacggtggagccgcacccggagctgcgagtgtgggcggtgttgcccagttcccctgaggcctgcggggctgcatcgctgcaggagagggcaggggctgccgccatcctcatccgcgacccgcgaacagcacgcatggggtggcggctcctcacccaggatgaaggcccagccctggtgcccgggggccggctcggggacttgtgggattatcaccagcaccgatacctgcaaggcgttcctgagggggtccgagacttgcctcctggggtggccctgcccctggagtccaacctggccttcatgaacggcgtgagcttcaccaaaggctgctacattggccaggagctgacggcccgcacccaccacatgggcgtcatccgcaagcgcctcttccctgtccggttcttggacccccttcccaccagtggcatcacccctggtgccacggtgctgactgcctcaggacagactgtgggcaagttcagggctggccagggcaacgtggggctggccctgctgtggtcagagaagatcaagggtcctctgcacatcagagcctctgagggtgcccaggtggccttagccgcatctgtgccagactggtggcctacagtctccaagtagtccgaagccttggctggcgcaggctgatggggaggctggggcctggggcctttggcctctgtccagggtcttcccgtcccatctgtctgctgcgcctactgggtgggagccctggtttccatctgggaaagtcccccttgtaggtgccctgcctggccccacccatgctcaggggccccaggcacgtgggttgttttctccctggacttcctgtggccccagaggagcccaccgtgtgagtgctgggctccagatggcgccgggtcccaatcgtggctccacacagggttgtctgggaggacgggacggtgtctctggccagcactggcagcttccgggccttgtaccccactctgcctggcatgagcctcatggggggttggtccctgtgcctggaagcggggtggtgtccagggtctgcaggctggggctcgggctttgggagttgtttcactgtgcttgcttccagcatgtctcagggtggggctatgcgtggtctagaggggtctggggcattggatcaggtggcatgtgggtgtctacacatcgagaagcacacagggatgagccactaggtatcccatgctggaggcttgtggaaggctgtgcccatctcccatgtttccccacctctgttcctcctcagagccctccaggagcgtggggtgggggccagcgcagggctcaggagccagcagggcagagttctgcctgtgtgtgctgggttttggcatagcctgtgtttgcagtgagagtgacttgctgtcagtcacggggcacagcctcctgttcacccactggcttcccccttcccactgaagtgtgagctctatgtttcagggcatctattaaagagtgagccacaggcagccccttgggagctctggtttcatttgggggagagggaggtgggggcttagtttttgtgatctggctgactggaccccgggaacagcgctcctttgagaacgcccagacctaccagatgaa

SEQ ID NO: 3409 - protein, 163 aa, Homo sapiens; identical to SEQ ID NO: 3403

SEQ ID NO: 3410 - DNA, 883 bp, Homo sapiens
caccgcgtcgtcgtcggccgagacattgcgcacggtcaggcggcgctcggtgccctcctcctcgatgccgtacttggcgctcgcccacaaccgcgtctcctccttgaaccacgcggcctcagtggacggctggggcacctcacataggaacgtggccgactccttctcccgcacctccagatcttgcagccgctttttgaagggaaccgcgggctctgccaggagagaagactgctattttgaagcatacatgggaagctggttcctggacccccgcatataccaaaatctgtgcatactcaagttctacggtcagccctgtggaacccaagcataggacaagccggccctccctatacacacaggtttgacatcctgagaacactgctggttcccttcccatttggttccagaaaatctgcgtataagtggactcagtggtgcaaacctatgttgttcaagggtcaactatatatgatgaattattgttacctacagtcactctaccatgctactaaacactagaactgattcattttctctgactgtgtgtctctacccattaaccagcccctcttcatctcccttcccgcttccctccccagcctctggtaaccatcattcagttctctacctccgtgaaatcaacatgagtaagaactggtgaaacccaaacatagtctcgaatttagctttttttttttttttaactgtaagaggctaaacattcttgaggaggacacaaaaaagtctgaagacaactgtccagatgagaatcttgcacttgcacaagtagagaggagagttagtttttataccatcgcatccccaatcccagctttattgatgcataacaaataaaaattgtacatatttaaagtgt

SEQ ID NO: 3411 - protein, 90 aa, Homo sapiens
MPYLALAHNRVSSLNHAASVDGWGTSHRNVADSFSRTSRSCSRFLKGTAGSARREDCYFEAYMGSWFLDPRIYQNLCILKFYGQPCGTQA

SEQ ID NO: 3412 - DNA, 507 bp, Homo sapiens
gtcgtcggccgagacattgcgcacggtcaggcggcgctcggtgccctcctcctcgatgccgtacttggcgctcgcccacaaccgcgtctcctccttgaaccacgcggcctcagtggacggctggggcacctcacataggaacgtggccgactccttctcccgcacctccagatcttgcagccgctttttgaagggaaccgcgggctctgccaggagagaagactggaggaaagagggttttcattcccttctgaatgttaggagggaaggcattttccatccttgaccagcttgtagatgacacacattcagcaaacgcacatcccagcagcaccgagagaacacacagctgggttgcttacaaatacactacttcaaagtaaactttctctagtagcatatcagaagcaaagtaaaatctatttggagcaagtaaatctgactgctaccccactattttgaagcatacatgggaagctggttcctggacccccgcatataccaaaa

SEQ ID NO: 3413 - protein, 76 aa, Homo sapiens
MPYLALAHNRVSSLNHAASVDGWGTSHRNVADSFSRTSRSCSRFLKGTAGSARREDWRKEGFHSLLNVRREGIFHP

SEQ ID NO: 3414 - DNA, 2892 bp, Homo sapiens
gcagatgtacaccgcgtcgtcgtcggccgagacattgcgcacggtcaggcggcgctcggtgccctcctcctcgatgccgtacttggcgctcgcccacaaccgcgtctcctccttgaaccacgcggcctcagtggacggctggggcacctcacataggaacgtggccgactccttctcccgcacctccagatcttgcagccgctttttgaagggaaccgcgggctctgccaggagagaagactggaacggacacctgcaaccctggattccacgaccggacagacgcgggtgggaaacggcagaccgcaagggcgaaaggacccaggtgcacgggttgcggaggagcctgggcccgcgcgccccgcacccaggagctcaccgcgcactacgaccagcacagagctgtaggtctggcccacgaggttggacgccgtgcaggtgtagaggccgcggtccgactgcttgcagaagaggatcttgagcacgaagttctcctgcgcgtcctcgtacaccacgtggcgccggccctcggtcaccagctggccgtccttcttccacaccgtctcgggcttgggctcgccggtcacgtagcagctgaggcgcgcgtgcttgccttcagtcaccgtgcaggtgcctgctgtcccagctactcaagagactgaagcaggaggatggcttgagcccaggaggtcaaagctgcagtgagctgcttcgccccatccctgatccagtgccaggcctctatgtgtcctcacagcgtacctcaggctcttccgggcaatggccaacatctctcatgtgtcctcaatcagaaggagggtgaggggtctctggagtaacggttatgccattctgcagccttatctcatgactgatcacttccaaaagctcacgttctaatcctgtcaccttgggggtgagcatttcaacgtgtgaatctccgggacacacattcagtccacagcaccagggagaaaggaaaggctggaaggagagcccactcccccaccaggagcttggccctgagctgccccagccatgcagaagtgtgtgtgcattgtgtgtgctcgaatacgtgccccaccccctcccggacagggccgtggagggtgcagagaagatggctgtgcgggccagccccttgcagggcctcctggacctgggagaagcaatgcccccacagcctccaggagtggcctgccctcctgaccctcttcactgctgcctgctccgctgcatctccaaacaccactgccagccttcaggctggattttctgcctccttcacaggacccctgttgttccttatttccctgcaacgtatttgttgaagacagtgggatattcacactacagagcttccggaggcactgtgcccagggtgtccttcacaccacgggaggccacaggatgcagtggctggccatggaccttgcctattcctggctggaatccactgcaaagagaactttcatggagctgctgtctgttcaaaggggtacaggtggaggaggagcagacacaatttcctgaggaaagcaaatgtcactgtgtcccttgagttgccagcttccacagggatgtcccgccatgagccctcctcccaggggctttcacagctgggtgggctggcatcctgggtgcagtttaactgaagggggtgttctcacagccatctcccaaggcctgggggatggtgggcccggaggcctcagacctgcacctgctgcccaggcgatggggtggctgggccccgggtgcccacaaactataggcaaaaaaaactgtaagtcagtcctgcagggtttcctgaacattttatgatccccaagtcgtatctgaacatgtcaagaatctctggtgccttggcttgggtgtaaagatgaagttctttcctcctctgtattccaggaggaaagagggttttcattcccttctgaatgttaggagggaaggcattttccatccttgaccagcttgtagatgacacacattcagcaaacgcacatcccagcagcaccgagagaacacacaggtgtgtcacgcttttgcgttcataaggccttttcatgtcagtatcttattagatattcccaaacaagggtgttttctcatcttatagaagagaggcctgaggctcacagggtgaaaacaatttgcttaagcctgcacagcagctgtgctggcaacgtttctcccggtataaatgagaagcagcctttgtggccacagagatgtgactgctaagtgcatcgtcccaccctgaaggagattcttcctcaacaagaggacattagtgcaaagactgatgaagtctgtagtttcgtgggttttttttttaagcataaggggttaaatattatgtaattaagtaataaggcagttgtgaggatgcaactgccaaaagtttgaaaaaagctgcccagatggaaatctgcttgcatttgtgcaagcagataggtgagggatttttactgtactgccgtgtcccctacctgccccagctttattgagttataattgacaagcaaaaattgtttatatttaaagtgtacaatgtgatgtggcctttttgttttgttttgagacataatcttatcacccaggctggagtgaagtggcgcagtttaaactgcgcaggctcatcatcctccttcctcagcctcctcagtagctagaaccacaggtgtgagccaccatgcctggctcattttttgattttctttttttaagagacaggggtctccctgtttcccaggctggtcttgaactcccgggctcaagtaatcatcccgcctcagcctcccaaagtgatggtgttacaggcatgagctactgtgcctggccagaaatggtaaattataattaaaggcttctgtaagtcatgctgtc

SEQ ID NO: 3415 - protein, 158 aa, Homo sapiens
MYTASSSAETLRTVRRRSVPSSSMPYLALAHNRVSSLNHAASVDGWGTSHRNVADSFSRTSRSCSRFLKGTAGSARREDWNGHLQPWIPRPDRRGWETADRKGERTQVHGLRRSLGPRAPHPGAHRALRPAQSCRSGPRGWTPCRCRGRGPTACRRGS

SEQ ID NO: 3416 - DNA, 2897 bp, Homo sapiens
gcagatgtacaccgcgtcgtcgtcggccgagacattgcgcacggtcaggcggcgctcggtgccctcctcctcgatgccgtacttggcgctcgcccacaaccgcgtctcctccttgaaccacgcggcctcagtggacggctggggcacctcacataggaacgtggccgactccttctcccgcacctccagatcttgcagccgctttttgaagggaaccgcgggctctgccaggagagaagactggaacggacacctgcaaccctggattccacgaccggacagacgcgggtgggaaacggcagaccgcaagggcgaaaggacccaggtgcacgggttgcggaggagcctgggcccgcgcgccccgcacccaggagctcaccgcgcactacgaccagcacagagctgtaggtctggcccacgaggttggacgccgtgcaggtgtagaggccgcggtccgactgcttgcagaagaggatcttgagcacgaagttctcctgcgcgtcctcgtacaccacgtggcgccggccctcggtcaccagctggccgtccttcttccacaccgtctcgggcttgggctcgccggtcacgtagcagctgaggcgcgcgtgcttgccttcagtcaccgtgcaggtgcgcgtgccggtgctgggcggctgtggcaggagggagggtggggaagatgggggtgctcagaatctgctctgtgcctccaggcttcgccccatccctgatccagtgccaggcctctatgtgtcctcacagcgtacctcaggctcttccgggcaatggccaacatctctcatgtgtcctcaatcagaaggagggtgaggggtctctggagtaacggttatgccattctgcagccttatctcatgactgatcacttccaaaagctcacgttctaatcctgtcaccttgggggtgagcatttcaacgtgtgaatctccgggacacacattcagtccacagcaccagggagaaaggaaaggctggaaggagagcccactcccccaccaggagcttggccctgagctgccccagccatgcagaagtgtgtgtgcattgtgtgtgctcgaatacgtgccccaccccctcccggacagggccgtggagggtgcagagaagatggctgtgcgggccagccccttgcagggcctcctggacctgggagaagcaatgcccccacagcctccaggagtggcctgccctcctgaccctcttcactgctgcctgctccgctgcatctccaaacaccactgccagccttcaggctggattttctgcctccttcacaggacccctgttgttccttatttccctgcaacgtatttgttgaagacagtgggatattcacactacagagcttccggaggcactgtgcccagggtgtccttcacaccacgggaggccacaggatgcagtggctggccatggaccttgcctattcctggctggaatccactgcaaagagaactttcatggagctgctgtctgttcaaaggggtacaggtggaggaggagcagacacaatttcctgaggaaagcaaatgtcactgtgtcccttgagttgccagcttccacagggatgtcccgccatgagccctcctcccaggggctttcacagctgggtgggctggcatcctgggtgcagtttaactgaagggggtgttctcacagccatctcccaaggcctgggggatggtgggcccggaggcctcagacctgcacctgctgcccaggcgatggggtggctgggccccgggtgcccacaaactataggcaaaaaaaactgtaagtcagtcctgcagggtttcctgaacattttatgatccccaagtcgtatctgaacatgtcaagaatctctggtgccttggcttgggtgtaaagatgaagttctttcctcctctgtattccaggaggaaagagggttttcattcccttctgaatgttaggagggaaggcattttccatccttgaccagcttgtagatgacacacattcagcaaacgcacatcccagcagcaccgagagaacacacaggtgtgtcacgcttttgcgttcataaggccttttcatgtcagtatcttattagatattcccaaacaagggtgttttctcatcttatagaagagaggcctgaggctcacagggtgaaaacaatttgcttaagcctgcacagcagctgtgctggcaacgtttctcccggtataaatgagaagcagcctttgtggccacagagatgtgactgctaagtgcatcgtcccaccctgaaggagattcttcctcaacaagaggacattagtgcaaagactgatgaagtctgtagtttcgtgggttttttttttaagcataaggggttaaatattatgtaattaagtaataaggcagttgtgaggatgcaactgccaaaagtttgaaaaaagctgcccagatggaaatctgcttgcatttgtgcaagcagataggtgagggatttttactgtactgccgtgtcccctacctgccccagctttattgagttataattgacaagcaaaaattgtttatatttaaagtgtacaatgtgatgtggcctttttgttttgttttgagacataatcttatcacccaggctggagtgaagtggcgcagtttaaactgcgcaggctcatcatcctccttcctcagcctcctcagtagctagaaccacaggtgtgagccaccatgcctggctcattttttgattttctttttttaagagacaggggtctccctgtttcccaggctggtcttgaactcccgggctcaagtaatcatcccgcctcagcctcccaaagtgatggtgttacaggcatgagctactgtgcctggccagaaatggtaaattataattaaaggcttctgtaagtcatgctgtc

SEQ ID NO: 3417 - protein, 158 aa, Homo sapiens; identical to SEQ ID NO: 3415

SEQ ID NO: 3418 - DNA, 20378 bp, Homo sapiens
aggtccccgccgccaccctcatggatcagccacagttcagcggggcgccccgctttctcacccggcccaaggccttcgtggtgtcggtgggcaaggacgccaccctcagctgccagatcgtgggtaatcccacgccacaggtgagctgggagaaggaccagcagccggtggcggccggcgcgcgcttccgtctggcccaggacggcgacctctaccgcctcactatcctggacctggcgctgggcgacagtgggcaatacgtgtgccgcgcgcgcaatgccataggcgaggccttcgctgctgtgggcctgcaggtggacgcggaggccgcgtgcgccgagcaggcgccgcacttcctgctgcggcccacgtccatccgcgtgcgcgagggctcagaggccaccttccgctgccgcgtgggtggctccccgaggccggcagtgagctggtccaaggacgggcggcgcctgggtgagcccgacggcccccgcgtgcgcgtggaggagctcggcgaggcaagtgcgctgcgcattcgggcggcgcggccgcgcgacggcggcacttacgaggtccgcgccgagaacccgctgggcgctgccagcgccgccgcggcgctagtggtggactcggacgccgcggacacggccagccggcccgggacctccacggccgcgctcctggcgcacctgcagcggcggcgcgaggctatgcgcgccgagggcgcccccgcctcaccgcccagcaccggcacgcgcacctgcacggtgactgaaggcaagcacgcgcgcctcagctgctacgtgaccggcgagcccaagcccgagacggtgtggaagaaggacggccagctggtgaccgagggccggcgccacgtggtgtacgaggacgcgcaggagaacttcgtgctcaagatcctcttctgcaagcagtcggaccgcggcctctacacctgcacggcgtccaacctcgtgggccagacctacagctctgtgctggtcgtagtgcgcgagcccgcggttcccttcaaaaagcggctgcaagatctggaggtgcgggagaaggagtcggccacgttcctatgtgaggtgccccagccgtccactgaggccgcgtggttcaaggaggagacgcggttgtgggcgagcgccaagtacggcatcgaggaggagggcaccgagcgccgcctgaccgtgcgcaatgtctcggccgacgacgacgcggtgtacatctgcgagacgccagagggcagccgcacggtggcggagctcgcagtccaaggaaacctcctccgaaagctccctcggaagacggcggtgcgcgtgggcgacacggctatgttttgcgtggagctggcggtcccggtgggccccgtccactggctgcggaaccaggaggaagtggtggcggggggccgcgtggccatctccgcggagggcacgcgccacacactaaccatctcccagtgctgcctggaggatgtgggccaggtggcctttatggctggcgactgccagacgtccacccagttctgcgtgtcggcccccaggaagcctcccctgcaaccccctgtggatcctgtggtaaaggccaggatggagagttccgtgattctcagctggtccccaccaccccatggggaacgccctgtcactatcgacggctacctggtagagaagaagaagcttggcacctacacctggatcaggtgccacgaggctgaatgggtggctacacctgagctgaccgtggctgatgtggcggaggaggggaacttccagttccgagtgtccgctctcaacagctttggtcagagtccctacctcgagttcccggggactgtccacctggcccccaagctggccgtgaggacaccgctgaaggcggtgcaggcggtagagggtggcgaggtcactttctccgtggacctcacggtggcctcagcgggtgagtggttcctggatgggcaggccctgaaggccagcagtgtgtatgagatccactgtgatcgcacccggcacacgctcaccatccgggaggtgcccgccagcctgcacggggcgcagctgaagttcgtggccaacggcattgagagcagcatccggatggaggtccgggcggccccagggctgactgccaacaagccgccagccgcagctgcccgggaggtgctggctcggctgcacgaggaggcgcagctgctggctgagctgtcagatcaggctgcggctgtgacgtggctgaaggatggtcgcacactgtccccaggccccaagtatgaggtgcaggcatcggccgggcggcgggtgctccttgtgcgagatgtggcccgggacgatgcaggcctctacgagtgcgtcagccgcgggggccgcatcgcctaccagctctccgtgcaaggcctcgcgcgctttctgcacaaggacatggcgggcagctgtgtggatgccgtggctgggggcccggcgcagtttgagtgtgagacctccgaagcccacgtccacgtgcactggtacaaggatggcatggagctgggccactccggtgagcgcttcttgcaggaggatgtggggacgcggcaccggctggtggcagccacagtcaccaggcaggatgaaggcacctactcctgccgcgtgggcgaggactctgtggacttccggctccgcgtctctgagcccaaggtggtgtttgctaaggagcagctggcacgcaggaagctgcaggcagaggcaggagccagtgccacactgagctgcgaggtggcccaggcccagacggaggtgacgtggtacaaggatgggaagaagctgagctccagctcgaaagtgtgcatggaggccacaggctgcacgcgcaggctggttgtgcagcaggcaggccaggcggatgccggggagtatagctgcgaggctgggggccagcggctctccttccatctggatgtcaaagagcccaaggtggtgtttgccaaggaccaggtggcacacagtgaggtgcaggctgaggcaggggccagtgccacgctgagctgcgaggtggcccaggcccagacggaggtgatgtggtacaaagatgggaagaagctgagctccagcttgaaagtgcatgtagaggccaagggctgcagacggaggctggtggtgcagcaggcaggcaagacagatgccggggactacagctgcgaggccaggggccagagggtctccttccgcctgcacatcacagagcccaagatgatgtttgcaaaggagcagtcagtgcataatgaggtgcaggctgaggcgggggccagtgccatgctgagctgtgaggtggcccaggcccagacggaggtgacgtggtacaaggatgggaagaagctgagctccagctcaaaagtgggcatggaggtcaaagggtgcacacggaggctggtgctgccacaggcgggcaaagcagatgctggggagtacagctgtgaggctgggggccagagagtctccttccacctgcacatcacagagcccaagggggtgtttgcgaaggagcagtcagtgcataatgaggtgcaggctgaggcggggaccactgccatgctgagctgtgaggtggcccagccccagacagaggtgacgtggtacaaggacgggaagaagctgagctccagctcaaaagtacgcatggaggtcaagggctgcacacgaaggctggtagtgcagcaggtgggcaaagcagatgctggggagtacagctgcgaggctgggggccagagagtctcctttcaactgcacatcacagagcccaaggcagtgtttgccaaggagcagttggtgcataatgaggtgcggactgaggcaggggccagtgccacactgagctgtgaggtggcccaggcccagacagaggtgacgtggtacaaggatgggaagaagctgagctccagttcgaaagtgcgcatagaggctgcgggctgcatgcggcagctggtggtgcagcaggcaggccaggcagatgctggggagtacacctgtgaggctgggggccagcggctctccttccacctggatgtttcagagcccaaggcggtgtttgcaaaggagcagctggcacacaggaaggtgcaggccgaggcgggggccattgccacgctgagctgcgaggtggcccaggcccagacagaggtgacgtggtacaaggacgggaagaagctgagctccagctcgaaagttcgaatggaggctgtgggctgcacacggaggctggtggtgcagcaggcatgccaggcggacaccggggagtatagctgcgaggccgggggccagcggctctccttcagcctggacgtggcagagcccaaggtggtgtttgccaaggagcagccagtgcacagggaggtgcaggcccaggcgggggccagcaccacactcagctgcgaggtggctcaggcccagacggaggtgatgtggtacaaggacgggaagaagctgagcttcagctcgaaagtgcgcatggaggctgtgggctgcacacggaggctggtggtgcagcaggcgggccaggcggtcgccggggagtacagctgcgaggcggggagccagcggctctccttccacctgcacgtggcagagcccaaggcggtgtttgccaaggagcagccagcgagcagggaggtgcaggctgaggcggggaccagtgccacgctgagctgcgaggtggcccaggcccagacagaggtgacgtggtacaaggacgggaagaaactgagctccagctcgaaagtgcgaatggaggccgtgggctgcacacggaggctggtggtgcaggaggcaggccaggcggacgccggggagtacagctgcaaggccggggatcagcggctgtccttccacctgcacgtggcagagcccaaggtggtgtttgccaaggagcagccagcacacagggaggtgcaggctgaggcgggggccagtgccacgctgagctgcgaggtggcccaggcccagacagaggtgacgtggtacaaggatgggaagaagctgagttccagctcgaaagtgcgcgtggaggccgtgggctgcacacggaggctggtggtgcagcaggcgggccaggcagaggccggggagtacagctgcgaggcagggggtcagcagctctccttccgcctgcaggtggcagagctggagccccaaatttcagagagaccctgccgcagggagcctctggtggtcaaggagcatgaagacatcatcctgaccgccacactggccacaccctctgcggccacggtgacctggctcaaggatggtgtggagattcgccgcagcaagcggcatgagacagccagccagggggacacccacaccctgaccgtgcatggcgcccaggttctggacagcgccatctacagctgccgtgtgggcgcagaggggcaggacttcccagtgcaggtggaagaggtggccgccaagttctgccggctgctggagcctgtgtgcggcgagctgggtggcacggtgacactggcctgcgagctaagcccagcgtgtgcagaggtggtgtggcgctgcggcaacacgcagcttcgggtgggcaagcgcttccagatggtggccgaggggcccgtgcgctcactcactgtgttggggctgcgcgcagaggacgcaggggagtacgtgtgtgagagccgtgatgaccacaccagtgcgcagctcaccgtcagtgtgccccgagtggtgaagtttatgtctgggctgagcaccgtggtcgcagaggagggcggcgaggccaccttccagtgcgtggtgtcccccagtgatgtggcagtcgtgtggttccgggacggtgccctgcttcagcccagcgagaagtttgccatatcacagagtggcgccagccacagcctgaccatctcagacctggtgctggaggacgcgggccagatcaccgtggaggctgagggcgcctcatcctctgctgccctgagggtccgagaggcgcctgtgctgttcaaaaagaagctggagccgcagacggtggaggagcggagctcggtgaccctggaggtggagctgacgcggccgtggccggagctgaggtggacacggaacgcgacggccctggcgccgggaaagaacgtggagatccacgccgagggcgcccgccaccgcctggttctgcacaacgtaggttttgccgaccgtggcttctttggctgcgagacgccggatgacaagacacaggccaaactcaccgtggagatgcgccaggtacggctcgtacggggcctgcaggcagtggaggcacgggagcagggcacggctaccatggaggtgcagctgtcgcatgcggacgtggatggcagctggactcgtgacggtctgcggttccagcaggggcccacgtgccacctggctgtgcggggccccatgcacaccctcacactctcggggctgcggccagaggatagtggccttatggtcttcaaggccgaaggagtgcacacgtcggcgcggctcgtggtcaccgagcttcccgtgagcttcagccgcccgctgcaggacgtggtgaccactgagaaggagaaggttaccctggagtgcgagctgtcgcgtcctaatgtggatgtgcgctggctgaaggacggtgtggagctgcgggcaggcaagacgatggccatcgcagcccagggcgcctgcaggagcctcaccatttaccggtgcgagttcgcggatcagggagtgtatgtgtgtgatgcccatgatgcccagagctctgcctccgtgaaggtacaaggaaggacatacactctcatctaccggagagtcctggcggaagatgcaggagagatccaatttgtagccgaaaatgcagaatcgcgagcccagctccgagtgaaggagctgccagtgaccctcgtgcgcccgctgcgggacaagattgccatggagaagcaccgcggtgtgctggagtgtcaggtgtcccgggccagcgcccaggtgcggtggttcaagggcagtcaggagctgcagcccgggcccaagtacgagctggtcagtgatggcctctaccgcaagctgatcatcagtgatgtccacgcagaggacgaggacacctacacctgtgacgccggtgatgtcaagaccagtgcacagttcttcgtggaagagcaatccatcaccattgtgcggggtctgcaggacgtgacagtgatggagcccgctcctgcctggtttgagtgtgagacctccatcccctcagtgcggccacctaagtggctcctggggaagacggtgttgcaggctggggggaacgtgggcctggagcaggagggcacggtgcaccggctgatgctgcggcggacctgctccaccatgaccgggcccgtgcacttcaccgttggcaagtcgcgctcctctgcccgcctggtggtctcagacatccccgtagtcctcacacggccgttggagcccaagacagggcgtgagctgcagtcagtggtcctgtcctgcgacttccggccagcccccaaggctgtgcagtggtacaaggatgacacgcccctgtctccctctgagaagtttaagatgagcctggagggtcagatggctgagctgcgcatcctccggctcatgcctgctgatgctggtgtctaccggtgccaggcgggcagtgcccacagcagcactgaggtcactgtggaagcgcgggaggtgacagtgacagggccgctacaggatgcagaggccacggaggagggctgggccagcttctcctgtgagctgtcccacgaggatgaggaggtcgagtggtcgctcaacgggatgcccctgtacaacgacagcttccatgagatctcacacaagggccggcgccacacgctggtactgaagagcatccagcgggctgatgcgggcatagtacgcgcctcctccctgaaggtgtcgacctctgcccgcctggaggtccgagtgaagccggtggtgttcctgaaggcgctggatgacctgtccgcagaggagcgcggcaccctggccctgcagtgtgaagtctctgaccccgaggcccatgtggtgtggcgcaaagatggcgtgcagctgggccccagtgacaagtatgacttcctgcacacggcgggcacgcgggggctcgtggtgcatgacgtgagccctgaagacgccggcctgtacacctgccacgtgggctccgaggagacccgggcccgggtccgcgtgcacgatctgcacgtgggcatcaccaagaggctgaagacaatggaggtgctggaaggggaaagctgcagctttgagtgcgtcctgtcccacgagagtgccagcgacccggccatgtggacagtcggtgggaagacagtgggcagctccagccgcttccaggccacacgtcagggccgaaaatacatcctggtggtccgggaggctgcaccaagtgatgccggggaggtggtcttctctgtgcggggcctcacctccaaggcctcactcattgtcagagagaggccggccgccatcatcaagcccctggaagaccagtgggtggcgccaggggaggacgtggagctgcgctgtgagctgtcacgggcgggaacgcccgtgcactggctgaaggacaggaaggccatccgcaagagccagaagtatgatgtggtctgcgagggcacgatggccatgctggtcatccgcggggcctcgctcaaggacgcgggcgagtacacgtgtgaggtggaggcttccaagagcacagccagcctccatgtggaagaaaaagcaaactgcttcacagaggagctgaccaatctgcaggtggaggagaaaggcacagctgtgttcacgtgcaagacggagcaccccgcggccacagtgacctggcgcaagggcctcttggagctacgggcctcagggaagcaccagcccagccaggagggcctgaccctgcggctcaccatcagtgccctggagaaggcagacagcgacacctatacctgcgacattggccaggcccagtcccgggcccagctcctagtgcaaggccggagagtgcacatcatcgaggacctggaggatgtggatgtgcaggagggctcctcggccaccttccgttgccggatctccccggccaactacgagcctgtgcactggttcctggacaagacacccctgcatgccaacgagctcaatgagatcgatgcccagcccgggggctaccacgtgctgaccctgcggcagctggcgctcaaggactcgggcaccatctactttgaggcgggtgaccagcgggcctcggccgccctgcgggtcactgagaagccaagcgtcttctcccgggagctcacagatgccaccatcacagagggtgaggacttgaccctggtgtgcgagaccagcacctgcgacattcctgtgtgctggaccaaggatgggaagaccctgcgggggtctgcccggtgccagctgagccatgagggccaccgggcccagctgctcatcactggggccaccctgcaggacagtggacgctacaagtgtgaggctgggggcgcctgcagcagctccattgtcagggtgcatgcgcggccagtgcggttccaggaggccctgaaggacctggaggtgctggagggtggtgctgccacactgcgctgtgtgctgtcatctgtggctgcgcccgtgaagtggtgctatggaaacaacgtcctgaggccaggtgacaaatacagcctacgccaggagggtgccatgctggagctggtggtccggaacctccggccgcaggacagcgggcggtactcatgctccttcggggaccagactacttctgccaccctcacagtgactgccctgcctgcccagttcatcgggaaactgagaaacaaggaggccacagaaggggccacggccacgctgcggtgtgagctgagcaaggcagcccctgtggagtggagaaaggggtccgagaccctcagagatggggacagatactgtctgaggcaggacggggccatgtgtgagctgcagatccgtggcctggccatggtggatgccgcggagtactcgtgtgtgtgtggagaggagaggacctcagcctcactcaccatcaggcccatgcctgcccacttcataggaagactgagacaccaagagagcatagaaggggccacagccacgctgcggtgtgagctgagcaaggcggcccccgtggagtggaggaaggggcgtgagagcctcagagatggggacagacatagcctgaggcaggacggggctgtgtgcgagctgcagatctgtggcctggctgtggcagatgctggggagtactcctgtgtgtgtggggaggagaggacctctgccactctcaccgtgaaggccctgccagccaagttcacagagggtctgaggaatgaagaggccgtggaaggggccacagccatgttgtggtgtgaactgagcaaggtggcccctgtggagtggaggaaggggcccgagaacctcagagatggggacagatacatcctgaggcaggaggggaccaggtgtgagctgcagatctgtggcctggccatggcggacgccggggagtacttgtgtgtgtgcgggcaggagaggacctcagccacgctcaccatcagggctctgcctgccaggttcatagaagatgtgaaaaaccaggaggccagagaaggggccacagctgtgctgcagtgtgagctgaacagtgcagcccctgtggagtggagaaaggggtctgagacccttagagatggggacagatacagcctgaggcaggacgggactaaatgtgagctgcagattcgtggcctggccatggcagacactggggagtactcgtgcgtgtgcgggcaggagaggacctcggctatgctcaccgtcagggctctacccatcaagttcacagagggtctgaggaacgaagaggccacagaaggggcaacagccgtgctgcggtgtgagctgagcaagatggcccccgtggagtggtggaaggggcatgagaccctcagagatggagacagacacagcctgaggcaggacggggccaggtgtgagctgcagatccgcggcctcgtggcagaggacgctggggagtacctgtgcatgtgcgggaaggagaggacctcagccatgctcaccgtcagggccatgccttccaagttcatagagggtctgaggaatgaagaggccacagaaggggacacggccacgctgtggtgtgagctgagcaaggcggcaccggtggagtggaggaaggggcatgagaccctcagagatggggacagacacagcctgaggcaggacgggtccaggtgtgagctgcagatccgtggcctggctgtggtggatgccggggagtactcgtgtgtgtgcgggcaggagaggacctcagccacactcactgtcagggccctgcctgccagattcatagaagatgtgaaaaaccaggaggccagagaaggggccacggccgtgctgcaatgtgagctgagcaaggcggcccccgtggagtggaggaaggggtctgagaccctcagaggtggggacagatacagcctgaggcaggatgggaccagatgtgagctgcagattcatggcctgtctgtggcagacactggggagtactcgtgtgtgtgcgggcaggagaggacctcggccacactcaccgtcagggccccacagccagtgttccgggagccgctgcagagtctgcaggcggaggagggctccacggccaccctgcagtgtgagctgtctgagcccactgctacagtggtctggagcaagggtggcctgcagctgcaggccaatgggcgccgggagccacggcttcagggctgcaccgcggagctggtgttacaggacctacaacgtgaagacactggcgaatacacttgcacctgtggctcccaggccaccagtgccaccctcactgtcacagctgcgcctgtgcggttcctccgagagctgcagcaccaggaggtggatgagggaggcaccgcacacttatgctgcgagctgagccgggcgggtgcgagcgtggagtggcgcaagggctccctacagctcttcccttgtgccaagtaccagatggtgcaggatggtgcagctgcagagctgctggtacgcggagtggagcaggaggatgcgggtgactacacgtgtgacacgggccacacgcagagcatggccagcctctctgtccgtgtccccaggcccaagttcaagacccggcttcagagtctggagcaggagacaggtgacatagcccggctgtgctgtcagctgagtgatgcagagtcgggggccgtggtgcaatggctcaaggagggcgtggagctgcatgcgggccccaagtacgagatgcggagccagggggccacgcgggagctgctgatccaccaactggaggccaaggacacgggcgagtatgcctgtgtgacaggcggccagaaaaccgctgcctccctcagggtcacagagcctgaggtgaccattgtacgggggctggttgatgcggaggtgacggccgatgaggatgttgagttcagctgtgaggtgtccagggctggagccacaggcgtgcagtggtgcctacagggcctgccactgcaaagcaatgaggtgacagaggtggctgtgcgggatggccgcatccacaccctgcggctgaagggcgtgacgcccgaggacgctggcactgtctccttccatttgggaaaccatgcttcctctgcccagctcaccgtcagagctcctgaggtgaccatcctggagcccctgcaggacgtgcagctcagtgagggccaggatgccagcttccagtgccggctatccagagcttcaggccaggaggcccgctgggctttaggaggggtgcccctgcaggccaacgagatgaatgacatcactgtggagcagggcacactccacctgctcaccctgcacaaggtgacccttgaggatgctggaactgtcagtttccacgtgggcacgtgtagctctgaggcccagctgaaagtcacagccaagaacacggtggtgcgggggctggagaatgtggaggcgctggagggcggcgaggcgctgttcgagtgccagctgtcccagcccgaggtggccgcccacacctggctgctggacgacgaacccgtgcacacctcggagaacgccgaggtggtcttcttcgagaacggcctgcgccacctgctgctgctcaaaaacttgcggccacaagacagctgccgggtgaccttcctggctggggatatggtgacgtccgcattcctcacggtccgaggctggcgcctggagatcctggagcctctgaaaaacgcggcggtccgggccggcgcacaggcatgcttcacctgcacgctcagcgaggcggtgcccgtgggagaggcgtcctggtacatcaatggcgcggcagtgcagccggatgacagcgactggactgtcaccgccgacggcagtcaccacgccctactgctgcgcagcgcccagccccaccacgccggggaggtcaccttcgcttgccgcgacgccgtggcctctgcgcggctcaccgtgctgggcctccctgatcccccagaggatgctgaggtggtggctcgcagcagccacactgtgacactgtcttgggcagctcccatgagtgatggaggcggtggtctctgtggctaccgcgtggaggtgaaggagggggccacaggccagtggcggctgtgccacgagctggtgcctggacccgagtgtgtggtggatggcctggcccccggggagacctaccgcttccgtgtggcagctgtgggccctgtgggtgctggggaaccggttcacctgccccagacagtgcggcttgcagagccaccgaagcctgtgcctccccagccctcagcccctgagagccggcaggtggcagctggtgaagatgtctctctggagcttgaggtggtggctgaggctggtgaggtcatctggcacaagggaatggagcgcatccagcccggtgggcggttcgaggtggtctcccagggtcggcaacagatgctggtgatcaagggcttcacggcagaagaccagggcgagtaccactgtggcctggctcagggctccatctgccctgcggctgccaccttccaggtggcactgagcccagcctctgtggatgaggcccctcagcccagcttgccccccgaggcagcccaggagggtgacctgcacctactgtgggaggccctggctcggaaacgtcgcatgagccgtgagcccacgctggactccattagcgagctgccagaggaggacggccgctcgcagcgcctgccacaggaggcagaggaggtggcacctgatctctctgaaggctactccacggccgatgagctggcccgcactggagatgctgacctctcacacaccagctctgatgatgagtcccgggcaggcaccccttccctggtcacctacctcaagaaggctgggaggccaggcacctcaccactggccagcaaggttggggccccagcagccccctctgtgaagccacagcagcagcaggagccactggctgctgtgcgcccaccactgggagacctgagcaccaaagacctgggtgatccctcaatggacaaggcagctgtgaagatccaggctgcctttaagggctacaaggtccggaaggagatgaagcagcaggaagggcccatgttctcccacacatttggggacaccgaggcacaggtgggggatgccctgcggctggagtgtgtcgtggccagcaaggcagatgtgcgagcccgctggctgaaggatggtgtggagctgaccgatgggcggcaccatcacatcgaccagcttggggatggcacctgctctctgctgatcactggcctggaccgtgctgatgctggctgctacacctgtcaggtgagcaacaagtttggccaggtgacccacagtgcctgtgtggtggtcagtgggtcagagagtgaagccgagagctcctctgggggtgagctggacgatgccttccgccgggctgcccgtcggctgcaccggctcttccgcaccaaaagtccggctgaagtttcagatgaggagctcttcctgagtgcagacgagggccctgcagagccagaggagcccgcggactggcagacataccgcgaagatgagcatttcatctgcatccgttttgaggcgctcactgaggcccgccaggcggtaactcgcttccaggagatgtttgccacactgggcattggggtggagatcaagctggtggaacaggggcctcggagggtagagatgtgcatcagcaaagagactcctgcccctgtggtgcctccagagccattgcccagcctactgacttctgacgctgccccagtgttcctgactgagttgcagaaccaagaagtgcaggatgggtatcctgtgagctttgactgcgtggtgacaggtcagcccatgcccagtgtgcgctggttcaaggatgggaagttgttggaggaggatgatcactacatgattaatgaagaccaacagggtggccatcagctcatcatcacagccgtggtgccagcagacatgggcgtctaccgctgcctggccgagaacagcatgggtgtctcctccaccaaggctgagctccgtgtggacttgacaagcacagactatgacactgcagcagatgccacggagtcctcatcctacttcagtgcccaaggctacctgtccagccgggagcaggagggaacagagtccaccactgatgagggccagctgccccaggtggtggaggagctgagagacctccaggtggcccctggcacacgcctggccaagttccagctcaaggtgaaaggctaccctgctcccagattatactggttcaaagatggccagcccctgaccgcatctgcccacatccgcatgactgacaagaagatcctgcacaccctggagatcatctccgtcacccgggaggactctggccagtatgcagcctatatcagcaatgccatgggtgctgcctactcgtctgcccggctgctggttcgaggccctgatgagccagaagagaagcctgcatcagatgtgcatgagcagctggtgccgccccgaatgctggagaggttcacccccaagaaagtgaagaaaggctccagcatcaccttctctgtgaaggtagaaggacgcccggtgcccaccgtgcactggctcagggaggaggctgagagaggcgtgctgtggattggccctgacacaccgggctacaccgtggccagctctgcgcagcagcacagcctggtcctgctggacgtgggccggcagcaccagggcacctacacatgcattgccagcaacgctgccggccaggccctctgctccgccagcctgcacgtctcgggcctgcctaaggtggaggagcaggagaaagtgaaggaagcgctgatttccactttcctgcaggggaccacacaagccatctcagcacaggggttggaaactgcgagttttgctgaccttggtgggcagaggaaagaagagcctctggctgccaaggaggccctcggccacctgtccctcgctgaggtgggcacagaggagttcctgcagaaactgacctcccagatcactgagatggtatcggccaagatcacgcaggccaagctgcaggtgcccggaggtgacagtgatgaggactccaagacaccatctgcatccccccgccatggccgatcacggccatcctccagcatccaggagtcttcctcagagtcagaggacggcgatgcccgaggcgagatctttgacatctacgtggtcaccgctgactacctgcccctaggggctgagcaggatgccatcacgctgcgggaaggccagtatgtggaggtcctggatgcagcccacccactgcgctggcttgtccgcaccaagcccaccaagtccagcccctcacggcagggctgggtgtcaccagcctacctggacaggaggctcaagctgtcacctgagtggggggccgctgaggcccctgagttccctggggaggctgtgtctgaagacgaatacaaggcaaggctgagctctgtgatccaggagctgctgagttctgagcaggccttcgtggaggagctgcagttcctgcagagccaccacctgcagcacctggagcgctgcccccacgtgcccatagctgtggccggccagaaggcagtcatcttccgcaatgtgcgggacatcggccgcttccacagcagcttcctgcaggagttgcagcagtgcgacacggacgacgacgtggccatgtgcttcatcaagaaccaggcggcctttgagcagtacctggagttcctggtggggcgtgtgcaggctgagtcggtggtcgtcagcacggccatccaggagttctacaagaaatacgcggaggaggccctgttggcaggggacccctctcagcccccgccaccacctctgcagcactacctggagcagccagtggagcgggtgcagcgctaccaggccttgctgaaggagctgatccgcaacaaggcgcggaacagacagaactgcgcgctgctggagcaggcctatgccgtggtgtctgccctgccacagcgcgctgagaacaagctgcacgtgtccctcatggagaactacccaggcaccctgcaggccctgggcgagcccatccgccagggccacttcatcgtgtgggagggtgcaccgggggcccgcatgccctggaagggccacaaccgtcacgtgttcctcttccgcaaccacctggtaatctgcaagccccggcgagactcccgcaccgataccgtcagctacgtgttccggaacatgatgaagctgagcagcatcgacctgaacgaccaggtggagggggatgaccgcgccttcgaggtgtggcaggagcgggaggactcggtgcgcaagtacctgctgcaggcacggacagccattatcaagagctcgtgggtgaaggagatctgtggcatccagcagcgtctggccctgcctgtgtggcggcccccggactttgaagaggagctggccgactgcacagccgagctgggtgagacagtcaagctggcctgccgcgtgacgggcacacccaagcctgtcatcagctggtacaaagatgggaaagcagtgcaggtggacccccaccacatcctcattgaagaccctgatggctcgtgtgcactcatcctggacagcctgaccggtgtggactctggccagtacatgtgcttcgcggccagcgccgctggcaactgcagtaccctgggcaagatcctggtgcaagtcccaccacggttcgtgaacaaggtccgggcctcaccctttgtggagggagaggacgcccagttcacctgcaccatcgaaggcgccccgtacccgcagatcaggtggtacaaggacggggccctgctgaccactggcaacaagttccagacactgagtgagcctcgcagcggcctgctagtgctggtgatccgggcggccagcaaggaggacctggggctctacgagtgtgagctggtgaaccggctgggctccgcgcgggctagtgcggagctgcgcattcagagccccatgctgcaggcccaggagcagtgtcacagggagcagctcgtggctgcagtggaagtcactgagcaagagactaaagtccccaagaaaaccgtcatcatagaagagaccatcaccactgtggtgaagagcccacgtggccaacgacggtcccccagcaagtccccctcccgctcaccttcccgctgctctgccagcccgctgaggccaggcctactggcccccgacctgctgtacctgccaggtgctggccagccccgcaggccggaggcagaaccaggccagaagcccgtggtgcccacactgtatgtgacggaggccgaggcccactctccagctctgcccggactctcggggccccagcccaagtgggtggaggtggaggagaccattgaagtccgggtgaagaagatgggcccgcagggtgtgtctcccaccacagaggtgcccaggagctcatcggggcatctcttcacactgcccggtgcgacccccggaggggaccccaattccaacaactccaacaacaagctgctggcccaggaggcctgggcccagggcacagccatggtcggcgtcagagagccccttgtcttccgcgtggatgccagaggcagtgtggactgggctgcttctggcatgggcagcctggaggaggagggcaccatggaggaggcgggagaggaagagggggaagacggagacgcctttgtgacggaggagtcccaggacacacacagccttggggatcgtgaccccaagatcctcacgcacaacggccgcatgctgacactggctgacctggaagattacgtgcctggggaaggggagaccttccactgtggtggccctgggcctggcgcccctgatgaccctccctgcgaggtctcggtgatccagagagagatcggggagcccacggtggggcagcctgtgctgctcagcgtggggcatgcactgggtccccgaggccctctcggcctctttaggcctgagccccgtggggcgtcaccaccgggaccccaggtccgtagccttgagggcacctccttcctcttgcgggaggccccggctcggcctgtgggcagtgctccctggacgcagtctttctgcacccgcatccggcgttctgcggacagtggccagagcagcttcaccacagagctttccacccagaccgtcaacttcgggacagtgggggagacggtcacccttcacatctgcccagacagggatggggatgaggcggcacagccctgatgctgctgccatggtggcttggggcagcggggagaaaggagtgtccttgaggcctaggacgctgcccggcctcagcagcagccctgggagcctcctgagggccctccctgtccctggccacgggcccttcttacctcactcaacttcagccaggaggactgggtggtgcttgcaatgttggaatgaccggctcaaagacctcagctctgggctgtttcctgtcagcctggcaggagcctcaggactgtggacgaaggatgtggccttgggcatttgtcctgttcccacatgggcctggtccctccctcctggccccagccacagctgccaggcctgacatggccttgcctctcctgcagtcttggtgactgagacccttgggtggcgcttcccagctctgcaggccctcctggccttttctgcagggtggacacagggtctgtgtgtgggcagcagcccctgtctctcagcaagaataaagcagcttcctgtgca

SEQ ID NO: 3419 - protein, 6620 aa, Homo sapiens
MDQPQFSGAPRFLTRPKAFVVSVGKDATLSCQIVGNPTPQVSWEKDQQPVAAGARFRLAQDGDLYRLTILDLALGDSGQYVCRARNAIGEAFAAVGLQVDAEAACAEQAPHFLLRPTSIRVREGSEATFRCRVGGSPRPAVSWSKDGRRLGEPDGPRVRVEELGEASALRIRAARPRDGGTYEVRAENPLGAASAAAALVVDSDAADTASRPGTSTAALLAHLQRRREAMRAEGAPASPPSTGTRTCTVTEGKHARLSCYVTGEPKPETVWKKDGQLVTEGRRHVVYEDAQENFVLKILFCKQSDRGLYTCTASNLVGQTYSSVLVVVREPAVPFKKRLQDLEVREKESATFLCEVPQPSTEAAWFKEETRLWASAKYGIEEEGTERRLTVRNVSADDDAVYICETPEGSRTVAELAVQGNLLRKLPRKTAVRVGDTAMFCVELAVPVGPVHWLRNQEEVVAGGRVAISAEGTRHTLTISQCCLEDVGQVAFMAGDCQTSTQFCVSAPRKPPLQPPVDPVVKARMESSVILSWSPPPHGERPVTIDGYLVEKKKLGTYTWIRCHEAEWVATPELTVADVAEEGNFQFRVSALNSFGQSPYLEFPGTVHLAPKLAVRTPLKAVQAVEGGEVTFSVDLTVASAGEWFLDGQALKASSVYEIHCDRTRHTLTIREVPASLHGAQLKFVANGIESSIRMEVRAAPGLTANKPPAAAAREVLARLHEEAQLLAELSDQAAAVTWLKDGRTLSPGPKYEVQASAGRRVLLVRDVARDDAGLYECVSRGGRIAYQLSVQGLARFLHKDMAGSCVDAVAGGPAQFECETSEAHVHVHWYKDGMELGHSGERFLQEDVGTRHRLVAATVTRQDEGTYSCRVGEDSVDFRLRVSEPKVVFAKEQLARRKLQAEAGASATLSCEVAQAQTEVTWYKDGKKLSSSSKVCMEATGCTRRLVVQQAGQADAGEYSCEAGGQRLSFHLDVKEPKVVFAKDQVAHSEVQAEAGASATLSCEVAQAQTEVMWYKDGKKLSSSLKVHVEAKGCRRRLVVQQAGKTDAGDYSCEARGQRVSFRLHITEPKMMFAKEQSVHNEVQAEAGASAMLSCEVAQAQTEVTWYKDGKKLSSSSKVGMEVKGCTRRLVLPQAGKADAGEYSCEAGGQRVSFHLHITEPKGVFAKEQSVHNEVQAEAGTTAMLSCEVAQPQTEVTWYKDGKKLSSSSKVRMEVKGCTRRLVVQQVGKADAGEYSCEAGGQRVSFQLHITEPKAVFAKEQLVHNEVRTEAGASATLSCEVAQAQTEVTWYKDGKKLSSSSKVRIEAAGCMRQLVVQQAGQADAGEYTCEAGGQRLSFHLDVSEPKAVFAKEQLAHRKVQAEAGAIATLSCEVAQAQTEVTWYKDGKKLSSSSKVRMEAVGCTRRLVVQQACQADTGEYSCEAGGQRLSFSLDVAEPKVVFAKEQPVHREVQAQAGASTTLSCEVAQAQTEVMWYKDGKKLSFSSKVRMEAVGCTRRLVVQQAGQAVAGEYSCEAGSQRLSFHLHVAEPKAVFAKEQPASREVQAEAGTSATLSCEVAQAQTEVTWYKDGKKLSSSSKVRMEAVGCTRRLVVQEAGQADAGEYSCKAGDQRLSFHLHVAEPKVVFAKEQPAHREVQAEAGASATLSCEVAQAQTEVTWYKDGKKLSSSSKVRVEAVGCTRRLVVQQAGQAEAGEYSCEAGGQQLSFRLQVAELEPQISERPCRREPLVVKEHEDIILTATLATPSAATVTWLKDGVEIRRSKRHETASQGDTHTLTVHGAQVLDSAIYSCRVGAEGQDFPVQVEEVAAKFCRLLEPVCGELGGTVTLACELSPACAEVVWRCGNTQLRVGKRFQMVAEGPVRSLTVLGLRAEDAGEYVCESRDDHTSAQLTVSVPRVVKFMSGLSTVVAEEGGEATFQCVVSPSDVAVVWFRDGALLQPSEKFAISQSGASHSLTISDLVLEDAGQITVEAEGASSSAALRVREAPVLFKKKLEPQTVEERSSVTLEVELTRPWPELRWTRNATALAPGKNVEIHAEGARHRLVLHNVGFADRGFFGCETPDDKTQAKLTVEMRQVRLVRGLQAVEAREQGTATMEVQLSHADVDGSWTRDGLRFQQGPTCHLAVRGPMHTLTLSGLRPEDSGLMVFKAEGVHTSARLVVTELPVSFSRPLQDVVTTEKEKVTLECELSRPNVDVRWLKDGVELRAGKTMAIAAQGACRSLTIYRCEFADQGVYVCDAHDAQSSASVKVQGRTYTLIYRRVLAEDAGEIQFVAENAESRAQLRVKELPVTLVRPLRDKIAMEKHRGVLECQVSRASAQVRWFKGSQELQPGPKYELVSDGLYRKLIISDVHAEDEDTYTCDAGDVKTSAQFFVEEQSITIVRGLQDVTVMEPAPAWFECETSIPSVRPPKWLLGKTVLQAGGNVGLEQEGTVHRLMLRRTCSTMTGPVHFTVGKSRSSARLVVSDIPVVLTRPLEPKTGRELQSVVLSCDFRPAPKAVQWYKDDTPLSPSEKFKMSLEGQMAELRILRLMPADAGVYRCQAGSAHSSTEVTVEAREVTVTGPLQDAEATEEGWASFSCELSHEDEEVEWSLNGMPLYNDSFHEISHKGRRHTLVLKSIQRADAGIVRASSLKVSTSARLEVRVKPVVFLKALDDLSAEERGTLALQCEVSDPEAHVVWRKDGVQLGPSDKYDFLHTAGTRGLVVHDVSPEDAGLYTCHVGSEETRARVRVHDLHVGITKRLKTMEVLEGESCSFECVLSHESASDPAMWTVGGKTVGSSSRFQATRQGRKYILVVREAAPSDAGEVVFSVRGLTSKASLIVRERPAAIIKPLEDQWVAPGEDVELRCELSRAGTPVHWLKDRKAIRKSQKYDVVCEGTMAMLVIRGASLKDAGEYTCEVEASKSTASLHVEEKANCFTEELTNLQVEEKGTAVFTCKTEHPAATVTWRKGLLELRASGKHQPSQEGLTLRLTISALEKADSDTYTCDIGQAQSRAQLLVQGRRVHIIEDLEDVDVQEGSSATFRCRISPANYEPVHWFLDKTPLHANELNEIDAQPGGYHVLTLRQLALKDSGTIYFEAGDQRASAALRVTEKPSVFSRELTDATITEGEDLTLVCETSTCDIPVCWTKDGKTLRGSARCQLSHEGHRAQLLITGATLQDSGRYKCEAGGACSSSIVRVHARPVRFQEALKDLEVLEGGAATLRCVLSSVAAPVKWCYGNNVLRPGDKYSLRQEGAMLELVVRNLRPQDSGRYSCSFGDQTTSATLTVTALPAQFIGKLRNKEATEGATATLRCELSKAAPVEWRKGSETLRDGDRYCLRQDGAMCELQIRGLAMVDAAEYSCVCGEERTSASLTIRPMPAHFIGRLRHQESIEGATATLRCELSKAAPVEWRKGRESLRDGDRHSLRQDGAVCELQICGLAVADAGEYSCVCGEERTSATLTVKALPAKFTEGLRNEEAVEGATAMLWCELSKVAPVEWRKGPENLRDGDRYILRQEGTRCELQICGLAMADAGEYLCVCGQERTSATLTIRALPARFIEDVKNQEAREGATAVLQCELNSAAPVEWRKGSETLRDGDRYSLRQDGTKCELQIRGLAMADTGEYSCVCGQERTSAMLTVRALPIKFTEGLRNEEATEGATAVLRCELSKMAPVEWWKGHETLRDGDRHSLRQDGARCELQIRGLVAEDAGEYLCMCGKERTSAMLTVRAMPSKFIEGLRNEEATEGDTATLWCELSKAAPVEWRKGHETLRDGDRHSLRQDGSRCELQIRGLAVVDAGEYSCVCGQERTSATLTVRALPARFIEDVKNQEAREGATAVLQCELSKAAPVEWRKGSETLRGGDRYSLRQDGTRCELQIHGLSVADTGEYSCVCGQERTSATLTVRAPQPVFREPLQSLQAEEGSTATLQCELSEPTATVVWSKGGLQLQANGRREPRLQGCTAELVLQDLQREDTGEYTCTCGSQATSATLTVTAAPVRFLRELQHQEVDEGGTAHLCCELSRAGASVEWRKGSLQLFPCAKYQMVQDGAAAELLVRGVEQEDAGDYTCDTGHTQSMASLSVRVPRPKFKTRLQSLEQETGDIARLCCQLSDAESGAVVQWLKEGVELHAGPKYEMRSQGATRELLIHQLEAKDTGEYACVTGGQKTAASLRVTEPEVTIVRGLVDAEVTADEDVEFSCEVSRAGATGVQWCLQGLPLQSNEVTEVAVRDGRIHTLRLKGVTPEDAGTVSFHLGNHASSAQLTVRAPEVTILEPLQDVQLSEGQDASFQCRLSRASGQEARWALGGVPLQANEMNDITVEQGTLHLLTLHKVTLEDAGTVSFHVGTCSSEAQLKVTAKNTVVRGLENVEALEGGEALFECQLSQPEVAAHTWLLDDEPVHTSENAEVVFFENGLRHLLLLKNLRPQDSCRVTFLAGDMVTSAFLTVRGWRLEILEPLKNAAVRAGAQACFTCTLSEAVPVGEASWYINGAAVQPDDSDWTVTADGSHHALLLRSAQPHHAGEVTFACRDAVASARLTVLGLPDPPEDAEVVARSSHTVTLSWAAPMSDGGGGLCGYRVEVKEGATGQWRLCHELVPGPECVVDGLAPGETYRFRVAAVGPVGAGEPVHLPQTVRLAEPPKPVPPQPSAPESRQVAAGEDVSLELEVVAEAGEVIWHKGMERIQPGGRFEVVSQGRQQMLVIKGFTAEDQGEYHCGLAQGSICPAAATFQVALSPASVDEAPQPSLPPEAAQEGDLHLLWEALARKRRMSREPTLDSISELPEEDGRSQRLPQEAEEVAPDLSEGYSTADELARTGDADLSHTSSDDESRAGTPSLVTYLKKAGRPGTSPLASKVGAPAAPSVKPQQQQEPLAAVRPPLGDLSTKDLGDPSMDKAAVKIQAAFKGYKVRKEMKQQEGPMFSHTFGDTEAQVGDALRLECVVASKADVRARWLKDGVELTDGRHHHIDQLGDGTCSLLITGLDRADAGCYTCQVSNKFGQVTHSACVVVSGSESEAESSSGGELDDAFRRAARRLHRLFRTKSPAEVSDEELFLSADEGPAEPEEPADWQTYREDEHFICIRFEALTEARQAVTRFQEMFATLGIGVEIKLVEQGPRRVEMCISKETPAPVVPPEPLPSLLTSDAAPVFLTELQNQEVQDGYPVSFDCVVTGQPMPSVRWFKDGKLLEEDDHYMINEDQQGGHQLIITAVVPADMGVYRCLAENSMGVSSTKAELRVDLTSTDYDTAADATESSSYFSAQGYLSSREQEGTESTTDEGQLPQVVEELRDLQVAPGTRLAKFQLKVKGYPAPRLYWFKDGQPLTASAHIRMTDKKILHTLEIISVTREDSGQYAAYISNAMGAAYSSARLLVRGPDEPEEKPASDVHEQLVPPRMLERFTPKKVKKGSSITFSVKVEGRPVPTVHWLREEAERGVLWIGPDTPGYTVASSAQQHSLVLLDVGRQHQGTYTCIASNAAGQALCSASLHVSGLPKVEEQEKVKEALISTFLQGTTQAISAQGLETASFADLGGQRKEEPLAAKEALGHLSLAEVGTEEFLQKLTSQITEMVSAKITQAKLQVPGGDSDEDSKTPSASPRHGRSRPSSSIQESSSESEDGDARGEIFDIYVVTADYLPLGAEQDAITLREGQYVEVLDAAHPLRWLVRTKPTKSSPSRQGWVSPAYLDRRLKLSPEWGAAEAPEFPGEAVSEDEYKARLSSVIQELLSSEQAFVEELQFLQSHHLQHLERCPHVPIAVAGQKAVIFRNVRDIGRFHSSFLQELQQCDTDDDVAMCFIKNQAAFEQYLEFLVGRVQAESVVVSTAIQEFYKKYAEEALLAGDPSQPPPPPLQHYLEQPVERVQRYQALLKELIRNKARNRQNCALLEQAYAVVSALPQRAENKLHVSLMENYPGTLQALGEPIRQGHFIVWEGAPGARMPWKGHNRHVFLFRNHLVICKPRRDSRTDTVSYVFRNMMKLSSIDLNDQVEGDDRAFEVWQEREDSVRKYLLQARTAIIKSSWVKEICGIQQRLALPVWRPPDFEEELADCTAELGETVKLACRVTGTPKPVISWYKDGKAVQVDPHHILIEDPDGSCALILDSLTGVDSGQYMCFAASAAGNCSTLGKILVQVPPRFVNKVRASPFVEGEDAQFTCTIEGAPYPQIRWYKDGALLTTGNKFQTLSEPRSGLLVLVIRAASKEDLGLYECELVNRLGSARASAELRIQSPMLQAQEQCHREQLVAAVEVTEQETKVPKKTVIIEETITTVVKSPRGQRRSPSKSPSRSPSRCSASPLRPGLLAPDLLYLPGAGQPRRPEAEPGQKPVVPTLYVTEAEAHSPALPGLSGPQPKWVEVEETIEVRVKKMGPQGVSPTTEVPRSSSGHLFTLPGATPGGDPNSNNSNNKLLAQEAWAQGTAMVGVREPLVFRVDARGSVDWAASGMGSLEEEGTMEEAGEEEGEDGDAFVTEESQDTHSLGDRDPKILTHNGRMLTLADLEDYVPGEGETFHCGGPGPGAPDDPPCEVSVIQREIGEPTVGQPVLLSVGHALGPRGPLGLFRPEPRGASPPGPQVRSLEGTSFLLREAPARPVGSAPWTQSFCTRIRRSADSGQSSFTTELSTQTVNFGTVGETVTLHICPDRDGDEAAQP

SEQ ID NO: 3420 - DNA, 722 bp, Homo sapiens
aggccagcagtgtgtatgagatccactgtgatcgcacccggcacacgctcaccatccgggaggtgcccgccagcctgcacggggcgcagctgaagttcgtggccaacggcattgagagcagcatccggatggaggtccgggcggccccagggctgactgccaacaagccgccagccgcagctgcccgggaggtgctggctcggctgcacgaggaggcgcagctgctggctgagctgtcagatcaggctgcggctgtgacgtggctgaaggatggtcgcacactgtccccaggccccaagtatgaggtgcaggcatcggccgggcggcgggtgctccttgtgcgagatgtggcccgggacgatgcaggcctctacgagtgcgtcagccgcgggggccgcatcgcctaccagctctccgtgcaaggcctcgcgcgctttctgcacaaggacatggcgggcagctgtgtggatgccgtggctgggggcccggcgcagtttgagtgtgagacctccgaagcccacgtccacgtgcactggtacaaggatggcatggagctgggccactccggtgagcgcttcttgcaggaggatgtggggacgcggcaccggctggtggcagccacagtcaccaggcaggatgaaggcacctactcctgccgcgtgggcgaggactctgtggacttccggctccgcgtctctgcaaatggttgacagtgtcaactg

SEQ ID NO: 3421 - protein, 193 aa, Homo sapiens
MEVRAAPGLTANKPPAAAAREVLARLHEEAQLLAELSDQAAAVTWLKDGRTLSPGPKYEVQASAGRRVLLVRDVARDDAGLYECVSRGGRIAYQLSVQGLARFLHKDMAGSCVDAVAGGPAQFECETSEAHVHVHWYKDGMELGHSGERFLQEDVGTRHRLVAATVTRQDEGTYSCRVGEDSVDFRLRVSANG

SEQ ID NO: 3422 - DNA, 6763 bp, Homo sapiens
ttctttgattgtttaaccttacaaaaatttagactagtaacttatttcacactgaaaagtgagttccaggaaggttagaggccacagagtataaaaggtaaaaccataaagcctctagatgctaacatagattgctaaaaacttcagggaaaggaaagatttcttaaaactaaacagtggaacaatggtatatttaactacattaaaactaaaactttaatttgtcaagacatcatttgagagcgaaaaggccggtcaaggacatgggtaagatgtttacaaatacacagttatcatttgctagcatttaaaatatataaagagttcctaaaaataaggaaggaaaagacagaaaaggctactgaaaattggacagaagcctgaagagcgacaccccagaagagctgacgtaatggccagaagtggtggaaagggctccaccttgcatgtcaccaggcaatgcatgacaaagcccaggccttccccgcagaggccaacgctgaccctcctgacagtggcaggactggaagcctcagtactctggggccctgcagtgaggacacgccctgcccagtcccatggggagaccctagcatatccttgaagggagctgtgtaagcattaggaacccagtccctgcactggaggagctcgtgcacggagggtttgtcacaactgccccgcctggaatagcccatggcactgcacagtggatggagaaactgtgattcttgtgctgggaggtggtggggcttctcccagctacatggccagtgccaagcttgggaaggttctgtttctcctactttcttgtctaggccctcctaccctagggtggtcttcctgacctgggcagtatctttgacctcgtgtgtccctccttgtccatccccagagcccaaggtggtgtttgccaaggagcagccagcacacagggaggtgcaggctgaggcgggggccagtgccacgctgagctgcgaggtggcccaggcccagacagaggtgacgtggtacaaggatgggaagaagctgagttccagctcgaaagtgcgcgtggaggccgtgggctgcacacggaggctggtggtgcagcaggcgggccaggcagaggccggggagtacagctgcgaggcagggggtcagcagctctccttccgcctgcaggtggcaggtcagtgctttggggatgctgagtgagccctgtttgtagctgctgctgtgactggagtagaaccactgctgacccagtgggctttccattagactccatccctcaacttctcccatcctctcacctcctatttttatgcctgtggtggagctgggctgcttagtggggaagggagtgaacggaagggtcagggccctccttgtccatgttgggtggtgtttctgtgcagacatgctgggtcacattttcccagtaccttctccaaactaccgatgtcccgaggtgtccaggactctggtcctatctaatgcatgagatggcggtaagccagacgtccctccctcggggatactcctgcagtccctgcacggcctcatctggccccatgtgagggctctccctgtggaaagagattttaattcgttgagtcagggtgtagggaaattccagccacacagtcttatttggaattatatcaacactgaacactgggttcccaaagttttcagtgttctgggacacacttctgtccttccctgtggatgtagaagccctgtcagagccctgactaaaacccagatccacagcgttagtgtgtgcaaaacgagtaaagagcagcacattggcaggtgcgcacacgtgacgttggaattccatttcggaagccaatctcactttccttttgcattctgttagaatgttctgtgtctgaattccccttggaatttggatagatttaaaagtgataggaataagtagctggtgtttctagcctccgcctccaggcgggtgaggaggtgacacctgagaattcctccctctcacccctgaccctgccggaaagcgaaactgagatgcgggcattgggccctgggaagcgtggggaaggggaaaggagaaagccaggtgggtttttaggtcccttccagtgccacactgtggggtgttgaggggccgcgcgaggcaggcccttccatgaggcctggactggaggccttctctaggcgccggcgtggcctgggccgcctgccgccacgcaggggccgcacgcctgggccccagggcccctttgccggcgggaggccggggggaccgactgctcttggcgcccggggtcaggggaggccgggaaacctcggctcccgggcgacaggcacccaggcccttctcagccccccggccgcggccgcgccgggcctcgcttcagccgggcgattcttcccctcatttgttgcattgtttgcattaatatgaatatcttgttctgtttgttttgtctcctgagagccaataaagctgtgttttttctttacaccaaaaaaaaaaaaaaaaaaaaaaaggaataagtagcttatggcacagtgacacactggtagaattaagttatggtggtagcagtcgctgactggggaagccatatttacatcatcctgtttccttgatgagtcctgtgcctgccccctctccagctgattcataggaagtctgagaatgacctttactttcctattgtttgttaggagagtttaacttcaaactccaaccctgagccctgagtgccaccacataacagttggtgttatatatatctaaaatggtttacaaatgtgtagataccaaaaatactcactgcaagtaaatttgaaaagtgttaacaaattatataatttctagaaaccaaaaacagacttaagaaatagataacctatatgcagttatctactgttactgaagttatctcagttactacaacctagtaaaaactagaaccggtagcgaaaaatcttctcatcaaacatgtggccctactgagaaattcttccaaacgttctggccagaaattcttccatgttcatggaaattcttctggagaatggaaaaaggaagatataccctctaactcattatatgcagatagcttaatgccatgactaaaatctggccagaagataggaagtttgcacattgtagatcaaagaattatggatatcatggccaattttttaaacaaaacattagtaaactgaattcagcaatacatcaagacaatcatacaggatgatgaaattcatagtctaggaatgagggctgctttcatgttaaaaacattagaaaatcatgatatgtgattgaaatttgaaaacaatgtaattatcttaaactcagaataaagtaccatatttgataaaaatttaacctcatatattcagaagaaatgtctggcaaaatttagcatccatcatgccataaaattcttaacaaagtataaataaaagtttttttttcctaatttgacacagggtattacacaaaaatcacaaagggagactttgtaagctttgcctctgagccaggggacagcatgaggaagccagtggtcaacacttccatccagcattggatggcacagttaggaggaaagtaaaacgaaaggtgtaaaagttagaaaaaagtgaattgacagaatatacggtttacctagaagataaattattagagagttgagaaagatcaacccttgcaagatctgtgtgaagaaacttccgtacatgtagactagcagcaagcagttggaaaatgaaaacgtaaaagattgacagacgcctcaaaggcatcatgtttatgatcccagtctaataaaagatgtcgagaggttctgtgggggaagctatgaaacacttttgagagacagtaaagatctaaagtggatagaagccatggaagaatgaaagacgttcagtctcaatcaaaatccaaacaaatgtggttttgggggatgcaaggttgaaaaatgacaagtggatttaaagctccatacatgcttgaagaagagccgcatgtgcaggtaccctagtccctgccctggaggagctcatgcatggagggtttgtcatagctgccccacctgtgatagcccatggcgccgtgcacagtggatagacaaactgtgattcttgcgctgggaggtggcaggacttctcctggccacgcagccagtgcagagcctggggaaggttctgtttctcctacttcctcatccaggccctcctatcctagggtggtcttcctgacctaggctgtatctttgacctcgtatgtccttccttgtccatccccagagcccaaggcggtgtttgccaaggagcaggtggtgtttgccaaggatcagccggtgcacagggaggtgcaggctgaggcagggaccagcaccatgctgagctgcgaggtggcccaagcccagacggaggttatgtggtacaaggacgggaagaagctgagctccagctcgaaaatgcgtgtggaggccgtgggctgcacacggaggctggtggtgcaggaggcaggccaggcggacgccggggagtacagctgcgaggctgggggccagcggctctccttccatctgcatgtggctggtgggtgccagggttaggcaaaatggaggtgatgctgagtgtcgggtgtgaaactacaagggcatgtttgggcggcccaaggtgctgtgggccctggcaccttccctctatgtaggcctcagaatctgtgtccccagctctccccagcagctctcaggccagtgtccttatgtcatgagactagagcaggcccatgggctgagttgaccatggtgtgtgccctgcagtggctgagccgggggtggtagggacagtagcatgatgtccttggggtgtgggtctggggtctgggtccggtctcatgtgaggacccctgtctgggtggtagggacagtagcgtgatgtcctcgggggtctggggtccgggtctggtcagatgtgatgatttctgtctgggtggtggggacagtggtgtgatgtccttggggtgggggtctgggtctggtctaatgtgatctgctgactcctctgtgggtgctgggccatgggagggcccggcagtgactggagagcgtgtactgggtggtgggggcttgtctctgtgctctgggccctagatctctgtaagcctgtgctgggccccttggtcatcaccatgtgtccacctgtctttctgatatccatctcccttccaccctgtccctgagctggggacaacagaccacactcagcttggcaccctctttccaatggccctgccaacactccgctgcctctgggctggcccaggttgctggtccatctctcctgacccttcacgtcctactgcctgtggccctgcgtggtggggagggctggcgacaggtgagggccccagggccctggaagaccgaggcagggaaggggccgcatcctgttcccaagggacatgatgatggtgctgccaacatgcagccttagacctttggctctggtagtgccggggggagctctgtgcgtcaccgtgcactgcttaatgatggacagccctgcctggctgtcactgggctgacacatgggctgtgtctgctctggagcctctgaccctgcatccctccttgtccatcccagagcccaaggtggtgtttgccaaggagcagccggcatgcagggaggtgcaggcggaggcgggggccagtgccacgctgagctgtgaggtggcccagggccagatggaggtgacatggtacaaggacgggaagaagctgagctccagctcaaaagtgcacatggaggccagcggctacacacggaggctggtagtgcagcaggcgggccaggcggatgctggggagtacagctgtgaggcggggggccaacggctgtccttccgcctgcacgtggcaggtcagtgctttgggtgaatccacctcgcctgaagctgatggccacactgtatggtccctgggattctggatggtagttgatggtgctcaggactgcactgggccatccttgaagagcaatgggtatcaggggtgccaggtagcattagggtggccctgaagggagcggggccggtccagggatgacagggtccccctctcatgccaactcacctctacccagagctggagccccaaatttcagagagaccctgccgcagggagcctctggtggtcaaggagcatgaagacatcatcctgaccgccacactggccacaccctctgcggccacggtgacctggctcaaggatggtgtggagattcgccgcagcaagcggcatgagacagccagccagggggacacccacaccctgaccgtgcatggcgcccaggttctggacagcgccatctacagctgccgtgtgggcgcagaggggcaggacttcccagtgcaggtggaaggtgagccgggcatggggcgtggggcggggactcctccagacacctctgtcccagagctggacaggggcgaagctggggctcaagtctggtctgttaagagcccggctgatgtcccctttgtgcccacagaggtggccgccaagttctgccggctgctggagcctgtgtgcggcgagctgggtggcacggtgacactggcctgcgagctaagcccagcgtgtgcagaggtggtgtggcgctgcggcaacacgcagcttcgggtgggcaagcgcttccagatggtggccgaggggcccgtgcgctcactcactgtgttggggctgcgcgcagaggacgcaggggagtacgt

SEQ ID NO: 3423 - protein, 215 aa, Homo sapiens
MPTHLYPELEPQISERPCRREPLVVKEHEDIILTATLATPSAATVTWLKDGVEIRRSKRHETASQGDTHTLTVHGAQVLDSAIYSCRVGAEGQDFPVQVEGEPGMGRGAGTPPDTSVPELDRGEAGAQVWSVKSPADVPFVPTEVAAKFCRLLEPVCGELGGTVTLACELSPACAEVVWRCGNTQLRVGKRFQMVAEGPVRSLTVLGLRAEDAGE

SEQ ID NO: 3424 - DNA, 550 bp, Homo sapiens
ccttcccgcccgcggctcactctccacggtgagtttggcctgtgtcttgtcatccggcgtctcgcagccaaagaagccacggtcggcaaaacctacgttgtgcagaaccaggcggtggcgggcgccctcggcgtggatctccacgttctttcccggcgccagggccgtcgcgttccgtgtccacctcagctccggccacggccgcgtcagctccacctccagggtcaccgagctccgctcctccaccgtctgcggctccagcttctttttgaacagcacaggcgcctctggggtcgcaggagaggggaggtcacggcggccctcgccctcctccacggacaagccaaggtgcaactgcaggattgtatcttctctataccaagagaaggcacctggcccatccagcctaccggagtctcctctctgcagcccacacaccccgtgtctcctgaggtcagccggaccagccgtaacaggacagcagttccaggtgcccactcagaaccagcccacaggggaggtgcctgtgcaaggagccctggccagccag

SEQ ID NO: 3425 - protein, 182 aa, Homo sapiens [sequence omitted]

SEQ ID NO: 3426 - DNA, 579 bp, Homo sapiens
gaaggggacacggccacgctgtggtgtgagctgagcaaggcggcaccggtggagtggaggaaggggcatgagaccctcagagatggggacagacacagcctgaggcaggacgggtccaggtgtgagctgcagatccgtggcctggctgtggtggatgccggggagtactcgtgtgtgtgcgggcaggagaggacctcagccacactcactgtcagggccctgcctgccagattcatagaagatgtgaaaaaccaggaggccagagaaggggccacggccgtgctgcaatgtgagctgagcaaggcggcccccgtggagtggaggaaggggtctgagaccctcagaggtggggacagatacagcctgaggcaggatgggaccagatgtgagctgcagattcatggcctgtctgtggcagacactggggagtactcgtgtgtgtgcgggcaggagaggacctcggccacactcaccgtcaggggtaaagaccacatgtggccacctgagtgattcctgtctcctcccacctaacccacatgatctgtgctctcccagttcctcttgatgtcattgccatct

SEQ ID NO: 3427 - protein, 63 aa, Homo sapiens
MGPDVSCRFMACLWQTLGSTRVCAGRRGPRPHSPSGVKTTCGHLSDSCLLPPNPHDLCSPSSS

SEQ ID NO: 3428 - DNA, 836 bp, Homo sapiens
atcctacctgtgaactttcattatggggaagcaagacaggctcctccaacttgcaacccacatatgcaataatgtgatggacatctctctatgatgacacagcagacaccttcaggtcccaacatccactgccccgttgtcatccctcacacaagagatagcctgaccagacagggcttccatccagcagtgcccatgcctagatatacctggcgcaccgcacaacatcccagcccacacaaggccctgctacctccatccaacatactgctagactgaccctactgaatccacattcccacatattaccctgactcatatcacctagatcatgacagacaccagatgtggccttgaaccacacctctgaacctccaatctaccattctctcttgcctcctgactccaggcagggggctcacaagttagcagagcagggcctaacccaattacatagccatagactgctatgggttgtgtttctacagaagtcaaatgttgaagtcctaacttccactatttcagaatatgactgtttttgagatagggcctttaaagaggtgattaatgctaaatgggatcacaagggtggtatctaatccaatataaatgctgtccttataagaaaaggagattaggacacaaacagagaaggaccagtgaagacacagagaaaatggctgtctacaagcaaaggagagaggcctcagaaggagccaaccgtactgacacctggatctcaaccatctagcctccagaatggaacgtctatcctatgcctgcaccaccactgcattttggaagcacaaaacttgtctggttccatgcttcacaac

SEQ ID NO: 3429 - protein, 62 aa, Homo sapiens [sequence omitted]

SEQ ID NO: 3430 - DNA, 1058 bp, Homo sapiens
atgttgtgcggtgcgccaggtatatctaggcatgggcactgctggatggaagccctgtctggtcaggctatctcttgtgtgagggatgacaacggggcagtggatgttgggacctgaaggtgtctgctgtgtcatcatagagagatgtccatcacattattgcatatgtgggttgcaagttggaggagcctgtcttgcttccccataatgaaagttcacaggtaggataagatgccctctgagaagagatccaggatggagcccatctcccacccaatctgcacctcacaggcagaatgcaggaagtcctcactgtcaaatgcactttggtccgcctcatcccaagtccctccagccttcctgcttctgttttcttcctggatgttcaggtgtgtccctcagatcctccagagggcttgatggcttctgtccatgtgacccttcctacctctgcctacccagttcactcaagatctgaagaccaacgaggcctcagaaggggccacagccacattgcagtgtgaactaagcaaggtgtcgctgtggagtggaagaagggacctgagaccctcagagatggggactgtgttctctgttcctgggccgtgtgctttctcaccatctgtatattcatttgcttattctgccatggtcctgtggtggtttgtgtgcctccttgtgtgtgtctgtgttctgtccacagagttgtccagttagtctgatgatctcagtgtctgcttggtcctttccagccctgccggccagattcatagaagatgtgagaaatcacgaggccacagaaggggccacagctgtgctgcagtgtgagctgagcaaggcggcccccgtggagtggcggaaggggtctgagaccctcagagatggggacagatatagcctgaggcaggacgggacgaggtgtgagctgcagattcgtggcctggctgtggaggacactggagagtatttgtgtgtgtgcgggcaggagagaacctcagctacactcactgtcagggccctgccagccagattcatagacaacatgacaaaccaggagg

SEQ ID NO: 3431 - protein, 111 aa, Homo sapiens
MISVSAWSFPALPARFIEDVRNHEATEGATAVLQCELSKAAPVEWRKGSETLRDGDRYSLRQDGTRCELQIRGLAVEDTGEYLCVCGQERTSATLTVRALPARFIDNMTNQ

SEQ ID NO: 3432 - DNA, 4753 bp, Homo sapiens
ggccctgccggcagggcagcaagtcgggagcagctgtgggtggtgtcctacaggctctgctgtggaggaagagctgctgccctgagtggaggggcagtagaatgaaagagggcatgtctaataacagcaccactagcatctcccaagccaggaaagctgtggagcagctaaagatggaagcctgtatggacagggtcaaggtctcccaggcagctgcggacctcctggcctactgtgaagctcacgtgcgggaagatcctctcatcattccagtgcctgcatcagaaaacccctttcgcgagaagaagttcttttgtaccattctctaactccgtgtgtgatgaaaacgcctccttttctgaccttcaaagtcccctgtagagaccatgcatgctctaagccttagggagtgagaccaacacccatccctgcccagccaacagtggccggggcttgtcttatgtttccatctgttttcttcgtggcattcaatttcatttttttccttttcattttcatgttattttcattattggcaaagaaaatcaaaatgtttatagccaaataacaaatgtgccatgtaaaagtaagtctggacttaagagtttaaaatttttaaacatcagtttccaagtttatatcatattaatacatttcagtggataatttattttaaaaaaaaaactatgcctaaatatcccttatttgcaatattcagtatcaaattagagcattttgaccaactgaaacatataacgttttcatctcctttcctggagaaagcagctgcagaggttctgtatttcctgcatttccatcatcctagtaaaaagacaacaacccacaggattggaatggttttcttttgttttttttttgttgttgttgttgttttgagatggagtctcgctctgtcacccaggctggagtgcaatggcgtgacctcagctcactgcgacctccacctcctgggttcaagcgattctcctgcctcagcctcctgagtagctgggatcataggcacgcgccaccacacccagctaattttttgtatttttagtaaagacggggtttcaccatgttggtcaggctggtctcaaactcctgacctcgtgatccacccgcctcggcctcccaaagcgctgggattacaggcgtgagccaccacacccggccgtggaatggttttcttagcatatcctcctggggccgtggcgccccggctgtgggccgtggtggatgtcccttgtttcagtggtcctacaaaggtagatggtgggcggacaccgaagtcaacttgactgtaaaagtaccccataccgttgacgcgctgtggcagacctgtgggtgcggtctcccctctccaaatgccacctcttcctgctccctcctcttttggctcctactcagtagttccattgtgggctgcagtaatataaggacctgttctggacacagcactgggcccgctggggttttagtagggcagccccttccctgcaggagtgaggcatggtgacagcagtcccctatgtgcccccaagtcatctgagcattggtgtgcattaaggtactcaatcttccaacaataaataccataagtgcatgtctgttttattttatttatttatctttttgagacagagtcttgctctgtcgcccgggctggaatgcaatggcacaatctcagctcaccgcaacctccactcgcaggttcaagtgatcctcatgtctcagcctccctagtagctgggatgacaagcacacgccaacatgcctggctcatttttgtatttttagtagagacggggtttcaccatgtcggccaggctggtctccaactactggcctcgagtgatctgcccaccttggcctcccaaagtgctgggattgcaggtgtgagccagtgcacccggccgtatgtcttagagtgaggggaaactgaggcacaaagcgtttatgtagtttgcccaaggttacacatggtaagcagaaaaactgggatttgagggcaggcagcccggccccagagttcccttagccccctgaactgtgctaccttccaggtctacctgtttgcaggtagggagacccacaaactatcataactgcacaccgtgaagcaaacacctttgttgcagtaacccgtggcacacttcacttcccacattctccaggaggaagccgtattctggtagtttaaggaaggtgattcatggatgccccaaggaaaggctagacatcgatgaattagctcttggattgtctaagatcaacctgaaggtcctacctaaaccaaactcatatgatcccgatgaaagaggagaatacacagtgggagcagagctctttgtgtaagtttgttctattctgtttatttggaaactgcctctctccctagttctgaaagagacttgctgtgtgatagagaacaggccatttgtgcctgaaatgttctaacctgcaaattgggtttaatggtaattatcctgcctttctgtctgggaggaaacagagatgctacatagatgaaagctctgattatcatttaaaacaaataaatgtactaaatgccgtggtataatatagggaagaatggatgacttcaaagagaccatggttccgttggaggcataaaattgcctgcaaagaggcaaatgtaatttccagaccaattaatgacttgctgccctcgtaaatggatttaggacatctttgttccttgcttcttttgttaaaactcattcttagtttcattatcagctcactaataataccagtgttgttaagatgctcaaactagagcagaattgtatgctggatgtgacgctaggacctcagatcctttgatagtgcagttatgaccaggatctctttattctgtgcttcacgtcaacatcattaacccgatgaagcgaagcacaagtcataaaggcacatcagagaagccgagaaagcggggccgtacagagagcatcaaaatcaggtcagaaaaatgctgctttcctcttccaccaaaccttctccctgttgtttttacatgccccgtccctccagattcagcctccgttttgttctctctccttttccttttcctcctctcttccttaccttcccctgtgagatgcttttctgtccttttactgcacctcttccagacctatggcatttggggacgggtcacccttcctagagtgatcctgaatccagctgcctcttctttttttgtttttgtttttgtttttgagacagagtctctttctgtcgtccaggctggagtgcagtagcgcaatcttggctcactgcaacctctgcctcctgggttcaagcgattcttgtgcctcaacctcacgaggagctgggattgcaggcgcccgccaccacacccggctaatttttgtatttttagtagagacggagtttcaccatgttggccacgctggtcttgaagcccagacctcaagtgatccgcccgccttggcctcccaaagtgctgggattacaggcatgagccaccgcgcctggcctagttccctcttcttagatggagatttctgcacatgagctgtgagatccacagacatgtcactgagctcccccactctgtcagtggaagatgaatggaataaagcctgcttgcattgtggagtgcagctgtggggacagttgtcatttttgtgttttcagcttaactgtccagcatctcccctcccttcctacagcagggacatcatgccttagatataaacttagtggtgtgcagtacccaccgtggaagctgaagaagggaagtatttcctgtctctcaggcacaccccgcttccagccccataccagtcgggaagtggtcattgacctggggtggactacctggacccttgcttggggctatgagcctggagaatgtgacacaaatgaagggatgctgagactcatttcaaggaagccaccgtggtccggggttggtagtcatacagcaaggcaggtgggtagggctggcaggctgcagggatggtgtgtccactggtagcaatgtccagggatggcagcgtcctgggaatgtcatttctgctccactccttggactcgctgagctgtctccgcctccacctatcttcctacagacctcccttctagttttctgtcaattctttgagccagcaaactccatccagtacattctttcttctttcatgaaagagcttgagttggatgtaaatatatatgacctaacaattccacccctaggtgtataccctacagaaatgtgtacatgtgttcatccagagacatgctctaaatcttcacaaaaacactctccataataaccccgaacaggaaagcaccccaatgcccatgttggctggataagcacattagggtatattcacacgatggaatcccagactgcaatgggaatgagctgcaactccacccccaacttggagtgtattcaccaaccctagtgttgaacgagataaggcaaaaatgcaccataggattccatttatataaagtttaaaacccagcaaaattcatccatgcggttgcaagtagagatcagtcctaagaagacagtaaccagaagcgggcatgaggtggtgcttctggggtgttctgtttcttgatctggttgccggttacctgggtgctttccgtttgtgaacattcttggagctgtacacttttgatctgggcacttttctgtgtgtatgttatacttcaataaaaagttgggctttgtgactagcaa

SEQ ID NO: 3433 - protein, 75 aa, Homo sapiens; identical to SEQ ID NO: 213

SEQ ID NO: 3434 - DNA, 4754 bp, Homo sapiens
actctggatgtttacctcagcctatccttgaccaaagcacagccatgttcctgacacgcgtgctctggccttacagcaagggaggcaagaaagggcagtagaatgaaagagggcatgtctaataacagcaccactagcatctcccaagccaggaaagctgtggagcagctaaagatggaagcctgtatggacagggtcaaggtctcccaggcagctgcggacctcctggcctactgtgaagctcacgtgcgggaagatcctctcatcattccagtgcctgcatcagaaaacccctttcgcgagaagaagttcttttgtaccattctctaactccgtgtgtgatgaaaacgcctccttttctgaccttcaaagtcccctgtagagaccatgcatgctctaagccttagggagtgagaccaacacccatccctgcccagccaacagtggccggggcttgtcttatgtttccatctgttttcttcgtggcattcaatttcatttttttccttttcattttcatgttattttcattattggcaaagaaaatcaaaatgtttatagccaaataacaaatgtgccatgtaaaagtaagtctggacttaagagtttaaaatttttaaacatcagtttccaagtttatatcatattaatacatttcagtggataatttattttaaaaaaaaaactatgcctaaatatcccttatttgcaatattcagtatcaaattagagcattttgaccaactgaaacatataacgttttcatctcctttcctggagaaagcagctgcagaggttctgtatttcctgcatttccatcatcctagtaaaaagacaacaacccacaggattggaatggttttcttttgttttttttttgttgttgttgttgttttgagatggagtctcgctctgtcacccaggctggagtgcaatggcgtgacctcagctcactgcgacctccacctcctgggttcaagcgattctcctgcctcagcctcctgagtagctgggatcataggcacgcgccaccacacccagctaattttttgtatttttagtaaagacggggtttcaccatgttggtcaggctggtctcaaactcctgacctcgtgatccacccgcctcggcctcccaaagcgctgggattacaggcgtgagccaccacacccggccgtggaatggttttcttagcatatcctcctggggccgtggcgccccggctgtgggccgtggtggatgtcccttgtttcagtggtcctacaaaggtagatggtgggcggacaccgaagtcaacttgactgtaaaagtaccccataccgttgacgcgctgtggcagacctgtgggtgcggtctcccctctccaaatgccacctcttcctgctccctcctcttttggctcctactcagtagttccattgtgggctgcagtaatataaggacctgttctggacacagcactgggcccgctggggttttagtagggcagccccttccctgcaggagtgaggcatggtgacagcagtcccctatgtgcccccaagtcatctgagcattggtgtgcattaaggtactcaatcttccaacaataaataccataagtgcatgtctgttttattttatttatttatctttttgagacagagtcttgctctgtcgcccgggctggaatgcaatggcacaatctcagctcaccgcaacctccactcgcaggttcaagtgatcctcatgtctcagcctccctagtagctgggatgacaagcacacgccaacatgcctggctcatttttgtatttttagtagagacggggtttcaccatgtcggccaggctggtctccaactactggcctcgagtgatctgcccaccttggcctcccaaagtgctgggattgcaggtgtgagccagtgcacccggccgtatgtcttagagtgaggggaaactgaggcacaaagcgtttatgtagtttgcccaaggttacacatggtaagcagaaaaactgggatttgagggcaggcagcccggccccagagttcccttagccccctgaactgtgctaccttccaggtctacctgtttgcaggtagggagacccacaaactatcataactgcacaccgtgaagcaaacacctttgttgcagtaacccgtggcacacttcacttcccacattctccaggaggaagccgtattctggtagtttaaggaaggtgattcatggatgccccaaggaaaggctagacatcgatgaattagctcttggattgtctaagatcaacctgaaggtcctacctaaaccaaactcatatgatcccgatgaaagaggagaatacacagtgggagcagagctctttgtgtaagtttgttctattctgtttatttggaaactgcctctctccctagttctgaaagagacttgctgtgtgatagagaacaggccatttgtgcctgaaatgttctaacctgcaaattgggtttaatggtaattatcctgcctttctgtctgggaggaaacagagatgctacatagatgaaagctctgattatcatttaaaacaaataaatgtactaaatgccgtggtataatatagggaagaatggatgacttcaaagagaccatggttccgttggaggcataaaattgcctgcaaagaggcaaatgtaatttccagaccaattaatgacttgctgccctcgtaaatggatttaggacatctttgttccttgcttcttttgttaaaactcattcttagtttcattatcagctcactaataataccagtgttgttaagatgctcaaactagagcagaattgtatgctggatgtgacgctaggacctcagatcctttgatagtgcagttatgaccaggatctctttattctgtgcttcacgtcaacatcattaacccgatgaagcgaagcacaagtcataaaggcacatcagagaagccgagaaagcggggccgtacagagagcatcaaaatcaggtcagaaaaatgctgctttcctcttccaccaaaccttctccctgttgtttttacatgccccgtccctccagattcagcctccgttttgttctctctccttttccttttcctcctctcttccttaccttcccctgtgagatgcttttctgtccttttactgcacctcttccagacctatggcatttggggacgggtcacccttcctagagtgatcctgaatccagctgcctcttctttttttgtttttgtttttgtttttgagacagagtctctttctgtcgtccaggctggagtgcagtagcgcaatcttggctcactgcaacctctgcctcctgggttcaagcgattcttgtgcctcaacctcacgaggagctgggattgcaggcgcccgccaccacacccggctaatttttgtatttttagtagagacggagtttcaccatgttggccacgctggtcttgaagcccagacctcaagtgatccgcccgccttggcctcccaaagtgctgggattacaggcatgagccaccgcgcctggcctagttccctcttcttagatggagatttctgcacatgagctgtgagatccacagacatgtcactgagctcccccactctgtcagtggaagatgaatggaataaagcctgcttgcattgtggagtgcagctgtggggacagttgtcatttttgtgttttcagcttaactgtccagcatctcccctcccttcctacagcagggacatcatgccttagatataaacttagtggtgtgcagtacccaccgtggaagctgaagaagggaagtatttcctgtctctcaggcacaccccgcttccagccccataccagtcgggaagtggtcattgacctggggtggactacctggacccttgcttggggctatgagcctggagaatgtgacacaaatgaagggatgctgagactcatttcaaggaagccaccgtggtccggggttggtagtcatacagcaaggcaggtgggtagggctggcaggctgcagggatggtgtgtccactggtagcaatgtccagggatggcagcgtcctgggaatgtcatttctgctccactccttggactcgctgagctgtctccgcctccacctatcttcctacagacctcccttctagttttctgtcaattctttgagccagcaaactccatccagtacattctttcttctttcatgaaagagcttgagttggatgtaaatatatatgacctaacaattccacccctaggtgtataccctacagaaatgtgtacatgtgttcatccagagacatgctctaaatcttcacaaaaacactctccataataaccccgaacaggaaagcaccccaatgcccatgttggctggataagcacattagggtatattcacacgatggaatcccagactgcaatgggaatgagctgcaactccacccccaacttggagtgtattcaccaaccctagtgttgaacgagataaggcaaaaatgcaccataggattccatttatataaagtttaaaacccagcaaaattcatccatgcggttgcaagtagagatcagtcctaagaagacagtaaccagaagcgggcatgaggtggtgcttctggggtgttctgtttcttgatctggttgccggttacctgggtgctttccgtttgtgaacattcttggagctgtacacttttgatctgggcacttttctgtgtgtatgttatacttcaataaaaagttgggctttgtgactagcaa

SEQ ID NO: 3435 - protein, 75 aa, Homo sapiens; identical to SEQ ID NO: 213

SEQ ID NO: 3436 - DNA, 5254 bp, Homo sapiens
gggggcgagggtcgcagagtcgccggctctcccttccccagtctgggcccccacggcacagggggccgagcagaagcccccagcgtccagggccgggggagggtccgcctgcgcccccaggcccgcgtggtcgggccctgcagggcgggaggcgcggcgcggggcggggccggtgacgggacgcggagaccccgcgggcggcgggaggggcacgaggcgcgcgtttgcacccgagcccggcccgcgccccgatgcggagcgatgccgctcggcctggccgccccccgcgagcaccgcgctgcagacgaagcccgcgcgtgatcccgctccgggtgacctcaaagcagaagctctgaattcacctctcatctgacgactgacagctgctgccaccgccagcctctgtcccttgcccaggcctgtcacacggctgcctctcagcagagcaaaccggggtctgcttgcccagcgtggtaagaccagatatccacaccgaggtgttgcagtggaagaaaggagggtgtttaattgctgggcaccaagcaaggaggacccggcggctcatgctcaaatcctgaccagtagcttgcaggggcagtagaatgaaagagggcatgtctaataacagcaccactagcatctcccaagccaggaaagctgtggagcagctaaagatggaagcctgtatggacagggtcaaggtctcccaggcagctgcggacctcctggcctactgtgaagctcacgtgcgggaagatcctctcatcattccagtgcctgcatcagaaaacccctttcgcgagaagaagttcttttgtaccattctctaactccgtgtgtgatgaaaacgcctccttttctgaccttcaaagtcccctgtagagaccatgcatgctctaagccttagggagtgagaccaacacccatccctgcccagccaacagtggccggggcttgtcttatgtttccatctgttttcttcgtggcattcaatttcatttttttccttttcattttcatgttattttcattattggcaaagaaaatcaaaatgtttatagccaaataacaaatgtgccatgtaaaagtaagtctggacttaagagtttaaaatttttaaacatcagtttccaagtttatatcatattaatacatttcagtggataatttattttaaaaaaaaaactatgcctaaatatcccttatttgcaatattcagtatcaaattagagcattttgaccaactgaaacatataacgttttcatctcctttcctggagaaagcagctgcagaggttctgtatttcctgcatttccatcatcctagtaaaaagacaacaacccacaggattggaatggttttcttttgttttttttttgttgttgttgttgttttgagatggagtctcgctctgtcacccaggctggagtgcaatggcgtgacctcagctcactgcgacctccacctcctgggttcaagcgattctcctgcctcagcctcctgagtagctgggatcataggcacgcgccaccacacccagctaattttttgtatttttagtaaagacggggtttcaccatgttggtcaggctggtctcaaactcctgacctcgtgatccacccgcctcggcctcccaaagcgctgggattacaggcgtgagccaccacacccggccgtggaatggttttcttagcatatcctcctggggccgtggcgccccggctgtgggccgtggtggatgtcccttgtttcagtggtcctacaaaggtagatggtgggcggacaccgaagtcaacttgactgtaaaagtaccccataccgttgacgcgctgtggcagacctgtgggtgcggtctcccctctccaaatgccacctcttcctgctccctcctcttttggctcctactcagtagttccattgtgggctgcagtaatataaggacctgttctggacacagcactgggcccgctggggttttagtagggcagccccttccctgcaggagtgaggcatggtgacagcagtcccctatgtgcccccaagtcatctgagcattggtgtgcattaaggtactcaatcttccaacaataaataccataagtgcatgtctgttttattttatttatttatctttttgagacagagtcttgctctgtcgcccgggctggaatgcaatggcacaatctcagctcaccgcaacctccactcgcaggttcaagtgatcctcatgtctcagcctccctagtagctgggatgacaagcacacgccaacatgcctggctcatttttgtatttttagtagagacggggtttcaccatgtcggccaggctggtctccaactactggcctcgagtgatctgcccaccttggcctcccaaagtgctgggattgcaggtgtgagccagtgcacccggccgtatgtcttagagtgaggggaaactgaggcacaaagcgtttatgtagtttgcccaaggttacacatggtaagcagaaaaactgggatttgagggcaggcagcccggccccagagttcccttagccccctgaactgtgctaccttccaggtctacctgtttgcaggtagggagacccacaaactatcataactgcacaccgtgaagcaaacacctttgttgcagtaacccgtggcacacttcacttcccacattctccaggaggaagccgtattctggtagtttaaggaaggtgattcatggatgccccaaggaaaggctagacatcgatgaattagctcttggattgtctaagatcaacctgaaggtcctacctaaaccaaactcatatgatcccgatgaaagaggagaatacacagtgggagcagagctctttgtgtaagtttgttctattctgtttatttggaaactgcctctctccctagttctgaaagagacttgctgtgtgatagagaacaggccatttgtgcctgaaatgttctaacctgcaaattgggtttaatggtaattatcctgcctttctgtctgggaggaaacagagatgctacatagatgaaagctctgattatcatttaaaacaaataaatgtactaaatgccgtggtataatatagggaagaatggatgacttcaaagagaccatggttccgttggaggcataaaattgcctgcaaagaggcaaatgtaatttccagaccaattaatgacttgctgccctcgtaaatggatttaggacatctttgttccttgcttcttttgttaaaactcattcttagtttcattatcagctcactaataataccagtgttgttaagatgctcaaactagagcagaattgtatgctggatgtgacgctaggacctcagatcctttgatagtgcagttatgaccaggatctctttattctgtgcttcacgtcaacatcattaacccgatgaagcgaagcacaagtcataaaggcacatcagagaagccgagaaagcggggccgtacagagagcatcaaaatcaggtcagaaaaatgctgctttcctcttccaccaaaccttctccctgttgtttttacatgccccgtccctccagattcagcctccgttttgttctctctccttttccttttcctcctctcttccttaccttcccctgtgagatgcttttctgtccttttactgcacctcttccagacctatggcatttggggacgggtcacccttcctagagtgatcctgaatccagctgcctcttctttttttgtttttgtttttgtttttgagacagagtctctttctgtcgtccaggctggagtgcagtagcgcaatcttggctcactgcaacctctgcctcctgggttcaagcgattcttgtgcctcaacctcacgaggagctgggattgcaggcgcccgccaccacacccggctaatttttgtatttttagtagagacggagtttcaccatgttggccacgctggtcttgaagcccagacctcaagtgatccgcccgccttggcctcccaaagtgctgggattacaggcatgagccaccgcgcctggcctagttccctcttcttagatggagatttctgcacatgagctgtgagatccacagacatgtcactgagctcccccactctgtcagtggaagatgaatggaataaagcctgcttgcattgtggagtgcagctgtggggacagttgtcatttttgtgttttcagcttaactgtccagcatctcccctcccttcctacagcagggacatcatgccttagatataaacttagtggtgtgcagtacccaccgtggaagctgaagaagggaagtatttcctgtctctcaggcacaccccgcttccagccccataccagtcgggaagtggtcattgacctggggtggactacctggacccttgcttggggctatgagcctggagaatgtgacacaaatgaagggatgctgagactcatttcaaggaagccaccgtggtccggggttggtagtcatacagcaaggcaggtgggtagggctggcaggctgcagggatggtgtgtccactggtagcaatgtccagggatggcagcgtcctgggaatgtcatttctgctccactccttggactcgctgagctgtctccgcctccacctatcttcctacagacctcccttctagttttctgtcaattctttgagccagcaaactccatccagtacattctttcttctttcatgaaagagcttgagttggatgtaaatatatatgacctaacaattccacccctaggtgtataccctacagaaatgtgtacatgtgttcatccagagacatgctctaaatcttcacaaaaacactctccataataaccccgaacaggaaagcaccccaatgcccatgttggctggataagcacattagggtatattcacacgatggaatcccagactgcaatgggaatgagctgcaactccacccccaacttggagtgtattcaccaaccctagtgttgaacgagataaggcaaaaatgcaccataggattccatttatataaagtttaaaacccagcaaaattcatccatgcggttgcaagtagagatcagtcctaagaagacagtaaccagaagcgggcatgaggtggtgcttctggggtgttctgtttcttgatctggttgccggttacctgggtgctttccgtttgtgaacattcttggagctgtacacttttgatctgggcacttttctgtgtgtatgttatacttcaataaaaagttgggctttgtgactagcaa

SEQ ID NO: 3437 - protein, 75 aa, Homo sapiens; identical to SEQ ID NO: 213

SEQ ID NO: 3438 - DNA, 5117 bp, Homo sapiens
cagcgtggaacgggggcgagggtcgcagagtcgccggctctcccttccccagtctgggcccccacggcacagggggccgagcagaagcccccagcgtccagggccgggggagggtccgcctgcgcccccaggcccgcgtggtcgggccctgcagggcgggaggcgcggcgcggggcggggccggtgacgggacgcggagaccccgcgggcggcgggaggggcacgaggcgcgcgtttgcacccgagcccggcccgcgccccgatgcggagcgatgccgctcggcctggccgccccccgcgagcaccgcgctgcagacgaagcccgcgcgtgatcccgctccgggtgacctcaaagcagaagctctgaattcacctctcatctgacgactgacagctgctgccaccgccagcctctgtcccttgcccaggcctgtcacacggctgcctctcagcaggggcagtagaatgaaagagggcatgtctaataacagcaccactagcatctcccaagccaggaaagctgtggagcagctaaagatggaagcctgtatggacagggtcaaggtctcccaggcagctgcggacctcctggcctactgtgaagctcacgtgcgggaagatcctctcatcattccagtgcctgcatcagaaaacccctttcgcgagaagaagttcttttgtaccattctctaactccgtgtgtgatgaaaacgcctccttttctgaccttcaaagtcccctgtagagaccatgcatgctctaagccttagggagtgagaccaacacccatccctgcccagccaacagtggccggggcttgtcttatgtttccatctgttttcttcgtggcattcaatttcatttttttccttttcattttcatgttattttcattattggcaaagaaaatcaaaatgtttatagccaaataacaaatgtgccatgtaaaagtaagtctggacttaagagtttaaaatttttaaacatcagtttccaagtttatatcatattaatacatttcagtggataatttattttaaaaaaaaaactatgcctaaatatcccttatttgcaatattcagtatcaaattagagcattttgaccaactgaaacatataacgttttcatctcctttcctggagaaagcagctgcagaggttctgtatttcctgcatttccatcatcctagtaaaaagacaacaacccacaggattggaatggttttcttttgttttttttttgttgttgttgttgttttgagatggagtctcgctctgtcacccaggctggagtgcaatggcgtgacctcagctcactgcgacctccacctcctgggttcaagcgattctcctgcctcagcctcctgagtagctgggatcataggcacgcgccaccacacccagctaattttttgtatttttagtaaagacggggtttcaccatgttggtcaggctggtctcaaactcctgacctcgtgatccacccgcctcggcctcccaaagcgctgggattacaggcgtgagccaccacacccggccgtggaatggttttcttagcatatcctcctggggccgtggcgccccggctgtgggccgtggtggatgtcccttgtttcagtggtcctacaaaggtagatggtgggcggacaccgaagtcaacttgactgtaaaagtaccccataccgttgacgcgctgtggcagacctgtgggtgcggtctcccctctccaaatgccacctcttcctgctccctcctcttttggctcctactcagtagttccattgtgggctgcagtaatataaggacctgttctggacacagcactgggcccgctggggttttagtagggcagccccttccctgcaggagtgaggcatggtgacagcagtcccctatgtgcccccaagtcatctgagcattggtgtgcattaaggtactcaatcttccaacaataaataccataagtgcatgtctgttttattttatttatttatctttttgagacagagtcttgctctgtcgcccgggctggaatgcaatggcacaatctcagctcaccgcaacctccactcgcaggttcaagtgatcctcatgtctcagcctccctagtagctgggatgacaagcacacgccaacatgcctggctcatttttgtatttttagtagagacggggtttcaccatgtcggccaggctggtctccaactactggcctcgagtgatctgcccaccttggcctcccaaagtgctgggattgcaggtgtgagccagtgcacccggccgtatgtcttagagtgaggggaaactgaggcacaaagcgtttatgtagtttgcccaaggttacacatggtaagcagaaaaactgggatttgagggcaggcagcccggccccagagttcccttagccccctgaactgtgctaccttccaggtctacctgtttgcaggtagggagacccacaaactatcataactgcacaccgtgaagcaaacacctttgttgcagtaacccgtggcacacttcacttcccacattctccaggaggaagccgtattctggtagtttaaggaaggtgattcatggatgccccaaggaaaggctagacatcgatgaattagctcttggattgtctaagatcaacctgaaggtcctacctaaaccaaactcatatgatcccgatgaaagaggagaatacacagtgggagcagagctctttgtgtaagtttgttctattctgtttatttggaaactgcctctctccctagttctgaaagagacttgctgtgtgatagagaacaggccatttgtgcctgaaatgttctaacctgcaaattgggtttaatggtaattatcctgcctttctgtctgggaggaaacagagatgctacatagatgaaagctctgattatcatttaaaacaaataaatgtactaaatgccgtggtataatatagggaagaatggatgacttcaaagagaccatggttccgttggaggcataaaattgcctgcaaagaggcaaatgtaatttccagaccaattaatgacttgctgccctcgtaaatggatttaggacatctttgttccttgcttcttttgttaaaactcattcttagtttcattatcagctcactaataataccagtgttgttaagatgctcaaactagagcagaattgtatgctggatgtgacgctaggacctcagatcctttgatagtgcagttatgaccaggatctctttattctgtgcttcacgtcaacatcattaacccgatgaagcgaagcacaagtcataaaggcacatcagagaagccgagaaagcggggccgtacagagagcatcaaaatcaggtcagaaaaatgctgctttcctcttccaccaaaccttctccctgttgtttttacatgccccgtccctccagattcagcctccgttttgttctctctccttttccttttcctcctctcttccttaccttcccctgtgagatgcttttctgtccttttactgcacctcttccagacctatggcatttggggacgggtcacccttcctagagtgatcctgaatccagctgcctcttctttttttgtttttgtttttgtttttgagacagagtctctttctgtcgtccaggctggagtgcagtagcgcaatcttggctcactgcaacctctgcctcctgggttcaagcgattcttgtgcctcaacctcacgaggagctgggattgcaggcgcccgccaccacacccggctaatttttgtatttttagtagagacggagtttcaccatgttggccacgctggtcttgaagcccagacctcaagtgatccgcccgccttggcctcccaaagtgctgggattacaggcatgagccaccgcgcctggcctagttccctcttcttagatggagatttctgcacatgagctgtgagatccacagacatgtcactgagctcccccactctgtcagtggaagatgaatggaataaagcctgcttgcattgtggagtgcagctgtggggacagttgtcatttttgtgttttcagcttaactgtccagcatctcccctcccttcctacagcagggacatcatgccttagatataaacttagtggtgtgcagtacccaccgtggaagctgaagaagggaagtatttcctgtctctcaggcacaccccgcttccagccccataccagtcgggaagtggtcattgacctggggtggactacctggacccttgcttggggctatgagcctggagaatgtgacacaaatgaagggatgctgagactcatttcaaggaagccaccgtggtccggggttggtagtcatacagcaaggcaggtgggtagggctggcaggctgcagggatggtgtgtccactggtagcaatgtccagggatggcagcgtcctgggaatgtcatttctgctccactccttggactcgctgagctgtctccgcctccacctatcttcctacagacctcccttctagttttctgtcaattctttgagccagcaaactccatccagtacattctttcttctttcatgaaagagcttgagttggatgtaaatatatatgacctaacaattccacccctaggtgtataccctacagaaatgtgtacatgtgttcatccagagacatgctctaaatcttcacaaaaacactctccataataaccccgaacaggaaagcaccccaatgcccatgttggctggataagcacattagggtatattcacacgatggaatcccagactgcaatgggaatgagctgcaactccacccccaacttggagtgtattcaccaaccctagtgttgaacgagataaggcaaaaatgcaccataggattccatttatataaagtttaaaacccagcaaaattcatccatgcggttgcaagtagagatcagtcctaagaagacagtaaccagaagcgggcatgaggtggtgcttctggggtgttctgtttcttgatctggttgccggttacctgggtgctttccgtttgtgaacattcttggagctgtacacttttgatctgggcacttttctgtgtgtatgttatacttcaataaaaagttgggctttgtgactagcaa

SEQ ID NO: 3439 - protein, 75 aa, Homo sapiens; identical to SEQ ID NO: 213

SEQ ID NO: 3440 - DNA, 5152 bp, Homo sapiens
cttgtggacggcggatgaggatgaggcgcccagatcttcccgaaatatttcctaatcgttcatcatgatgttatgttgttgttttcacaaagggaattaatattggcctccttttctacaaatcttgccaacactgcgtgaaatgttttcgttgcttctctattcccaaggtttcgtattattttaccaagtcggaaaatggacggcgcttaaactgttttttccctgaaaggaagagggctgtaatcactaaagtgttttaaaatctccagcgcaaaagcctgcggtgccacagggacgaggcctggagagcagtcgctcctagaaccggggcgcgaagggcacccccgcctccagcacgcgccctccgccctcccggcctcgctccccccggagtgggggcctcgccggcccctggtccccgtcactcagcaacgtcgggtcagccttcgccgggttagtggcgacgcggccgcgcgaattcgcacaggggcagtagaatgaaagagggcatgtctaataacagcaccactagcatctcccaagccaggaaagctgtggagcagctaaagatggaagcctgtatggacagggtcaaggtctcccaggcagctgcggacctcctggcctactgtgaagctcacgtgcgggaagatcctctcatcattccagtgcctgcatcagaaaacccctttcgcgagaagaagttcttttgtaccattctctaactccgtgtgtgatgaaaacgcctccttttctgaccttcaaagtcccctgtagagaccatgcatgctctaagccttagggagtgagaccaacacccatccctgcccagccaacagtggccggggcttgtcttatgtttccatctgttttcttcgtggcattcaatttcatttttttccttttcattttcatgttattttcattattggcaaagaaaatcaaaatgtttatagccaaataacaaatgtgccatgtaaaagtaagtctggacttaagagtttaaaatttttaaacatcagtttccaagtttatatcatattaatacatttcagtggataatttattttaaaaaaaaaactatgcctaaatatcccttatttgcaatattcagtatcaaattagagcattttgaccaactgaaacatataacgttttcatctcctttcctggagaaagcagctgcagaggttctgtatttcctgcatttccatcatcctagtaaaaagacaacaacccacaggattggaatggttttcttttgttttttttttgttgttgttgttgttttgagatggagtctcgctctgtcacccaggctggagtgcaatggcgtgacctcagctcactgcgacctccacctcctgggttcaagcgattctcctgcctcagcctcctgagtagctgggatcataggcacgcgccaccacacccagctaattttttgtatttttagtaaagacggggtttcaccatgttggtcaggctggtctcaaactcctgacctcgtgatccacccgcctcggcctcccaaagcgctgggattacaggcgtgagccaccacacccggccgtggaatggttttcttagcatatcctcctggggccgtggcgccccggctgtgggccgtggtggatgtcccttgtttcagtggtcctacaaaggtagatggtgggcggacaccgaagtcaacttgactgtaaaagtaccccataccgttgacgcgctgtggcagacctgtgggtgcggtctcccctctccaaatgccacctcttcctgctccctcctcttttggctcctactcagtagttccattgtgggctgcagtaatataaggacctgttctggacacagcactgggcccgctggggttttagtagggcagccccttccctgcaggagtgaggcatggtgacagcagtcccctatgtgcccccaagtcatctgagcattggtgtgcattaaggtactcaatcttccaacaataaataccataagtgcatgtctgttttattttatttatttatctttttgagacagagtcttgctctgtcgcccgggctggaatgcaatggcacaatctcagctcaccgcaacctccactcgcaggttcaagtgatcctcatgtctcagcctccctagtagctgggatgacaagcacacgccaacatgcctggctcatttttgtatttttagtagagacggggtttcaccatgtcggccaggctggtctccaactactggcctcgagtgatctgcccaccttggcctcccaaagtgctgggattgcaggtgtgagccagtgcacccggccgtatgtcttagagtgaggggaaactgaggcacaaagcgtttatgtagtttgcccaaggttacacatggtaagcagaaaaactgggatttgagggcaggcagcccggccccagagttcccttagccccctgaactgtgctaccttccaggtctacctgtttgcaggtagggagacccacaaactatcataactgcacaccgtgaagcaaacacctttgttgcagtaacccgtggcacacttcacttcccacattctccaggaggaagccgtattctggtagtttaaggaaggtgattcatggatgccccaaggaaaggctagacatcgatgaattagctcttggattgtctaagatcaacctgaaggtcctacctaaaccaaactcatatgatcccgatgaaagaggagaatacacagtgggagcagagctctttgtgtaagtttgttctattctgtttatttggaaactgcctctctccctagttctgaaagagacttgctgtgtgatagagaacaggccatttgtgcctgaaatgttctaacctgcaaattgggtttaatggtaattatcctgcctttctgtctgggaggaaacagagatgctacatagatgaaagctctgattatcatttaaaacaaataaatgtactaaatgccgtggtataatatagggaagaatggatgacttcaaagagaccatggttccgttggaggcataaaattgcctgcaaagaggcaaatgtaatttccagaccaattaatgacttgctgccctcgtaaatggatttaggacatctttgttccttgcttcttttgttaaaactcattcttagtttcattatcagctcactaataataccagtgttgttaagatgctcaaactagagcagaattgtatgctggatgtgacgctaggacctcagatcctttgatagtgcagttatgaccaggatctctttattctgtgcttcacgtcaacatcattaacccgatgaagcgaagcacaagtcataaaggcacatcagagaagccgagaaagcggggccgtacagagagcatcaaaatcaggtcagaaaaatgctgctttcctcttccaccaaaccttctccctgttgtttttacatgccccgtccctccagattcagcctccgttttgttctctctccttttccttttcctcctctcttccttaccttcccctgtgagatgcttttctgtccttttactgcacctcttccagacctatggcatttggggacgggtcacccttcctagagtgatcctgaatccagctgcctcttctttttttgtttttgtttttgtttttgagacagagtctctttctgtcgtccaggctggagtgcagtagcgcaatcttggctcactgcaacctctgcctcctgggttcaagcgattcttgtgcctcaacctcacgaggagctgggattgcaggcgcccgccaccacacccggctaatttttgtatttttagtagagacggagtttcaccatgttggccacgctggtcttgaagcccagacctcaagtgatccgcccgccttggcctcccaaagtgctgggattacaggcatgagccaccgcgcctggcctagttccctcttcttagatggagatttctgcacatgagctgtgagatccacagacatgtcactgagctcccccactctgtcagtggaagatgaatggaataaagcctgcttgcattgtggagtgcagctgtggggacagttgtcatttttgtgttttcagcttaactgtccagcatctcccctcccttcctacagcagggacatcatgccttagatataaacttagtggtgtgcagtacccaccgtggaagctgaagaagggaagtatttcctgtctctcaggcacaccccgcttccagccccataccagtcgggaagtggtcattgacctggggtggactacctggacccttgcttggggctatgagcctggagaatgtgacacaaatgaagggatgctgagactcatttcaaggaagccaccgtggtccggggttggtagtcatacagcaaggcaggtgggtagggctggcaggctgcagggatggtgtgtccactggtagcaatgtccagggatggcagcgtcctgggaatgtcatttctgctccactccttggactcgctgagctgtctccgcctccacctatcttcctacagacctcccttctagttttctgtcaattctttgagccagcaaactccatccagtacattctttcttctttcatgaaagagcttgagttggatgtaaatatatatgacctaacaattccacccctaggtgtataccctacagaaatgtgtacatgtgttcatccagagacatgctctaaatcttcacaaaaacactctccataataaccccgaacaggaaagcaccccaatgcccatgttggctggataagcacattagggtatattcacacgatggaatcccagactgcaatgggaatgagctgcaactccacccccaacttggagtgtattcaccaaccctagtgttgaacgagataaggcaaaaatgcaccataggattccatttatataaagtttaaaacccagcaaaattcatccatgcggttgcaagtagagatcagtcctaagaagacagtaaccagaagcgggcatgaggtggtgcttctggggtgttctgtttcttgatctggttgccggttacctgggtgctttccgtttgtgaacattcttggagctgtacacttttgatctgggcacttttctgtgtgtatgttatacttcaataaaaagttgggctttgtgactagcaa

SEQ ID NO: 3441 - protein, 75 aa, Homo sapiens; identical to SEQ ID NO: 213

SEQ ID NO: 3442 - DNA, 5264 bp, Homo sapiens
cttgtggacggcggatgaggatgaggcgcccagatcttcccgaaatatttcctaatcgttcatcatgatgttatgttgttgttttcacaaagggaattaatattggcctccttttctacaaatcttgccaacactgcgtgaaatgttttcgttgcttctctattcccaaggtttcgtattattttaccaagtcggaaaatggacggcgcttaaactgttttttccctgaaaggaagagggctgtaatcactaaagtgttttaaaatctccagcgcaaaagcctgcggtgccacagggacgaggcctggagagcagtcgctcctagaaccggggcgcgaagggcacccccgcctccagcacgcgccctccgccctcccggcctcgctccccccggagtgggggcctcgccggcccctggtccccgtcactcagcaacgtcgggtcagccttcgccgggttagtggcgacgcggccgcgcgaattcgcacaggtgacctcaaagcagaagctctgaattcacctctcatctgacgactgacagctgctgccaccgccagcctctgtcccttgcccaggcctgtcacacggctgcctctcagcaggggcagtagaatgaaagagggcatgtctaataacagcaccactagcatctcccaagccaggaaagctgtggagcagctaaagatggaagcctgtatggacagggtcaaggtctcccaggcagctgcggacctcctggcctactgtgaagctcacgtgcgggaagatcctctcatcattccagtgcctgcatcagaaaacccctttcgcgagaagaagttcttttgtaccattctctaactccgtgtgtgatgaaaacgcctccttttctgaccttcaaagtcccctgtagagaccatgcatgctctaagccttagggagtgagaccaacacccatccctgcccagccaacagtggccggggcttgtcttatgtttccatctgttttcttcgtggcattcaatttcatttttttccttttcattttcatgttattttcattattggcaaagaaaatcaaaatgtttatagccaaataacaaatgtgccatgtaaaagtaagtctggacttaagagtttaaaatttttaaacatcagtttccaagtttatatcatattaatacatttcagtggataatttattttaaaaaaaaaactatgcctaaatatcccttatttgcaatattcagtatcaaattagagcattttgaccaactgaaacatataacgttttcatctcctttcctggagaaagcagctgcagaggttctgtatttcctgcatttccatcatcctagtaaaaagacaacaacccacaggattggaatggttttcttttgttttttttttgttgttgttgttgttttgagatggagtctcgctctgtcacccaggctggagtgcaatggcgtgacctcagctcactgcgacctccacctcctgggttcaagcgattctcctgcctcagcctcctgagtagctgggatcataggcacgcgccaccacacccagctaattttttgtatttttagtaaagacggggtttcaccatgttggtcaggctggtctcaaactcctgacctcgtgatccacccgcctcggcctcccaaagcgctgggattacaggcgtgagccaccacacccggccgtggaatggttttcttagcatatcctcctggggccgtggcgccccggctgtgggccgtggtggatgtcccttgtttcagtggtcctacaaaggtagatggtgggcggacaccgaagtcaacttgactgtaaaagtaccccataccgttgacgcgctgtggcagacctgtgggtgcggtctcccctctccaaatgccacctcttcctgctccctcctcttttggctcctactcagtagttccattgtgggctgcagtaatataaggacctgttctggacacagcactgggcccgctggggttttagtagggcagccccttccctgcaggagtgaggcatggtgacagcagtcccctatgtgcccccaagtcatctgagcattggtgtgcattaaggtactcaatcttccaacaataaataccataagtgcatgtctgttttattttatttatttatctttttgagacagagtcttgctctgtcgcccgggctggaatgcaatggcacaatctcagctcaccgcaacctccactcgcaggttcaagtgatcctcatgtctcagcctccctagtagctgggatgacaagcacacgccaacatgcctggctcatttttgtatttttagtagagacggggtttcaccatgtcggccaggctggtctccaactactggcctcgagtgatctgcccaccttggcctcccaaagtgctgggattgcaggtgtgagccagtgcacccggccgtatgtcttagagtgaggggaaactgaggcacaaagcgtttatgtagtttgcccaaggttacacatggtaagcagaaaaactgggatttgagggcaggcagcccggccccagagttcccttagccccctgaactgtgctaccttccaggtctacctgtttgcaggtagggagacccacaaactatcataactgcacaccgtgaagcaaacacctttgttgcagtaacccgtggcacacttcacttcccacattctccaggaggaagccgtattctggtagtttaaggaaggtgattcatggatgccccaaggaaaggctagacatcgatgaattagctcttggattgtctaagatcaacctgaaggtcctacctaaaccaaactcatatgatcccgatgaaagaggagaatacacagtgggagcagagctctttgtgtaagtttgttctattctgtttatttggaaactgcctctctccctagttctgaaagagacttgctgtgtgatagagaacaggccatttgtgcctgaaatgttctaacctgcaaattgggtttaatggtaattatcctgcctttctgtctgggaggaaacagagatgctacatagatgaaagctctgattatcatttaaaacaaataaatgtactaaatgccgtggtataatatagggaagaatggatgacttcaaagagaccatggttccgttggaggcataaaattgcctgcaaagaggcaaatgtaatttccagaccaattaatgacttgctgccctcgtaaatggatttaggacatctttgttccttgcttcttttgttaaaactcattcttagtttcattatcagctcactaataataccagtgttgttaagatgctcaaactagagcagaattgtatgctggatgtgacgctaggacctcagatcctttgatagtgcagttatgaccaggatctctttattctgtgcttcacgtcaacatcattaacccgatgaagcgaagcacaagtcataaaggcacatcagagaagccgagaaagcggggccgtacagagagcatcaaaatcaggtcagaaaaatgctgctttcctcttccaccaaaccttctccctgttgtttttacatgccccgtccctccagattcagcctccgttttgttctctctccttttccttttcctcctctcttccttaccttcccctgtgagatgcttttctgtccttttactgcacctcttccagacctatggcatttggggacgggtcacccttcctagagtgatcctgaatccagctgcctcttctttttttgtttttgtttttgtttttgagacagagtctctttctgtcgtccaggctggagtgcagtagcgcaatcttggctcactgcaacctctgcctcctgggttcaagcgattcttgtgcctcaacctcacgaggagctgggattgcaggcgcccgccaccacacccggctaatttttgtatttttagtagagacggagtttcaccatgttggccacgctggtcttgaagcccagacctcaagtgatccgcccgccttggcctcccaaagtgctgggattacaggcatgagccaccgcgcctggcctagttccctcttcttagatggagatttctgcacatgagctgtgagatccacagacatgtcactgagctcccccactctgtcagtggaagatgaatggaataaagcctgcttgcattgtggagtgcagctgtggggacagttgtcatttttgtgttttcagcttaactgtccagcatctcccctcccttcctacagcagggacatcatgccttagatataaacttagtggtgtgcagtacccaccgtggaagctgaagaagggaagtatttcctgtctctcaggcacaccccgcttccagccccataccagtcgggaagtggtcattgacctggggtggactacctggacccttgcttggggctatgagcctggagaatgtgacacaaatgaagggatgctgagactcatttcaaggaagccaccgtggtccggggttggtagtcatacagcaaggcaggtgggtagggctggcaggctgcagggatggtgtgtccactggtagcaatgtccagggatggcagcgtcctgggaatgtcatttctgctccactccttggactcgctgagctgtctccgcctccacctatcttcctacagacctcccttctagttttctgtcaattctttgagccagcaaactccatccagtacattctttcttctttcatgaaagagcttgagttggatgtaaatatatatgacctaacaattccacccctaggtgtataccctacagaaatgtgtacatgtgttcatccagagacatgctctaaatcttcacaaaaacactctccataataaccccgaacaggaaagcaccccaatgcccatgttggctggataagcacattagggtatattcacacgatggaatcccagactgcaatgggaatgagctgcaactccacccccaacttggagtgtattcaccaaccctagtgttgaacgagataaggcaaaaatgcaccataggattccatttatataaagtttaaaacccagcaaaattcatccatgcggttgcaagtagagatcagtcctaagaagacagtaaccagaagcgggcatgaggtggtgcttctggggtgttctgtttcttgatctggttgccggttacctgggtgctttccgtttgtgaacattcttggagctgtacacttttgatctgggcacttttctgtgtgtatgttatacttcaataaaaagttgggctttgtgactagcaa

SEQ ID NO: 3443 - protein, 75 aa, Homo sapiens; identical to SEQ ID NO: 213

SEQ ID NO: 3444 - DNA, 1605 bp, Homo sapiens
ggccctgccggcagggcagcaagtcgggagcagctgtgggtggtgtcctacaggctctgctgtggaggaagagctgctgccctgagtggaggggcagtagaatgaaagagggcatgtctaataacagcaccactagcatctcccaagccaggaaagctgtggagcagctaaagatggaagcctgtatggacagggtcaaggtctcccaggcagctgcggacctcctggcctactgtgaagctcacgtgcgggaagatcctctcatcattccagtgcctgcatcagaaaacccctttcgcgagaagaagttcttttgtaccattctctaactccgtgtgtgatgaaaacgcctccttttctgaccttcaaagtcccctgtagagaccatgcatgctctaagccttagggagtgagaccaacacccatccctgcccagccaacagtggccggggcttgtcttatgtttccatctgttttcttcgtggcattcaatttcatttttttccttttcattttcatgttattttcattattggcaaagaaaatcaaaatgtttatagccaaataacaaatgtgccatgtaaaagtaagtctggacttaagagtttaaaatttttaaacatcagtttccaagtttatatcatattaatacatttcagtggataatttattttaaaaaaaaaactatgcctaaatatcccttatttgcaatattcagtatcaaattagagcattttgaccaactgaaacatataacgttttcatctcctttcctggagaaagcagctgcagaggttctgtatttcctgcatttccatcatcctagtaaaaagacaacaacccacaggattggaatggttttcttttgttttttttttgttgttgttgttgttttgagatggagtctcgctctgtcacccaggctggagtgcaatggcgtgacctcagctcactgcgacctccacctcctgggttcaagcgattctcctgcctcagcctcctgagtagctgggatcataggcacgcgccaccacacccagctaattttttgtatttttagtaaagacggggtttcaccatgttggtcaggctggtctcaaactcctgacctcgtgatccacccgcctcggcctcccaaagcgctgggattacaggcgtgagccaccacacccggccgtggaatggttttcttagcatatcctcctggggccgtggcgccccggctgtgggccgtggtggatgtcccttgtttcagtggtcctacaaaggtagatggtgggcggacaccgaagtcaacttgactgtaaaagtaccccataccgttgacgcgctgtggcagacctgtgggtgcggtctcccctctccaaatgccacctcttcctgctccctcctcttttggctcctactcagtagttccattgtgggctgcagtaatataaggacctgttctggacacagcactgggcccgctggggttttagtagggcagccccttccctgcaggagtgaggcatggtgacagcagtcccctatgtgcccccaagtcatctgagcattggtgtgcattaaggtactcaatcttccaacaataaataccataagtgc

SEQ ID NO: 3445 - protein, 75 aa, Homo sapiens; identical to SEQ ID NO: 213

SEQ ID NO: 3446 - DNA, 1606 bp, Homo sapiens
actctggatgtttacctcagcctatccttgaccaaagcacagccatgttcctgacacgcgtgctctggccttacagcaagggaggcaagaaagggcagtagaatgaaagagggcatgtctaataacagcaccactagcatctcccaagccaggaaagctgtggagcagctaaagatggaagcctgtatggacagggtcaaggtctcccaggcagctgcggacctcctggcctactgtgaagctcacgtgcgggaagatcctctcatcattccagtgcctgcatcagaaaacccctttcgcgagaagaagttcttttgtaccattctctaactccgtgtgtgatgaaaacgcctccttttctgaccttcaaagtcccctgtagagaccatgcatgctctaagccttagggagtgagaccaacacccatccctgcccagccaacagtggccggggcttgtcttatgtttccatctgttttcttcgtggcattcaatttcatttttttccttttcattttcatgttattttcattattggcaaagaaaatcaaaatgtttatagccaaataacaaatgtgccatgtaaaagtaagtctggacttaagagtttaaaatttttaaacatcagtttccaagtttatatcatattaatacatttcagtggataatttattttaaaaaaaaaactatgcctaaatatcccttatttgcaatattcagtatcaaattagagcattttgaccaactgaaacatataacgttttcatctcctttcctggagaaagcagctgcagaggttctgtatttcctgcatttccatcatcctagtaaaaagacaacaacccacaggattggaatggttttcttttgttttttttttgttgttgttgttgttttgagatggagtctcgctctgtcacccaggctggagtgcaatggcgtgacctcagctcactgcgacctccacctcctgggttcaagcgattctcctgcctcagcctcctgagtagctgggatcataggcacgcgccaccacacccagctaattttttgtatttttagtaaagacggggtttcaccatgttggtcaggctggtctcaaactcctgacctcgtgatccacccgcctcggcctcccaaagcgctgggattacaggcgtgagccaccacacccggccgtggaatggttttcttagcatatcctcctggggccgtggcgccccggctgtgggccgtggtggatgtcccttgtttcagtggtcctacaaaggtagatggtgggcggacaccgaagtcaacttgactgtaaaagtaccccataccgttgacgcgctgtggcagacctgtgggtgcggtctcccctctccaaatgccacctcttcctgctccctcctcttttggctcctactcagtagttccattgtgggctgcagtaatataaggacctgttctggacacagcactgggcccgctggggttttagtagggcagccccttccctgcaggagtgaggcatggtgacagcagtcccctatgtgcccccaagtcatctgagcattggtgtgcattaaggtactcaatcttccaacaataaataccataagtgc

SEQ ID NO: 3447 - protein, 75 aa, Homo sapiens; identical to SEQ ID NO: 213

SEQ ID NO: 3448 - DNA, 2106 bp, Homo sapiens
gggggcgagggtcgcagagtcgccggctctcccttccccagtctgggcccccacggcacagggggccgagcagaagcccccagcgtccagggccgggggagggtccgcctgcgcccccaggcccgcgtggtcgggccctgcagggcgggaggcgcggcgcggggcggggccggtgacgggacgcggagaccccgcgggcggcgggaggggcacgaggcgcgcgtttgcacccgagcccggcccgcgccccgatgcggagcgatgccgctcggcctggccgccccccgcgagcaccgcgctgcagacgaagcccgcgcgtgatcccgctccgggtgacctcaaagcagaagctctgaattcacctctcatctgacgactgacagctgctgccaccgccagcctctgtcccttgcccaggcctgtcacacggctgcctctcagcagagcaaaccggggtctgcttgcccagcgtggtaagaccagatatccacaccgaggtgttgcagtggaagaaaggagggtgtttaattgctgggcaccaagcaaggaggacccggcggctcatgctcaaatcctgaccagtagcttgcaggggcagtagaatgaaagagggcatgtctaataacagcaccactagcatctcccaagccaggaaagctgtggagcagctaaagatggaagcctgtatggacagggtcaaggtctcccaggcagctgcggacctcctggcctactgtgaagctcacgtgcgggaagatcctctcatcattccagtgcctgcatcagaaaacccctttcgcgagaagaagttcttttgtaccattctctaactccgtgtgtgatgaaaacgcctccttttctgaccttcaaagtcccctgtagagaccatgcatgctctaagccttagggagtgagaccaacacccatccctgcccagccaacagtggccggggcttgtcttatgtttccatctgttttcttcgtggcattcaatttcatttttttccttttcattttcatgttattttcattattggcaaagaaaatcaaaatgtttatagccaaataacaaatgtgccatgtaaaagtaagtctggacttaagagtttaaaatttttaaacatcagtttccaagtttatatcatattaatacatttcagtggataatttattttaaaaaaaaaactatgcctaaatatcccttatttgcaatattcagtatcaaattagagcattttgaccaactgaaacatataacgttttcatctcctttcctggagaaagcagctgcagaggttctgtatttcctgcatttccatcatcctagtaaaaagacaacaacccacaggattggaatggttttcttttgttttttttttgttgttgttgttgttttgagatggagtctcgctctgtcacccaggctggagtgcaatggcgtgacctcagctcactgcgacctccacctcctgggttcaagcgattctcctgcctcagcctcctgagtagctgggatcataggcacgcgccaccacacccagctaattttttgtatttttagtaaagacggggtttcaccatgttggtcaggctggtctcaaactcctgacctcgtgatccacccgcctcggcctcccaaagcgctgggattacaggcgtgagccaccacacccggccgtggaatggttttcttagcatatcctcctggggccgtggcgccccggctgtgggccgtggtggatgtcccttgtttcagtggtcctacaaaggtagatggtgggcggacaccgaagtcaacttgactgtaaaagtaccccataccgttgacgcgctgtggcagacctgtgggtgcggtctcccctctccaaatgccacctcttcctgctccctcctcttttggctcctactcagtagttccattgtgggctgcagtaatataaggacctgttctggacacagcactgggcccgctggggttttagtagggcagccccttccctgcaggagtgaggcatggtgacagcagtcccctatgtgcccccaagtcatctgagcattggtgtgcattaaggtactcaatcttccaacaataaataccataagtgc

SEQ ID NO: 3449 - protein, 75 aa, Homo sapiens; identical to SEQ ID NO: 213

SEQ ID NO: 3450 - DNA, 1969 bp, Homo sapiens
cagcgtggaacgggggcgagggtcgcagagtcgccggctctcccttccccagtctgggcccccacggcacagggggccgagcagaagcccccagcgtccagggccgggggagggtccgcctgcgcccccaggcccgcgtggtcgggccctgcagggcgggaggcgcggcgcggggcggggccggtgacgggacgcggagaccccgcgggcggcgggaggggcacgaggcgcgcgtttgcacccgagcccggcccgcgccccgatgcggagcgatgccgctcggcctggccgccccccgcgagcaccgcgctgcagacgaagcccgcgcgtgatcccgctccgggtgacctcaaagcagaagctctgaattcacctctcatctgacgactgacagctgctgccaccgccagcctctgtcccttgcccaggcctgtcacacggctgcctctcagcaggggcagtagaatgaaagagggcatgtctaataacagcaccactagcatctcccaagccaggaaagctgtggagcagctaaagatggaagcctgtatggacagggtcaaggtctcccaggcagctgcggacctcctggcctactgtgaagctcacgtgcgggaagatcctctcatcattccagtgcctgcatcagaaaacccctttcgcgagaagaagttcttttgtaccattctctaactccgtgtgtgatgaaaacgcctccttttctgaccttcaaagtcccctgtagagaccatgcatgctctaagccttagggagtgagaccaacacccatccctgcccagccaacagtggccggggcttgtcttatgtttccatctgttttcttcgtggcattcaatttcatttttttccttttcattttcatgttattttcattattggcaaagaaaatcaaaatgtttatagccaaataacaaatgtgccatgtaaaagtaagtctggacttaagagtttaaaatttttaaacatcagtttccaagtttatatcatattaatacatttcagtggataatttattttaaaaaaaaaactatgcctaaatatcccttatttgcaatattcagtatcaaattagagcattttgaccaactgaaacatataacgttttcatctcctttcctggagaaagcagctgcagaggttctgtatttcctgcatttccatcatcctagtaaaaagacaacaacccacaggattggaatggttttcttttgttttttttttgttgttgttgttgttttgagatggagtctcgctctgtcacccaggctggagtgcaatggcgtgacctcagctcactgcgacctccacctcctgggttcaagcgattctcctgcctcagcctcctgagtagctgggatcataggcacgcgccaccacacccagctaattttttgtatttttagtaaagacggggtttcaccatgttggtcaggctggtctcaaactcctgacctcgtgatccacccgcctcggcctcccaaagcgctgggattacaggcgtgagccaccacacccggccgtggaatggttttcttagcatatcctcctggggccgtggcgccccggctgtgggccgtggtggatgtcccttgtttcagtggtcctacaaaggtagatggtgggcggacaccgaagtcaacttgactgtaaaagtaccccataccgttgacgcgctgtggcagacctgtgggtgcggtctcccctctccaaatgccacctcttcctgctccctcctcttttggctcctactcagtagttccattgtgggctgcagtaatataaggacctgttctggacacagcactgggcccgctggggttttagtagggcagccccttccctgcaggagtgaggcatggtgacagcagtcccctatgtgcccccaagtcatctgagcattggtgtgcattaaggtactcaatcttccaacaataaataccataagtgc

SEQ ID NO: 3451 - protein, 75 aa, Homo sapiens; identical to SEQ ID NO: 213

SEQ ID NO: 3452 - DNA, 2116 bp, Homo sapiens
cttgtggacggcggatgaggatgaggcgcccagatcttcccgaaatatttcctaatcgttcatcatgatgttatgttgttgttttcacaaagggaattaatattggcctccttttctacaaatcttgccaacactgcgtgaaatgttttcgttgcttctctattcccaaggtttcgtattattttaccaagtcggaaaatggacggcgcttaaactgttttttccctgaaaggaagagggctgtaatcactaaagtgttttaaaatctccagcgcaaaagcctgcggtgccacagggacgaggcctggagagcagtcgctcctagaaccggggcgcgaagggcacccccgcctccagcacgcgccctccgccctcccggcctcgctccccccggagtgggggcctcgccggcccctggtccccgtcactcagcaacgtcgggtcagccttcgccgggttagtggcgacgcggccgcgcgaattcgcacaggtgacctcaaagcagaagctctgaattcacctctcatctgacgactgacagctgctgccaccgccagcctctgtcccttgcccaggcctgtcacacggctgcctctcagcaggggcagtagaatgaaagagggcatgtctaataacagcaccactagcatctcccaagccaggaaagctgtggagcagctaaagatggaagcctgtatggacagggtcaaggtctcccaggcagctgcggacctcctggcctactgtgaagctcacgtgcgggaagatcctctcatcattccagtgcctgcatcagaaaacccctttcgcgagaagaagttcttttgtaccattctctaactccgtgtgtgatgaaaacgcctccttttctgaccttcaaagtcccctgtagagaccatgcatgctctaagccttagggagtgagaccaacacccatccctgcccagccaacagtggccggggcttgtcttatgtttccatctgttttcttcgtggcattcaatttcatttttttccttttcattttcatgttattttcattattggcaaagaaaatcaaaatgtttatagccaaataacaaatgtgccatgtaaaagtaagtctggacttaagagtttaaaatttttaaacatcagtttccaagtttatatcatattaatacatttcagtggataatttattttaaaaaaaaaactatgcctaaatatcccttatttgcaatattcagtatcaaattagagcattttgaccaactgaaacatataacgttttcatctcctttcctggagaaagcagctgcagaggttctgtatttcctgcatttccatcatcctagtaaaaagacaacaacccacaggattggaatggttttcttttgttttttttttgttgttgttgttgttttgagatggagtctcgctctgtcacccaggctggagtgcaatggcgtgacctcagctcactgcgacctccacctcctgggttcaagcgattctcctgcctcagcctcctgagtagctgggatcataggcacgcgccaccacacccagctaattttttgtatttttagtaaagacggggtttcaccatgttggtcaggctggtctcaaactcctgacctcgtgatccacccgcctcggcctcccaaagcgctgggattacaggcgtgagccaccacacccggccgtggaatggttttcttagcatatcctcctggggccgtggcgccccggctgtgggccgtggtggatgtcccttgtttcagtggtcctacaaaggtagatggtgggcggacaccgaagtcaacttgactgtaaaagtaccccataccgttgacgcgctgtggcagacctgtgggtgcggtctcccctctccaaatgccacctcttcctgctccctcctcttttggctcctactcagtagttccattgtgggctgcagtaatataaggacctgttctggacacagcactgggcccgctggggttttagtagggcagccccttccctgcaggagtgaggcatggtgacagcagtcccctatgtgcccccaagtcatctgagcattggtgtgcattaaggtactcaatcttccaacaataaataccataagtgc

SEQ ID NO: 3453 - protein, 75 aa, Homo sapiens; identical to SEQ ID NO: 213

SEQ ID NO: 3454 - DNA, 2004 bp, Homo sapiens
cttgtggacggcggatgaggatgaggcgcccagatcttcccgaaatatttcctaatcgttcatcatgatgttatgttgttgttttcacaaagggaattaatattggcctccttttctacaaatcttgccaacactgcgtgaaatgttttcgttgcttctctattcccaaggtttcgtattattttaccaagtcggaaaatggacggcgcttaaactgttttttccctgaaaggaagagggctgtaatcactaaagtgttttaaaatctccagcgcaaaagcctgcggtgccacagggacgaggcctggagagcagtcgctcctagaaccggggcgcgaagggcacccccgcctccagcacgcgccctccgccctcccggcctcgctccccccggagtgggggcctcgccggcccctggtccccgtcactcagcaacgtcgggtcagccttcgccgggttagtggcgacgcggccgcgcgaattcgcacaggggcagtagaatgaaagagggcatgtctaataacagcaccactagcatctcccaagccaggaaagctgtggagcagctaaagatggaagcctgtatggacagggtcaaggtctcccaggcagctgcggacctcctggcctactgtgaagctcacgtgcgggaagatcctctcatcattccagtgcctgcatcagaaaacccctttcgcgagaagaagttcttttgtaccattctctaactccgtgtgtgatgaaaacgcctccttttctgaccttcaaagtcccctgtagagaccatgcatgctctaagccttagggagtgagaccaacacccatccctgcccagccaacagtggccggggcttgtcttatgtttccatctgttttcttcgtggcattcaatttcatttttttccttttcattttcatgttattttcattattggcaaagaaaatcaaaatgtttatagccaaataacaaatgtgccatgtaaaagtaagtctggacttaagagtttaaaatttttaaacatcagtttccaagtttatatcatattaatacatttcagtggataatttattttaaaaaaaaaactatgcctaaatatcccttatttgcaatattcagtatcaaattagagcattttgaccaactgaaacatataacgttttcatctcctttcctggagaaagcagctgcagaggttctgtatttcctgcatttccatcatcctagtaaaaagacaacaacccacaggattggaatggttttcttttgttttttttttgttgttgttgttgttttgagatggagtctcgctctgtcacccaggctggagtgcaatggcgtgacctcagctcactgcgacctccacctcctgggttcaagcgattctcctgcctcagcctcctgagtagctgggatcataggcacgcgccaccacacccagctaattttttgtatttttagtaaagacggggtttcaccatgttggtcaggctggtctcaaactcctgacctcgtgatccacccgcctcggcctcccaaagcgctgggattacaggcgtgagccaccacacccggccgtggaatggttttcttagcatatcctcctggggccgtggcgccccggctgtgggccgtggtggatgtcccttgtttcagtggtcctacaaaggtagatggtgggcggacaccgaagtcaacttgactgtaaaagtaccccataccgttgacgcgctgtggcagacctgtgggtgcggtctcccctctccaaatgccacctcttcctgctccctcctcttttggctcctactcagtagttccattgtgggctgcagtaatataaggacctgttctggacacagcactgggcccgctggggttttagtagggcagccccttccctgcaggagtgaggcatggtgacagcagtcccctatgtgcccccaagtcatctgagcattggtgtgcattaaggtactcaatcttccaacaataaataccataagtgc

SEQ ID NO: 3455 - protein, 75 aa, Homo sapiens; identical to SEQ ID NO: 213

SEQ ID NO: 3456 - DNA, 16235 bp, Homo sapiens
gcgcggccccctccagcccccggctcccggcagcagaagcagaaggcagcgccaggggccgccgccgccgccgagctccgcggggctcgggagccggccccggcgaggaggcgcggaaccatggccgatgggggcgagggcgaagacgagatccagttcctgcgaactgagaatgtgcccccagacctctccatctgcacctttgtgctggagcagtccctctctgtccgggcgctgcaggagatgctggctaacaccgtggagaaatcagaaggggcaattgatgtggaaaaatggactgctcaaggtggtggtcatcgaacactcctctacggacatgccatattgctgcgccattcctatagtggcatgtatctgtgctgcctgtccacctcccggtcttcaactgataagctggcttttgatgttggcttgcaagaggacaccacaggggaggcttgttggtggaccatacaccctgcctctaagcagcgatcagaaggagaaaaagtacgagttggagatgacctcatcttagttagcgtgtcctctgaaaggtacttgcacttgtcttatggcaacggcagcttacacgtggatgccgctttccagcagactctctggagcgtggccccaatcagctcaggaagtgaggcagcccaagggtatctcattggtggtgatgtcctcaggttgctgcatggacacatggacgagtgtctcactgtcccttcaggagaacatggtgaagagcagcggagaactgttcattatgaaggtggcgctgtgtctgttcatgcacgttccctttggagactagagacgctaagagttgcgtggagtggaagccacataagatggggacagccattccgactacgccatgtcacaacaggaaaatacttgagtctcatggaagacaaaaaccttctactcatggacaaagagaaagctgatgtaaaatcaacagcatttaccttccggtcttccaaggaaaaattggatgtaggggtgagaaaagaagtagatggcatgggaacatctgaaataaaatacggtgactcagtatgctatatacaacatgtagacacaggcctatggcttacttaccagtctgtggacgtgaaatccgtgagaatgggatctatacaacgtaaggctattatgcatcatgaaggccacatggatgatggcataagtttgtcgagatcccagcatgaagaatcacgcacagcccgagttatccggagcacagtcttccttttcaatagatttataaggggccttgatgctctcagcaagaaagcgaaggcttccacagtcgatttgcctatagagtccgtaagcctaagtctgcaggatctcattggctacttccaccccccagatgagcatttagagcatgaagacaaacagaacagactacgagccctgaagaatcggcaaaatctcttccaggaagagggaatgatcaacctcgtgcttgagtgcatagaccgtttgcacgtctacagcagtgcagcacactttgctgatgttgctgggcgagaagcaggagagtcttggaaatccattctgaattctctgtatgagttgctggcggctctaattagaggaaatcgtaaaaactgtgctcaattttctggctccctcgactggttgatcagcagattggaaagactggaagcttcttcaggcattctggaagttttacactgtgttttagtagaaagtccagaagctctaaatattattaaagaaggacatattaaatctattatctcacttttagacaaacatggaagaaatcacaaggttctggatgtcttgtgctcactctgtgtttgccacggggttgcagtccgttctaaccagcatctcatctgtgacaatctcctaccaggaagagacttgttattgcagacacgtcttgtgaaccatgtcagcagcatgagacccaatatttttctgggcgtcagtgaaggttctgctcagtataagaaatggtactatgaattgatggtggaccacacagagccctttgtgacagctgaagcaactcacctgcgagtgggctgggcttccactgaaggatattctccctaccctggagggggcgaagagtggggtggaaatggtgttggagatgatctcttctcctatggatttgatggccttcatctctggtcaggttgtattgctcgtactgtaagctcaccaaaccaacatctgttaagaactgatgatgtcatcagttgctgtttagatctgagtgccccaagcatctcgttccgaattaatggacaacctgttcaaggaatgtttgagaatttcaacatcgatggcctcttctttccagtcgttagtttctctgcaggaataaaagtacgctttctgcttggagggcgacatggagaattcaaatttcttcctccacctgggtatgctccttgttatgaagctgttctgccaaaagaaaagttgaaagtggaacacagccgagagtacaagcaagaaagaacttacacacgcgacctgctgggccccacagtttccctgacgcaagctgccttcacacccatccctgtggataccagccagatcgtgttgcctcctcatctagaaagaataagagaaaaactggcagagaatatccatgaactctgggttatgaataaaattgagcttggctggcagtatggtccggttagagatgacaacaagagacaacacccatgcctggtggagttctccaagctgcctgaacaggagcgcaattacaacttacaaatgtcgcttgagaccctgaagactttgttggcattaggatgtcatgtgggtatatcagatgaacatgctgaagacaaggtgaaaaaaatgaagctacccaagaattaccagctgacaagtggatacaagcctgcccctatggacctgagctttatcaaactcaccccatcacaagaagcaatggtggacaagttggcagaaaatgcacataatgtgtgggcgcgggatcgaatccggcagggctggacttatggcatccaacaggacgtaaagaacagaagaaatcctcgccttgttccctacactcttctggatgaccgaaccaagaaatccaacaaggacagcctccgcgaggctgtgcgcacgctgctggggtacggctacaacttggaagcaccagatcaagatcatgcagccagagccgaagtgtgcagcggcaccggggaaaggttccgaatcttccgtgccgagaagacctatgcagtgaaggccggacggtggtattttgaatttgagacggtcactgctggagacatgagggttggttggagtcgtcctggttgtcaaccggatcaggagcttggctcagatgaacgtgcctttgcctttgatggcttcaaggcccagcggtggcatcagggcaatgaacactatgggcgctcttggcaagcaggcgatgtcgtggggtgtatggttgacatgaacgaacacaccatgatgttcacactgaatggtgaaatccttcttgatgattcaggctcagaactggctttcaaggactttgatgttggcgatggattcatacctgtgtgtagccttggagtggctcaagtgggtaggatgaactttggaaaggatgtcagcaccttgaaatatttcaccatctgtggcttacaagagggctatgaaccatttgccgttaatacaaacagggatattaccatgtggctgagcaagaggcttcctcagtttcttcaagttccatcaaaccatgaacatatagaggtgaccagaatagacggcaccatagacagttccccatgtttaaaggtcactcagaagtcttttggttctcagaacagcaacactgatatcatgttttatcgcctgagcatgccgatcgagtgcgcggaggtcttctccaagacggtggctggagggctccctggggctggcctttttgggcccaagaatgacttggaagattatgatgctgattctgactttgaggttctgatgaagacagctcatggccatctagtgcccgatcgtgttgacaaagacaaagaagctactaaaccagagtttaacaaccacaaagattatgcccaggaaaagccctctcgtctgaaacaaagatttttgcttagaagaacaaagccagattacagcacaagccattctgcaagactcaccgaagatgtccttgctgatgatcgggatgactatgatttcttgatgcaaacgtccacgtactattactcagtgagaatctttcctggacaagaacctgctaatgtctgggtgggctggattacatcagatttccatcagtatgacacaggctttgacttggacagagttcgcacagtaacagttactctaggagatgaaaaaggaaaagtgcatgaaagcatcaaacgcagcaactgctatatggtatgtgcgggtgagagcatgagccccgggcaaggacgcaacaataatggactggagattggctgtgtggtggatgctgccagcgggctgctcacattcattgccaatggcaaggaactgagcacatactatcaggtggaaccgagtacaaaattatttcctgcggtttttgcacaagctacaagtcccaatgttttccagtttgagttgggaagaataaagaatgtgatgcctctctcggcgggattattcaagagtgagcacaagaaccccgtgccgcagtgccccccgcgcctccacgtgcagttcctgtcacacgtcctgtggagcagaatgcccaaccagtttttgaaggtagatgtgtctcgaataagtgaacgccaaggctggttggtgcagtgtttggatcctctgcagttcatgtctcttcatatccctgaggaaaacagatctgttgacatcttagagttgacagagcaggaggaattgctgaaatttcactatcacactctccggctctactcagccgtctgtgctcttgggaaccaccgggtggcccatgccctgtgcagccatgtggatgaacctcagctcctctatgccattgagaacaagtacatgcctggtttgctgcgtgctggctactatgacctgctgattgacatccacctgagctcctatgccactgccaggctcatgatgaacaacgagtacattgtccccatgacggaggagacgaagagcatcaccctgttccctgatgagaacaaaaaacacggccttccagggatcggcctcagcacctccctcaggccacggatgcagttttcctcccccagttttgtaagcattagtaatgaatgttaccagtacagtccagagttcccactggacatcctcaagtccaaaaccatacagatgctgacagaagctgttaaagagggcagtcttcatgcccgggacccagttggagggactactgaattcctctttgtacctctcatcaagcttttctataccctgctgatcatgggcatctttcacaacgaggacttgaagcacatcttgcagttgattgagcccagtgtgtttaaagaagctgccactccggaggaggagagtgacacgctggagaaagagctcagtgtggacgatgcaaagctgcaaggagctggtgaggaagaagccaaggggggcaagcggcccaaggaaggcctgctccaaatgaaactgccagagccagttaaattgcagatgtgcctactgcttcagtacctctgtgactgccaggtccggcaccggatagaagccattgtagccttttcagatgattttgtggctaagctccaagacaatcaacgtttccgatacaacgaagtcatgcaagccttaaacatgtcagctgcactcacagccaggaagacaaaggaatttagatcaccacctcaagaacagatcaatatgcttctcaattttaaggatgacaaaagtgaatgtccatgtccagaagaaattcgtgaccaactattggatttccatgaagatttgatgacacattgtggaattgagctggatgaagatgggtctctggatggaaacagtgatttaacaattagagggcgtctgctatccctggtagaaaaggtgacatatctgaagaagaagcaagcagaaaaaccagttgagagtgactccaaaaagtcctccactctgcagcagctgatttctgagaccatggtccgatgggctcaggagtctgtcattgaagaccccgagctggtgagggccatgtttgtgttgctccatcggcagtatgacggcattgggggtcttgttcgggccctgccaaagacctacacgataaatggtgtgtccgtggaggacaccatcaacctgctggcatcccttggtcagattcggtccctgctgagtgtgagaatgggcaaagaagaagagaagctcatgattcgtggattaggggatattatgaataacaaagtgttttaccagcaccctaatctcatgagggcactggggatgcacgagactgtgatggaggtcatggtgaacgtccttggaggtggagagtccaaggaaatcacctttcccaagatggtggccaactgttgccgttttctctgttacttctgtcgtataagtaggcagaatcaaaaagctatgtttgatcatctcagttatttactggaaaacagcagtgttggtcttgcctccccagctatgagaggttcaacaccactggatgtggctgcagcttcggtgatggataataatgaactagcattagctctgcgtgagccggatctagaaaaggtagttcgttatttggctggttgtggactgcaaagttgccagatgctggtgtctaagggctatccagacattgggtggaacccagttgaaggagagagatatcttgactttcttagatttgctgtcttctgtaatggggagagtgtggaggaaaatgcaaatgtcgtggtgagattgctcattcggaggcctgagtgttttggtcctgctttgagaggagaaggtgggaatgggcttcttgcagcaatggaagaagccatcaaaatcgccgaggatccttcccgagatggtccctcaccaaatagcggatccagtaaaacacttgacacagaggaggaggaagatgacactatccacatggggaacgcgatcatgaccttctattcagctttgattgacctcttgggacgctgtgctcctgagatgcatttgattcatgccgggaagggagaagccatcagaattaggtccattttgagatccctcattcccctgggagatttggtgggcgttatcagcatcgcttttcagatgccaacaatagccaaagatgggaatgtggtggaacctgacatgtctgcggggttttgcccagatcacaaggcagccatggttttattccttgacagggtctatgggattgaggttcaagacttcctcctccatcttcttgaggttggctttctgccagatctccgggcggctgcttctttagatacggcagctttgagtgctacagacatggccttggccctcaatcggtacctttgcacagccgtcttgccattgttaacaagatgtgctcctctctttgctggcacagagcaccacgcttctctcattgactcattacttcatactgtgtatagactttctaagggctgttcacttaccaaagctcagcgggattccatagaagtttgtttactctctatttgtggacaactgagaccttctatgatgcagcacttactcagaagattagtatttgatgttccattattaaatgaacacgcaaagatgcctcttaaactgctgacaaatcattatgaaagatgctggaaatattactgcctgcctggagggtggggaaactttggtgctgcctcagaagaagaacttcatttatcaagaaagttgttctggggcatttttgatgccctgtctcaaaagaaatatgaacaagaacttttcaaactggcactgccttgcctgagtgcagttgcgggagctttgcctccagactacatggagtcaaattatgtcagtatgatggaaaaacagtcatcaatggattctgaagggaactttaacccacaacctgttgatacctcaaatattacaattcctgagaaattggaatacttcattaacaaatatgcagaacactcccatgacaaatggtcaatggacaagttggcaaatggatggatttatggagaaatatattcagactcttctaaggttcagccattaatgaagccatataagctattgtctgaaaaggaaaaagaaatttatcgctggccaatcaaagaatctttaaaaactatgctggcttggggctggagaattgaaagaactcgggagggagacagcatggccctttacaaccggactcgtcgtatttctcagacaagccaggtttctgtggacgctgcccatggttacagtccccgggccattgacatgagcaatgttacactatctagagacctgcatgctatggcagaaatgatggctgaaaactaccataatatatgggcaaagaaaaagaaaatggagttggagtccaaaggaggaggaaaccatcctctgctggtgccctatgatacactgacagccaaagagaaagccaaggatagagaaaaagcacaggacatcctcaagttcttgcagatcaatggatatgctgtatccagaggatttaaggacctggaactggacacgccttctattgagaaacgatttgcctatagtttcctccaacaactcattcgctatgtggatgaagcccatcagtatatcctggagtttgatggtggcagcagaggcaaaggagaacatttcccttatgaacaagaaatcaagttctttgcaaaagtcgttcttcctttaattgatcagtatttcaaaaaccatcgtttatacttcttatctgcagcaagcagacctctctgctctggaggacatgcttccaacaaagagaaagaaatggtgactagcctattctgcaaacttggagttcttgtcaggcataggatttcactatttggcaatgatgcaacatcaattgtcaactgtcttcatattttgggtcagactttggatgcaaggacagtgatgaagactggcctggagagtgttaaaagtgcactcagagcttttctggacaacgctgcagaggatctggagaagaccatggaaaacctcaagcagggccagttcactcacacccgaaaccagcccaaaggggttactcagattatcaattacaccacagtggccctgctgccaatgctgtcttcattatttgaacatattggccagcatcagttcggagaagacctaatattggaagatgtccaggtgtcttgttatagaattctgactagcttatatgctttgggaaccagcaagagtatttacgtggagaggcaacgttctgcattaggagaatgtctagctgcctttgctggtgcttttcctgtagcatttttggaaactcatctggacaaacataatatttactccatctacaataccaagtcttcacgagaaagagcagctctcagtttgccaactaatgtggaagatgtttgtccaaacataccgtctttggagaaactcatggaagaaatcgtggaattagccgagtccggcattcgctacactcaaatgccacatgtcatggaagtcatactgcccatgctttgcagctacatgtctcgttggtgggagcatggacctgagaacaatccagaacgggccgagatgtgctgcacagccctgaactcagagcacatgaacacacttctagggaacatattgaaaatcatatataataacttggggattgatgagggagcctggatgaagaggctagcagtgttttcccagcctataataaataaagtgaaacctcagctcttgaaaactcatttcttgccgttaatggagaaactcaagaaaaaggcagctacggtggtgtctgaggaagaccacctgaaagctgaggccaggggggacatgtcggaggcagaactcctcatcctagatgagttcaccacactggccagagatctctatgccttctaccctctcttgattagatttgtggactataacagggcaaagtggctaaaggagcctaacccagaagcagaggagctcttccgcatggtggctgaagtgtttatctactggtcgaagtcccataatttcaaaagagaagagcagaacttcgttgtacagaatgaaatcaacaatatgtctttccttattactgataccaagtcaaagatgtcaaaggcagctgtttctgatcaggaaaggaagaaaatgaagcgcaaaggagatcggtattccatgcagacctctctgattgtagcagctctgaagcggttactgcccattgggttgaacatctgtgcccctggggaccaggagctcattgctctggccaaaaatcgatttagcctgaaagataccgaggatgaagtacgagatataatccgcagcaatattcatttacaaggcaagttggaggatcctgctattagatggcaaatggctctttacaaagacttaccaaacaggactgatgatacctcagatccagagaagacggtagaaagagtattggatatagcaaatgtgctttttcatcttgaacagaagtctaaacgtgtgggtcggagacattactgtctcaggtggaacatcctcagagatctaaaaaggctgtatggcataaactactgtccaagcagaggaaaagggctgttgtagcctgcttccggatggcccccttatataatctgccaaggcatcgggctgtcaatctctttcttcagggatatgaaaagtcttggattgaaacagaagaacattactttgaagataaactgatagaagatttagcaaaacctggggctgaacctccagaagaagatgaaggcactaagagagttgatcctctacatcagctgatccttctgtttagtcggacagctttaacagagaaatgcaaactggaggaagattttttatatatggcctatgcagatattatggcaaagagttgtcatgatgaggaagatgacgatggtgaagaggaagtgaagagttttgaagaaaaagaaatggaaaagcaaaagcttctataccagcaagcccgactccacgatcgtggcgcggctgagatggtgctacagacaatcagtgccagcaaaggtgaaactggaccaatggtagcagctactctgaaacttggaattgctattttaaatggtgggaactccacagtacagcagaaaatgcttgactacctcaaggagaaaaaggatgtgggcttctttcagagcctggccggcctgatgcagtcatgtagtgtccttgacctaaatgcatttgagcgacaaaacaaagctgaaggtcttgggatggtgacagaggaaggatcaggagaaaaggttctgcaggacgatgagttcacctgtgacctcttccgattcctgcaactactctgtgagggacacaactcagattttcagaattatctgagaactcagactggcaataatacaactgtcaacataattatctccactgtagactacctactgagagttcaggaatcaattagtgacttttattggtattactctgggaaagatgttattgatgaacaaggacaacggaatttctccaaagctatccaagtggcaaaacaagtctttaacactcttacagagtatattcagggtccttgcactgggaatcaacagagtttggcacacagcaggctgtgggatgctgtggtcggctttcttcatgtgtttgcccatatgcagatgaagctgtcgcaggattccagtcaaattgagctattaaaagaattaatggatctgcagaaggatatggtggtcatgttgctgtccatgttagaaggtaatgttgttaatggaacgattggcaaacagatggtggatatgcttgtggaatcttccaacaacgtggagatgattctcaaattttttgacatgttcttaaaactaaaggatttgacgtcgtctgatacttttaaagaatatgaccccgatggcaagggagtcatttccaagagggacttccacaaagcgatggagagccataagcactacacgcagtcagaaacggaatttcttttgtcttgtgcggagacggatgagaatgaaaccctcgactacgaagagttcgtcaaacgcttccacgaacctgcgaaggacatcggcttcaacgtcgccgtccttctgacaaacctctctgagcacatgcccaacgatacccgacttcagacttttctggaattagcagagagcgtcctgaattatttccagccctttctgggccgcatcgaaatcatgggaagcgccaaacgcatcgagagggtctattttgaaatcagtgagtccagccgaacccagtgggagaagccccaggtcaaggagtccaaaagacagttcatatttgacgtggtcaacgaaggcggagagaaagagaagatggaactctttgtgaacttctgcgaggacaccatctttgaaatgcagctggcggctcagatctcggagtcggacttgaacgagaggtcagcgaataaggaagaaagcgagaaggagaggccggaagagcaggggccgaggatggctttcttctccattctgacggtcaggtcggccctgtttgcgctcaggtacaatatcttgacccttatgcgaatgctcagtctgaagagcctgaagaagcagatgaaaaaagtaaaaaagatgaccgtgaaggacatggtcacggccttcttttcatcctactggagtattttcatgaccctcttgcacttcgtggccagcgttttcagaggctttttccgcatcatttgcagcctgctgcttgggggaagcctcgtcgaaggtgctaaaaagatcaaagttgcagaactgttagccaacatgccagaccccactcaggatgaggttagaggagatggggaggagggagagaggaaacccctggaagccgccctgccctccgaggatctgaccgacttaaaggagctgacagaggaaagtgaccttctttcggacatctttggcctggatctgaagagagaaggaggacagtacaaactgattcctcataatccaaatgctgggctcagtgacctcatgagcaacccagtccccatgcctgaggtgcaggaaaaatttcaggaacagaaggcaaaagaagaagaaaaggaagaaaaagaagaaaccaaatctgaacctgaaaaagccgagggagaagatggagaaaaagaagagaaagccaaggaagacaagggcaaacaaaagttgaggcagcttcacacacacagatacggagaaccagaagtgccagagtcagcattctggaagaaaatcatagcatatcaacagaaacttctaaactattttgctcgcaacttttacaacatgagaatgttagccttatttgtcgcatttgctatcaatttcatcttgctcttttataaggtctccacttcttctgtggttgaaggaaaggagctccccacgagaagttcaagtgaaaatgccaaagtgacaagcctggacagcagctcccatagaatcatcgcagttcactatgtactagaggagagcagcggctacatggagcccacgttgcgtatcttagctattctgcacacggtcatttctttcttctgcatcattggatactactgcttgaaagtcccattggttatttttaagcgagaaaaggaagtggcacggaaattggaatttgatgggctttatattacagaacagccttcagaagatgatattaaaggccagtgggatagactcgtaatcaacacacagtcatttcccaacaactactgggacaaatttgttaaaagaaaggttatggataaatatggagagttctacggccgagacagaatcagtgaattacttggcatggacaaggcagctctggacttcagtgatgccagagaaaagaagaagccaaagaaagacagctccttatcagctgtactgaactccattgatgtgaagtatcagatgtggaaactaggagtcgttttcactgacaactccttcctctacctagcctggtatatgactatgtctgttcttggacactataacaactttttttttgccgctcaccttctcgacattgctatgggattcaagacattaagaaccatcttgtcctcagtaactcacaatggcaaacagctcgtattaaccgttggcttattagctgttgttgtatacctatacactgtggtggcattcaattttttccgaaaattctacaataaaagtgaagatggtgatacaccagatatgaaatgtgacgatatgctaacatgctatatgttccacatgtatgttggagttcgtgctggaggagggatcggggatgaaatcgaagacccagcaggagatgaatatgagatctatcgaatcatctttgacatcactttcttcttctttgttattgtcattctcttggccataatacaaggtctaattattgatgcttttggagaactaagagaccaacaggaacaagtcaaagaagacatggagaccaaatgcttcatctgtgggataggcaatgattacttcgacacagtgccacatggctttgaaacccacactttacaggagcacaacttggctaattacttgttttttctgatgtatcttataaacaaagatgaaacagaacacacaggacaggaatcttatgtctggaagatgtatcaagaaaggtgttgggaatttttcccagcaggggattgcttccggaaacagtatgaagaccagctaaattaaactcagacccaatcacctctaaaaaccaaaaccctacccctctctctccctctctcaatttctctgctctcttggaaacattttgctgattttgtgaattgccagcgttgtgtgttttctgggagcatcgaagctctgtttcggaagagctgtttcctccccccaccttttgtatttactttgagactaaagactgaagaataatctaaattcatactcagacaaaaaaaggaattctggaaagaaaaccattctggacactgtcataacacacatagatagattttcttctgagactcccggagtcttctcgagctacgagaccttcacagagacacgtggcagccacactcacccagcctctttatttcaccatcctggaaggaaactgtctgtctaatggtcacagagcactgtagcacttaacagattgccatggacaccagttgcgaagggaaatagtgccttactatatgtgggttgagctatgcagaagatacgtgcatgaaaaaacatctttattttctttatgtcgacctttcttttcttagattgattttgtgaggttttttttttttcctttagtcttttctttagtgggggagggtaagaaaagcagtttgcacttaaaaagaaaaaaaaaaaacgggtggtgtgtctcaggacaaaaggaggctcttctcattcagctaaattcacatttgccccccccccccgcccccgcccccatatgctcctgctattattttggtaatgctctgatgcaacattgcaactttatgaaatctttgtatgaaaacaaaaagactgcaaaaaatacactttcaaaagaaaccattcattgcatgtttattatgcaagtttaaatgaacaaagaaaaccttcagaaacaagttgatcaacgtgagagaaatttcatgataattattcatagtaataaagtgtcgtgggcttaattgtatatctggagccagtgtcatccaccaacaatgtgatacaatatgaacttgacagtagttttgggttttgctcattctttcagccacctgtgatcagttttgttgattaaggacttcttgtcaggccattttttaatatcaaagctgaagcaatatccattcagggatttcatcagttgcatcacaaaacacggatgataatatacatcactccattttttccattttgagtccttttaaatgtaatgctaacctttacaattaaaaagtcagattcagaatggaaacaaggtcattttgcaaacattggagctcttttattacaagtctgcttgttaattttagaactgtaaaaccgctctgattaaactatttaactaac

SEQ ID NO: 3457 - protein, 3556 aa, Homo sapiens
MADGGEGEDEIQFLRTENVPPDLSICTFVLEQSLSVRALQEMLANTVEKSEGAIDVEKWTAQGGGHRTLLYGHAILLRHSYSGMYLCCLSTSRSSTDKLAFDVGLQEDTTGEACWWTIHPASKQRSEGEKVRVGDDLILVSVSSERYLHLSYGNGSLHVDAAFQQTLWSVAPISSGSEAAQGYLIGGDVLRLLHGHMDECLTVPSGEHGEEQRRTVHYEGGAVSVHARSLWRLETLRVAWSGSHIRWGQPFRLRHVTTGKYLSLMEDKNLLLMDKEKADVKSTAFTFRSSKEKLDVGVRKEVDGMGTSEIKYGDSVCYIQHVDTGLWLTYQSVDVKSVRMGSIQRKAIMHHEGHMDDGISLSRSQHEESRTARVIRSTVFLFNRFIRGLDALSKKAKASTVDLPIESVSLSLQDLIGYFHPPDEHLEHEDKQNRLRALKNRQNLFQEEGMINLVLECIDRLHVYSSAAHFADVAGREAGESWKSILNSLYELLAALIRGNRKNCAQFSGSLDWLISRLERLEASSGILEVLHCVLVESPEALNIIKEGHIKSIISLLDKHGRNHKVLDVLCSLCVCHGVAVRSNQHLICDNLLPGRDLLLQTRLVNHVSSMRPNIFLGVSEGSAQYKKWYYELMVDHTEPFVTAEATHLRVGWASTEGYSPYPGGGEEWGGNGVGDDLFSYGFDGLHLWSGCIARTVSSPNQHLLRTDDVISCCLDLSAPSISFRINGQPVQGMFENFNIDGLFFPVVSFSAGIKVRFLLGGRHGEFKFLPPPGYAPCYEAVLPKEKLKVEHSREYKQERTYTRDLLGPTVSLTQAAFTPIPVDTSQIVLPPHLERIREKLAENIHELWVMNKIELGWQYGPVRDDNKRQHPCLVEFSKLPEQERNYNLQMSLETLKTLLALGCHVGISDEHAEDKVKKMKLPKNYQLTSGYKPAPMDLSFIKLTPSQEAMVDKLAENAHNVWARDRIRQGWTYGIQQDVKNRRNPRLVPYTLLDDRTKKSNKDSLREAVRTLLGYGYNLEAPDQDHAARAEVCSGTGERFRIFRAEKTYAVKAGRWYFEFETVTAGDMRVGWSRPGCQPDQELGSDERAFAFDGFKAQRWHQGNEHYGRSWQAGDVVGCMVDMNEHTMMFTLNGEILLDDSGSELAFKDFDVGDGFIPVCSLGVAQVGRMNFGKDVSTLKYFTICGLQEGYEPFAVNTNRDITMWLSKRLPQFLQVPSNHEHIEVTRIDGTIDSSPCLKVTQKSFGSQNSNTDIMFYRLSMPIECAEVFSKTVAGGLPGAGLFGPKNDLEDYDADSDFEVLMKTAHGHLVPDRVDKDKEATKPEFNNHKDYAQEKPSRLKQRFLLRRTKPDYSTSHSARLTEDVLADDRDDYDFLMQTSTYYYSVRIFPGQEPANVWVGWITSDFHQYDTGFDLDRVRTVTVTLGDEKGKVHESIKRSNCYMVCAGESMSPGQGRNNNGLEIGCVVDAASGLLTFIANGKELSTYYQVEPSTKLFPAVFAQATSPNVFQFELGRIKNVMPLSAGLFKSEHKNPVPQCPPRLHVQFLSHVLWSRMPNQFLKVDVSRISERQGWLVQCLDPLQFMSLHIPEENRSVDILELTEQEELLKFHYHTLRLYSAVCALGNHRVAHALCSHVDEPQLLYAIENKYMPGLLRAGYYDLLIDIHLSSYATARLMMNNEYIVPMTEETKSITLFPDENKKHGLPGIGLSTSLRPRMQFSSPSFVSISNECYQYSPEFPLDILKSKTIQMLTEAVKEGSLHARDPVGGTTEFLFVPLIKLFYTLLIMGIFHNEDLKHILQLIEPSVFKEAATPEEESDTLEKELSVDDAKLQGAGEEEAKGGKRPKEGLLQMKLPEPVKLQMCLLLQYLCDCQVRHRIEAIVAFSDDFVAKLQDNQRFRYNEVMQALNMSAALTARKTKEFRSPPQEQINMLLNFKDDKSECPCPEEIRDQLLDFHEDLMTHCGIELDEDGSLDGNSDLTIRGRLLSLVEKVTYLKKKQAEKPVESDSKKSSTLQQLISETMVRWAQESVIEDPELVRAMFVLLHRQYDGIGGLVRALPKTYTINGVSVEDTINLLASLGQIRSLLSVRMGKEEEKLMIRGLGDIMNNKVFYQHPNLMRALGMHETVMEVMVNVLGGGESKEITFPKMVANCCRFLCYFCRISRQNQKAMFDHLSYLLENSSVGLASPAMRGSTPLDVAAASVMDNNELALALREPDLEKVVRYLAGCGLQSCQMLVSKGYPDIGWNPVEGERYLDFLRFAVFCNGESVEENANVVVRLLIRRPECFGPALRGEGGNGLLAAMEEAIKIAEDPSRDGPSPNSGSSKTLDTEEEEDDTIHMGNAIMTFYSALIDLLGRCAPEMHLIHAGKGEAIRIRSILRSLIPLGDLVGVISIAFQMPTIAKDGNVVEPDMSAGFCPDHKAAMVLFLDRVYGIEVQDFLLHLLEVGFLPDLRAAASLDTAALSATDMALALNRYLCTAVLPLLTRCAPLFAGTEHHASLIDSLLHTVYRLSKGCSLTKAQRDSIEVCLLSICGQLRPSMMQHLLRRLVFDVPLLNEHAKMPLKLLTNHYERCWKYYCLPGGWGNFGAASEEELHLSRKLFWGIFDALSQKKYEQELFKLALPCLSAVAGALPPDYMESNYVSMMEKQSSMDSEGNFNPQPVDTSNITIPEKLEYFINKYAEHSHDKWSMDKLANGWIYGEIYSDSSKVQPLMKPYKLLSEKEKEIYRWPIKESLKTMLAWGWRIERTREGDSMALYNRTRRISQTSQVSVDAAHGYSPRAIDMSNVTLSRDLHAMAEMMAENYHNIWAKKKKMELESKGGGNHPLLVPYDTLTAKEKAKDREKAQDILKFLQINGYAVSRGFKDLELDTPSIEKRFAYSFLQQLIRYVDEAHQYILEFDGGSRGKGEHFPYEQEIKFFAKVVLPLIDQYFKNHRLYFLSAASRPLCSGGHASNKEKEMVTSLFCKLGVLVRHRISLFGNDATSIVNCLHILGQTLDARTVMKTGLESVKSALRAFLDNAAEDLEKTMENLKQGQFTHTRNQPKGVTQIINYTTVALLPMLSSLFEHIGQHQFGEDLILEDVQVSCYRILTSLYALGTSKSIYVERQRSALGECLAAFAGAFPVAFLETHLDKHNIYSIYNTKSSRERAALSLPTNVEDVCPNIPSLEKLMEEIVELAESGIRYTQMPHVMEVILPMLCSYMSRWWEHGPENNPERAEMCCTALNSEHMNTLLGNILKIIYNNLGIDEGAWMKRLAVFSQPIINKVKPQLLKTHFLPLMEKLKKKAATVVSEEDHLKAEARGDMSEAELLILDEFTTLARDLYAFYPLLIRFVDYNRAKWLKEPNPEAEELFRMVAEVFIYWSKSHNFKREEQNFVVQNEINNMSFLITDTKSKMSKAAVSDQERKKMKRKGDRYSMQTSLIVAALKRLLPIGLNICAPGDQELIALAKNRFSLKDTEDEVRDIIRSNIHLQGKLEDPAIRWQMALYKDLPNRTDDTSDPEKTVERVLDIANVLFHLEQKSKRVGRRHYCLRWNILRDLKRLYGINYCPSRGKGLL

SEQ ID NO: 3458 - DNA, 16539 bp, Homo sapiens
gcgcggccccctccagcccccggctcccggcagcagaagcagaaggcagcgccaggggccgccgccgccgccgagctccgcggggctcgggagccggccccggcgaggaggcgcggaaccatggccgatgggggcgagggcgaagacgagatccagttcctgcgaactgagaatgtgcccccagacctctccatctgcacctttgtgctggagcagtccctctctgtccgggcgctgcaggagatgctggctaacaccgtggagaaatcagaaggggcaattgatgtggaaaaatggactgctcaaggtggtggtcatcgaacactcctctacggacatgccatattgctgcgccattcctatagtggcatgtatctgtgctgcctgtccacctcccggtcttcaactgataagctggcttttgatgttggcttgcaagaggacaccacaggggaggcttgttggtggaccatacaccctgcctctaagcagcgatcagaaggagaaaaagtacgagttggagatgacctcatcttagttagcgtgtcctctgaaaggtacttgcacttgtcttatggcaacggcagcttacacgtggatgccgctttccagcagactctctggagcgtggccccaatcagctcaggaagtgaggcagcccaagggtatctcattggtggtgatgtcctcaggttgctgcatggacacatggacgagtgtctcactgtcccttcaggagaacatggtgaagagcagcggagaactgttcattatgaaggtggcgctgtgtctgttcatgcacgttccctttggagactagagacgctaagagttgcgtggagtggaagccacataagatggggacagccattccgactacgccatgtcacaacaggaaaatacttgagtctcatggaagacaaaaaccttctactcatggacaaagagaaagctgatgtaaaatcaacagcatttaccttccggtcttccaaggaaaaattggatgtaggggtgagaaaagaagtagatggcatgggaacatctgaaataaaatacggtgactcagtatgctatatacaacatgtagacacaggcctatggcttacttaccagtctgtggacgtgaaatccgtgagaatgggatctatacaacgtaaggctattatgcatcatgaaggccacatggatgatggcataagtttgtcgagatcccagcatgaagaatcacgcacagcccgagttatccggagcacagtcttccttttcaatagatttataaggggccttgatgctctcagcaagaaagcgaaggcttccacagtcgatttgcctatagagtccgtaagcctaagtctgcaggatctcattggctacttccaccccccagatgagcatttagagcatgaagacaaacagaacagactacgagccctgaagaatcggcaaaatctcttccaggaagagggaatgatcaacctcgtgcttgagtgcatagaccgtttgcacgtctacagcagtgcagcacactttgctgatgttgctgggcgagaagcaggagagtcttggaaatccattctgaattctctgtatgagttgctggcggctctaattagaggaaatcgtaaaaactgtgctcaattttctggctccctcgactggttgatcagcagattggaaagactggaagcttcttcaggcattctggaagttttacactgtgttttagtagaaagtccagaagctctaaatattattaaagaaggacatattaaatctattatctcacttttagacaaacatggaagaaatcacaaggttctggatgtcttgtgctcactctgtgtttgccacggggttgcagtccgttctaaccagcatctcatctgtgacaatctcctaccaggaagagacttgttattgcagacacgtcttgtgaaccatgtcagcagcatgagacccaatatttttctgggcgtcagtgaaggttctgctcagtataagaaatggtactatgaattgatggtggaccacacagagccctttgtgacagctgaagcaactcacctgcgagtgggctgggcttccactgaaggatattctccctaccctggagggggcgaagagtggggtggaaatggtgttggagatgatctcttctcctatggatttgatggccttcatctctggtcaggttgtattgctcgtactgtaagctcaccaaaccaacatctgttaagaactgatgatgtcatcagttgctgtttagatctgagtgccccaagcatctcgttccgaattaatggacaacctgttcaaggaatgtttgagaatttcaacatcgatggcctcttctttccagtcgttagtttctctgcaggaataaaagtacgctttctgcttggagggcgacatggagaattcaaatttcttcctccacctgggtatgctccttgttatgaagctgttctgccaaaagaaaagttgaaagtggaacacagccgagagtacaagcaagaaagaacttacacacgcgacctgctgggccccacagtttccctgacgcaagctgccttcacacccatccctgtggataccagccagatcgtgttgcctcctcatctagaaagaataagagaaaaactggcagagaatatccatgaactctgggttatgaataaaattgagcttggctggcagtatggtccggttagagatgacaacaagagacaacacccatgcctggtggagttctccaagctgcctgaacaggagcgcaattacaacttacaaatgtcgcttgagaccctgaagactttgttggcattaggatgtcatgtgggtatatcagatgaacatgctgaagacaaggtgaaaaaaatgaagctacccaagaattaccagctgacaagtggatacaagcctgcccctatggacctgagctttatcaaactcaccccatcacaagaagcaatggtggacaagttggcagaaaatgcacataatgtgtgggcgcgggatcgaatccggcagggctggacttatggcatccaacaggacgtaaagaacagaagaaatcctcgccttgttccctacactcttctggatgaccgaaccaagaaatccaacaaggacagcctccgcgaggctgtgcgcacgctgctggggtacggctacaacttggaagcaccagatcaagatcatgcagccagagccgaagtgtgcagcggcaccggggaaaggttccgaatcttccgtgccgagaagacctatgcagtgaaggccggacggtggtattttgaatttgagacggtcactgctggagacatgagggttggttggagtcgtcctggttgtcaaccggatcaggagcttggctcagatgaacgtgcctttgcctttgatggcttcaaggcccagcggtggcatcagggcaatgaacactatgggcgctcttggcaagcaggcgatgtcgtggggtgtatggttgacatgaacgaacacaccatgatgttcacactgaatggtgaaatccttcttgatgattcaggctcagaactggctttcaaggactttgatgttggcgatggattcatacctgtgtgtagccttggagtggctcaagtgggtaggatgaactttggaaaggatgtcagcaccttgaaatatttcaccatctgtggcttacaagagggctatgaaccatttgccgttaatacaaacagggatattaccatgtggctgagcaagaggcttcctcagtttcttcaagttccatcaaaccatgaacatatagaggtgaccagaatagacggcaccatagacagttccccatgtttaaaggtcactcagaagtcttttggttctcagaacagcaacactgatatcatgttttatcgcctgagcatgccgatcgagtgcgcggaggtcttctccaagacggtggctggagggctccctggggctggcctttttgggcccaagaatgacttggaagattatgatgctgattctgactttgaggttctgatgaagacagctcatggccatctagtgcccgatcgtgttgacaaagacaaagaagctactaaaccagagtttaacaaccacaaagattatgcccaggaaaagccctctcgtctgaaacaaagatttttgcttagaagaacaaagccagattacagcacaagccattctgcaagactcaccgaagatgtccttgctgatgatcgggatgactatgatttcttgatgcaaacgtccacgtactattactcagtgagaatctttcctggacaagaacctgctaatgtctgggtgggctggattacatcagatttccatcagtatgacacaggctttgacttggacagagttcgcacagtaacagttactctaggagatgaaaaaggaaaagtgcatgaaagcatcaaacgcagcaactgctatatggtatgtgcgggtgagagcatgagccccgggcaaggacgcaacaataatggactggagattggctgtgtggtggatgctgccagcgggctgctcacattcattgccaatggcaaggaactgagcacatactatcaggtggaaccgagtacaaaattatttcctgcggtttttgcacaagctacaagtcccaatgttttccagtttgagttgggaagaataaagaatgtgatgcctctctcggcgggattattcaagagtgagcacaagaaccccgtgccgcagtgccccccgcgcctccacgtgcagttcctgtcacacgtcctgtggagcagaatgcccaaccagtttttgaaggtagatgtgtctcgaataagtgaacgccaaggctggttggtgcagtgtttggatcctctgcagttcatgtctcttcatatccctgaggaaaacagatctgttgacatcttagagttgacagagcaggaggaattgctgaaatttcactatcacactctccggctctactcagccgtctgtgctcttgggaaccaccgggtggcccatgccctgtgcagccatgtggatgaacctcagctcctctatgccattgagaacaagtacatgcctggtttgctgcgtgctggctactatgacctgctgattgacatccacctgagctcctatgccactgccaggctcatgatgaacaacgagtacattgtccccatgacggaggagacgaagagcatcaccctgttccctgatgagaacaaaaaacacggccttccagggatcggcctcagcacctccctcaggccacggatgcagttttcctcccccagttttgtaagcattagtaatgaatgttaccagtacagtccagagttcccactggacatcctcaagtccaaaaccatacagatgctgacagaagctgttaaagagggcagtcttcatgcccgggacccagttggagggactactgaattcctctttgtacctctcatcaagcttttctataccctgctgatcatgggcatctttcacaacgaggacttgaagcacatcttgcagttgattgagcccagtgtgtttaaagaagctgccactccggaggaggagagtgacacgctggagaaagagctcagtgtggacgatgcaaagctgcaaggagctggtgaggaagaagccaaggggggcaagcggcccaaggaaggcctgctccaaatgaaactgccagagccagttaaattgcagatgtgcctactgcttcagtacctctgtgactgccaggtccggcaccggatagaagccattgtagccttttcagatgattttgtggctaagctccaagacaatcaacgtttccgatacaacgaagtcatgcaagccttaaacatgtcagctgcactcacagccaggaagacaaaggaatttagatcaccacctcaagaacagatcaatatgcttctcaattttaaggatgacaaaagtgaatgtccatgtccagaagaaattcgtgaccaactattggatttccatgaagatttgatgacacattgtggaattgagctggatgaagatgggtctctggatggaaacagtgatttaacaattagagggcgtctgctatccctggtagaaaaggtgacatatctgaagaagaagcaagcagaaaaaccagttgagagtgactccaaaaagtcctccactctgcagcagctgatttctgagaccatggtccgatgggctcaggagtctgtcattgaagaccccgagctggtgagggccatgtttgtgttgctccatcggcagtatgacggcattgggggtcttgttcgggccctgccaaagacctacacgataaatggtgtgtccgtggaggacaccatcaacctgctggcatcccttggtcagattcggtccctgctgagtgtgagaatgggcaaagaagaagagaagctcatgattcgtggattaggggatattatgaataacaaagtgttttaccagcaccctaatctcatgagggcactggggatgcacgagactgtgatggaggtcatggtgaacgtccttggaggtggagagtccaaggaaatcacctttcccaagatggtggccaactgttgccgttttctctgttacttctgtcgtataagtaggcagaatcaaaaagctatgtttgatcatctcagttatttactggaaaacagcagtgttggtcttgcctccccagctatgagaggttcaacaccactggatgtggctgcagcttcggtgatggataataatgaactagcattagctctgcgtgagccggatctagaaaaggtagttcgttatttggctggttgtggactgcaaagttgccagatgctggtgtctaagggctatccagacattgggtggaacccagttgaaggagagagatatcttgactttcttagatttgctgtcttctgtaatggggagagtgtggaggaaaatgcaaatgtcgtggtgagattgctcattcggaggcctgagtgttttggtcctgctttgagaggagaaggtgggaatgggcttcttgcagcaatggaagaagccatcaaaatcgccgaggatccttcccgagatggtccctcaccaaatagcggatccagtaaaacacttgacacagaggaggaggaagatgacactatccacatggggaacgcgatcatgaccttctattcagctttgattgacctcttgggacgctgtgctcctgagatgcatttgattcatgccgggaagggagaagccatcagaattaggtccattttgagatccctcattcccctgggagatttggtgggcgttatcagcatcgcttttcagatgccaacaatagccaaagatgggaatgtggtggaacctgacatgtctgcggggttttgcccagatcacaaggcagccatggttttattccttgacagggtctatgggattgaggttcaagacttcctcctccatcttcttgaggttggctttctgccagatctccgggcggctgcttctttagatacggcagctttgagtgctacagacatggccttggccctcaatcggtacctttgcacagccgtcttgccattgttaacaagatgtgctcctctctttgctggcacagagcaccacgcttctctcattgactcattacttcatactgtgtatagactttctaagggctgttcacttaccaaagctcagcgggattccatagaagtttgtttactctctatttgtggacaactgagaccttctatgatgcagcacttactcagaagattagtatttgatgttccattattaaatgaacacgcaaagatgcctcttaaactgctgacaaatcattatgaaagatgctggaaatattactgcctgcctggagggtggggaaactttggtgctgcctcagaagaagaacttcatttatcaagaaagttgttctggggcatttttgatgccctgtctcaaaagaaatatgaacaagaacttttcaaactggcactgccttgcctgagtgcagttgcgggagctttgcctccagactacatggagtcaaattatgtcagtatgatggaaaaacagtcatcaatggattctgaagggaactttaacccacaacctgttgatacctcaaatattacaattcctgagaaattggaatacttcattaacaaatatgcagaacactcccatgacaaatggtcaatggacaagttggcaaatggatggatttatggagaaatatattcagactcttctaaggttcagccattaatgaagccatataagctattgtctgaaaaggaaaaagaaatttatcgctggccaatcaaagaatctttaaaaactatgctggcttggggctggagaattgaaagaactcgggagggagacagcatggccctttacaaccggactcgtcgtatttctcagacaagccaggtttctgtggacgctgcccatggttacagtccccgggccattgacatgagcaatgttacactatctagagacctgcatgctatggcagaaatgatggctgaaaactaccataatatatgggcaaagaaaaagaaaatggagttggagtccaaaggaggaggaaaccatcctctgctggtgccctatgatacactgacagccaaagagaaagccaaggatagagaaaaagcacaggacatcctcaagttcttgcagatcaatggatatgctgtatccagaggatttaaggacctggaactggacacgccttctattgagaaacgatttgcctatagtttcctccaacaactcattcgctatgtggatgaagcccatcagtatatcctggagtttgatggtggcagcagaggcaaaggagaacatttcccttatgaacaagaaatcaagttctttgcaaaagtcgttcttcctttaattgatcagtatttcaaaaaccatcgtttatacttcttatctgcagcaagcagacctctctgctctggaggacatgcttccaacaaagagaaagaaatggtgactagcctattctgcaaacttggagttcttgtcaggcataggatttcactatttggcaatgatgcaacatcaattgtcaactgtcttcatattttgggtcagactttggatgcaaggacagtgatgaagactggcctggagagtgttaaaagtgcactcagagcttttctggacaacgctgcagaggatctggagaagaccatggaaaacctcaagcagggccagttcactcacacccgaaaccagcccaaaggggttactcagattatcaattacaccacagtggccctgctgccaatgctgtcttcattatttgaacatattggccagcatcagttcggagaagacctaatattggaagatgtccaggtgtcttgttatagaattctgactagcttatatgctttgggaaccagcaagagtatttacgtggagaggcaacgttctgcattaggagaatgtctagctgcctttgctggtgcttttcctgtagcatttttggaaactcatctggacaaacataatatttactccatctacaataccaagtcttcacgagaaagagcagctctcagtttgccaactaatgtggaagatgtttgtccaaacataccgtctttggagaaactcatggaagaaatcgtggaattagccgagtccggcattcgctacactcaaatgccacatgtcatggaagtcatactgcccatgctttgcagctacatgtctcgttggtgggagcatggacctgagaacaatccagaacgggccgagatgtgctgcacagccctgaactcagagcacatgaacacacttctagggaacatattgaaaatcatatataataacttggggattgatgagggagcctggatgaagaggctagcagtgttttcccagcctataataaataaagtgaaacctcagctcttgaaaactcatttcttgccgttaatggagaaactcaagaaaaaggcagctacggtggtgtctgaggaagaccacctgaaagctgaggccaggggggacatgtcggaggcagaactcctcatcctagatgagttcaccacactggccagagatctctatgccttctaccctctcttgattagatttgtggactataacagggcaaagtggctaaaggagcctaacccagaagcagaggagctcttccgcatggtggctgaagtgtttatctactggtcgaagtcccataatttcaaaagagaagagcagaacttcgttgtacagaatgaaatcaacaatatgtctttccttattactgataccaagtcaaagatgtcaaaggcagctgtttctgatcaggaaaggaagaaaatgaagcgcaaaggagatcggtattccatgcagacctctctgattgtagcagctctgaagcggttactgcccattgggttgaacatctgtgcccctggggaccaggagctcattgctctggccaaaaatcgatttagcctgaaagataccgaggatgaagtacgagatataatccgcagcaatattcatttacaaggcaagttggaggatcctgctattagatggcaaatggctctttacaaagacttaccaaacaggactgatgatacctcagatccagagaagacggtagaaagagtattggatatagcaaatgtgctttttcatcttgaacagaagtctaaacgtgtgggtcggagacattactgtctcaggtggaacatcctcagagatctaaaaaggctgtatggcataaactactgtccaagcagaggaaaagggctgttgtagcctgcttccggatggcccccttatataatctgccaaggcatcgggctgtcaatctctttcttcagggatatgaaaagtcttggattgaaacagaagaacattactttgaagataaactgatagaagatttagcaaaacctggggctgaacctccagaagaagatgaaggcactaagagagttgatcctctacatcagctgatccttctgtttagtcggacagctttaacagagaaatgcaaactggaggaagattttttatatatggcctatgcagatattatggcaaagagttgtcatgatgaggaagatgacgatggtgaagaggaagtgaagagttttgaagaaaaagaaatggaaaagcaaaagcttctataccagcaagcccgactccacgatcgtggcgcggctgagatggtgctacagacaatcagtgccagcaaaggtgaaactggaccaatggtagcagctactctgaaacttggaattgctattttaaatggtgggaactccacagtacagcagaaaatgcttgactacctcaaggagaaaaaggatgtgggcttctttcagagcctggccggcctgatgcagtcatgtagtgtccttgacctaaatgcatttgagcgacaaaacaaagctgaaggtcttgggatggtgacagaggaaggatcaggagaaaaggttctgcaggacgatgagttcacctgtgacctcttccgattcctgcaactactctgtgagggacacaactcagattttcagaattatctgagaactcagactggcaataatacaactgtcaacataattatctccactgtagactacctactgagagttcaggaatcaattagtgacttttattggtattactctgggaaagatgttattgatgaacaaggacaacggaatttctccaaagctatccaagtggcaaaacaagtctttaacactcttacagagtatattcagggtccttgcactgggaatcaacagagtttggcacacagcaggctgtgggatgctgtggtcggctttcttcatgtgtttgcccatatgcagatgaagctgtcgcaggattccagtcaaattgagctattaaaagaattaatggatctgcagaaggatatggtggtcatgttgctgtccatgttagaaggtaatgttgttaatggaacgattggcaaacagatggtggatatgcttgtggaatcttccaacaacgtggagatgattctcaaattttttgacatgttcttaaaactaaaggatttgacgtcgtctgatacttttaaagaatatgaccccgatggcaagggagtcatttccaagagggacttccacaaagcgatggagagccataagcactacacgcagtcagaaacggaatttcttttgtcttgtgcggagacggatgagaatgaaaccctcgactacgaagagttcgtcaaacgcttccacgaacctgcgaaggacatcggcttcaacgtcgccgtccttctgacaaacctctctgagcacatgcccaacgatacccgacttcagacttttctggaattagcagagagcgtcctgaattatttccagccctttctgggccgcatcgaaatcatgggaagcgccaaacgcatcgagagggtctattttgaaatcagtgagtccagccgaacccagtgggagaagccccaggtcaaggagtccaaaagacagttcatatttgacgtggtcaacgaaggcggagagaaagagaagatggaactctttgtgaacttctgcgaggacaccatctttgaaatgcagctggcggctcagatctcggagtcggacttgaacgagaggtcagcgaataaggaagaaagcgagaaggagaggccggaagagcaggggccgaggatggctttcttctccattctgacggtcaggtcggccctgtttgcgctcaggtacaatatcttgacccttatgcgaatgctcagtctgaagagcctgaagaagcagatgaaaaaagtaaaaaagatgaccgtgaaggacatggtcacggccttcttttcatcctactggagtattttcatgaccctcttgcacttcgtggccagcgttttcagaggctttttccgcatcatttgcagcctgctgcttgggggaagcctcgtcgaaggtgctaaaaagatcaaagttgcagaactgttagccaacatgccagaccccactcaggatgaggttagaggagatggggaggagggagagaggaaacccctggaagccgccctgccctccgaggatctgaccgacttaaaggagctgacagaggaaagtgaccttctttcggacatctttggcctggatctgaagagagaaggaggacagtacaaactgattcctcataatccaaatgctgggctcagtgacctcatgagcaacccagtccccatgcctgaggtgcaggaaaaatttcaggaacagaaggcaaaagaagaagaaaaggaagaaaaagaagaaaccaaatctgaacctgaaaaagccgagggagaagatggagaaaaagaagagaaagccaaggaagacaagggcaaacaaaagttgaggcagcttcacacacacagatacggagaaccagaagtgccagagtcagcattctggaagaaaatcatagcatatcaacagaaacttctaaactattttgctcgcaacttttacaacatgagaatgttagccttatttgtcgcatttgctatcaatttcatcttgctcttttataaggtctccacttcttctgtggttgaaggaaaggagctccccacgagaagttcaagtgaaaatgccaaagtgacaagcctggacagcagctcccatagaatcatcgcagttcactatgtactagaggagagcagcggctacatggagcccacgttgcgtatcttagctattctgcacacggtcatttctttcttctgcatcattggatactactgcttgaaagtcccattggttatttttaagcgagaaaaggaagtggcacggaaattggaatttgatgggctttatattacagaacagccttcagaagatgatattaaaggccagtgggatagactcgtaatcaacacacagtcatttcccaacaactactgggacaaatttgttaaaagaaaggttatggataaatatggagagttctacggccgagacagaatcagtgaattacttggcatggacaaggcagctctggacttcagtgatgccagagaaaagaagaagccaaagaaagacagctccttatcagctgtactgaactccattgatgtgaagtatcagatgtggaaactaggagtcgttttcactgacaactccttcctctacctagcctggtatatgactatgtctgttcttggacactataacaactttttttttgccgctcaccttctcgacattgctatgggattcaagacattaagaaccatcttgtcctcagtaactcacaatggcaaacagctcgtattaaccgttggcttattagctgttgttgtatacctatacactgtggtggcattcaattttttccgaaaattctacaataaaagtgaagatggtgatacaccagatatgaaatgtgacgatatgctaacatgctatatgttccacatgtatgttggagttcgtgctggaggagggatcggggatgaaatcgaagacccagcaggagatgaatatgagatctatcgaatcatctttgacatcactttcttcttctttgttattgtcattctcttggccataatacaaggtctaattattgatgcttttggagaactaagagaccaacaggaacaagtcaaagaagacatggagaccaaatgcttcatctgtgggataggcaatgattacttcgacacagtgccacatggctttgaaacccacactttacaggagcacaacttggctaattacttgttttttctgatgtatcttataaacaaagatgaaacagaacacacaggacaggaatcttatgtctggaagatgtatcaagaaaggtgttgggaatttttcccagcaggggattgcttccggaaacagtatgaagaccagctaaattaaactcagacccaatcacctctaaaaaccaaaaccctacccctctctctccctctctcaatttctctgctctcttggaaacattttgctgattttgtgaattgccagcgttgtgtgttttctgggagcatcgaagctctgtttcggaagagctgtttcctccccccaccttttgtatttactttgagactaaagactgaagaataatctaaattcatactcagacaaaaaaaggaattctggaaagaaaaccattctggacactgtcataacacacatagatagattttcttctgagactcccggagtcttctcgagctacgagaccttcacagagacacgtggcagccacactcacccagcctctttatttcaccatcctggaaggaaactgtctgtctaatggtcacagagcactgtagcacttaacagattgccatggacaccagttgcgaagggaaatagtgccttactatatgtgggttgagctatgcagaagatacgtgcatgaaaaaacatctttattttctttatgtcgacctttcttttcttagattgattttgtgaggttttttttttttcctttagtcttttctttagtgggggagggtaagaaaagcagtttgcacttaaaaagaaaaaaaaaaaacgggtggtgtgtctcaggacaaaaggaggctcttctcattcagctaaattcacatttgccccccccccccgcccccgcccccatatgctcctgctattattttggtaatgctctgatgcaacattgcaactttatgaaatctttgtatgaaaacaaaaagactgcaaaaaatacactttcaaaagaaaccattcattgcatgtttattatgcaagtttaaatgaacaaagaaaaccttcagaaacaagttgatcaacgtgagagaaatttcatgataattattcatagtaataaagtgtcgtgggcttaattgtatatctggagccagtgtcatccaccaacaatgtgatacaatatgaacttgacagtagttttgggttttgctcattctttcagccacctgtgatcagttttgttgattaaggacttcttgtcaggccattttttaatatcaaagctgaagcaatatccattcagggatttcatcagttgcatcacaaaacacggatgataatatacatcactccattttttccattttgagtccttttaaatgtaatgctaacctttacaattaaaaagtcagattcagaatggaaacaaggtcattttgcaaacattggagctcttttattacaagtctgcttgttaattttagaactgtaaaaccgctctgattaaactatttaactaactttctcatcctcttctttctccatttaaaacttataactgggactcataaaatcttgagcttctaacttgaggtggatataggacaatcctaaacactgcactgagacctttaacgctgtcagatttcctggtacctctaagactgttgtgtatataattgtggggcctcagagtcaccaggcacctggcccacccctgtcatttccctgttatatgggtcagccagacctcttgaaaacctccaatgacagaaaaaaaagatcgctatctcccagattatttaatttttatatagctctcatt

SEQ ID NO: 3459 - protein, 3556 aa, Homo sapiens; identical to SEQ ID NO: 3457

SEQ ID NO: 3460 - DNA, 598 bp, Homo sapiens
atcttatgcaaacaggctttccacttggcaggtgccatgttgcctgctccttactgtacacgtggctggcaaggagacgggaacatggagccgccattttgaacatgcctagtcccaggtggtcttttcctattggcacaactgctggcattcacccgtggaagcttccaacttgcttctctatgtctgcagctcgattttgcaggctgctctttgttagaaaagaacatgattttgggactgctcttcattaaaaggcattctggaagttttacactgtgttttagtagaaagtccagaagctctaaatattattaaagaaggacatattaaatctattatctcacttttagacaaacatggaagaaatcacaaggttctggatgtcttgtgctcactctgtgtttgccacggggttgcagtccgttctaaccagcatctcatctgtgacaatctcctaccaggaagagacttgttattgcagacacgtcttgtgaaccatgtcagcagcatgagacccaatatttttctgggcgtcagtgaaggttctgctcagtataagaaatggtactatgaattgatggtggaccacacagag

SEQ ID NO: 3461 - protein, 45 aa, Homo sapiens
MEEITRFWMSCAHSVFATGLQSVLTSISSVTISYQEETCYCRHVL

SEQ ID NO: 3462 - DNA, 541 bp, Homo sapiens
ctttaatgtacaccagagataaaattgactctaacgtgcatcctctttagagtacgctttctgcttggagggcgacatggagaattcaaatttcttcctccacctgggtatgctccttgttatgaagctgttctgccaaaagaaaagttgaaagtggaacacagccgagagtacaagcaagaaagaacttacacacgcgacctgctgggccccacagtttccctgacgcaagctgccttcacacccatccctgtggataccagccagatcgtgttgcctcctcatctagaaagaataagagaaaaactggcagagaatatccatgaactctgggttatgaataaaattgagcttggctggcagtatggtccggttagagatgacaacaagagacaacacccatgcctggtggagttctccaagctgcctgaacaggagcgcaattacaacttacaaatgtcgcttgagaccctgaagtgagtttcttaactttttctattttccaacctgccttccctgaaaaaaaaaaaaaaaaaaaaaa

SEQ ID NO: 3463 - protein, 47 aa, Homo sapiens
MNKIELGWQYGPVRDDNKRQHPCLVEFSKLPEQERNYNLQMSLETLK

SEQ ID NO: 3464 - DNA, 4343 bp, Homo sapiens
attgcaagcgactgaagtgtgtggtgtggctgcaatgtttgtgggttagatgagaaacaagcgctgagtgaaacagagaaggggggtggctggtgtgatttgtttggtgttcagagccaatagaaatcccagactctgataatatccccatgcagcgccgagaggattcagagctaagtctccgggctcctttcacatctgcaggagcagccagcctgggaccgcgcggcgcggggcgcgctctcgcctctcctgcaccctcagccggcgcgcttctcttatgggcgtctgctgcagtctggctgcggtcgaactgaaagcggcggcgggagaccaaacttagaccccgctgtggactagagaactcagagaaggcagagggagagggagagagagagagagaagggacccgaggaggaggcttccatcacgtcattgcaggatgttctggaagctttccctgtccttgttcctggtggcggtgctggtgaaggtggcggaagcccggaagaaccggccggcgggcgccatcccctcgccttacaaggacggcagcagcaacaactcggagagatggcagcaccagatcaaggaggtgctggcctccagccaggaggccctggtggtcaccgagcgcaagtacctcaagagtgactggtgcaagacgcagccgctgcggcagacggtgagcgaggagggctgccggagccgcaccatcctcaaccgcttctgctacggccagtgcaactccttctacatcccgcggcacgtgaagaaggaggaggagtccttccagtcctgcgccttctgcaagccccagcgcgtcacctccgtcctcgtggagctcgagtgccccggcctggacccacccttccgactcaagaaaatccagaaggtgaagcagtgccggtgcatgtccgtgaacctgagcgactcggacaagcagtgagcgccgggccggacgcagctcagccccgcgcgcgcccggccgctgggtggcgccgccgccgcctctgtccctgccctccgagcccactgtcacgctgcctggtgttccccctcagcagcaagcacttctcttagggctgacggtgtccttgtcacagacgtggatcgcaagtggagcttttgctgatgtgttcctgaccgaccccgggtcccacctgtgccccctaaaccaggcggtggatcaggcccgaaggaaaatgctggaaaaccaccaccgccacccagcagtcagagaggacctttcgaggtgatgcactgtaaatccggcattgatgtttccaccatgtggaaaagcaaggatttccctggccccgccctgcactccagctcgcccctttcccgcgcgaagtgaaggatgcgtcacttttctgagcggcccctcagacctctcctgctggtccctggacctctggctgggagcgctcattcttgtgactggcaggctgccctcggtcgctgctgtgatgaggatatgtgcaacctccataaatatgtcggtggacggggcgtctcctaataaacctgataccaagaagacaacttgagccacttggatcccgaagtgggcttcccgggaaacctcgagcagagcaggctacacaatcccccatcctcaagtccccaccgcctcttcttcctcactgtccccgccccctatttgtggactaaagatgaactctggtgtgcatgctattattgctgcaattagaatattatcacacacaaaggtctctatattaacgctggttttataagtgaccgtatattgtaaagagctgttaaaaagtattatagacctattcatgtattatttcacatgttttgactctggcttgcagcaccattcggagtaaggatgacagcaggcccagaaggtgtcttactcagaaaaaaaaatgcctggtcagcaattcactgtcatgcacctatttttagattgggcagggagatgggaggagtcgtgatttttactttgaatactatttcactgacgttactaagcattgcagcacaatgtagaaattggcttgggatggataggtatagggaagggcattcgttgggaaattgatgaccggaaactagaaagcccctataatgtggaatatgcatatgtggggtgaaaccgtatactactttcactgccatgacactaggcaaaaaatatttcctgttaaaagaaagagaaaaagagagggatattgaaaaatataaggagttgagtcgctttgtggtatagaagggagtaaggaataaaagatatagaatagtaatctagttgaactgttctgcacaaaacatgcttccttttcaaagaatagacttcaaaagggacgaacaaacattaggtcaccttttgtgtttataatgaattgttgacgtttccatgctgtggtctcttgatatacggaagtagacgtaacttattttccagcgaaattatatacttcttctgggctcctttgctcagttgccccaggaaggcttccctgtgagtaatgcttatggaatctgacaaatgtgaatgagctgccattggtgggaatcagtaaactttgaaaacctttcactgatgattccctggtaagtgctcctgtgaggggccacttccctagtatgtgagagagaccctctgcaagccgctgtggggacttagcttcctgatactaggtagtgatggtggatctagagacattcacttgaagagcaaggattggggtggggtgggttggtgaatctatctcaggccactgcactgcaaggtgcatttctgtcatttctgcaacaccatgagacctgagcaagaatgtgctgtggcagagggggtcttggtttcataaatgggtatatacagcctgaactcaggaggcagaaatcaaaagaaatccttgagggctggaacctgaggatagagcgaaaatggagagaagggtgttcaaggtcaggagtgatttttgcatttggtggaaaacctcaagtcagactcagtggcagaacatgcagcagaaaagctgtgaaggaaggaaatttacgtgattgtaatggaggctaggggtggattgggaggtgagtggaggagagtctctgaccagctgcagagccaacccctatcattttattaacatggaacccacacagataggggagggattaagctaagaacttacagaatgcaaacacgagcacactctcttcgaacccaattgtgggtgtagcaatgaaagcaatatgatatgctgcagtgtgaagctccttctggggttatcgtatgtacaaagtttaccttataatggctcaaattgtatttaatttttttgttttgtttataaatgaagaaaagctataagtataatgtaattattttataggtatactattaaattatagaacaaataaagataatctaggattatatgtgatcccggtgtgacgtgccataaaagtggaatttttgacttgttgcagtgagctgtgaagcagcactatgcgttcagagagtttttgttcaaccatggtgagttcaacctctagcttatgtcacatgatctcctttggggtctggaatcttctaagagaaatagaatcaggcatccaaggagcagaagtgatggaggtggccctcaatcctggtctttggaagcttccaagcctcttccacatcccctgccagctgaagacagagtattctcactgtgctggctgaaggagaaacactaaacaaggaaaccttgagaaactgcagcaatggaagtccactgttagtctctccgttagcaccagggacacacttgttctgagttttgttcattttcacatttactcctcatgagttccaacatttcttaatttaaatatttcttagtttatagcatctccatttttctattaattgacttaatctgccatttaagaaaactccgtaatcaataaaaaataaaatccacaatcaaactgcacatggttgatccactgtgtaggcttcaaaggaattaaactcaacttcctaggaaataattcatcttagtttattaaatgggacagaatatttcactgctaacgtattctaactcacttgtttttgaaattggccagatgatttttaagttataaagtcaatgaaaatgacttttgctattgtgtgaacaacttagaatgtatatattcccagaaggcttatttaatgattgacctatcaccactgattattaatgtctgcatgaatgataacaataagaccaagtcatcaataatgcaatgaaaattttttaagtgaaagcaagtttattaagaaagtaaaggaataaagaatgcctacttcataggcagagcagcct

SEQ ID NO: 3465 - protein, 168 aa, Homo sapiens; identical to SEQ ID NO: 217

SEQ ID NO: 3466 - DNA, 3427 bp, Homo sapiens
attgcaagcgactgaagtgtgtggtgtggctgcaatgtttgtgggttagatgagaaacaagcgctgagtgaaacagagaaggggggtggctggtgtgatttgtttggtgttcagagccaatagaaatcccagactctgataatatccccatgcagcgccgagaggattcagagctaagtctccgggctcctttcacatctgcaggagcagccagcctgggaccgcgcggcgcggggcgcgctctcgcctctcctgcaccctcagccggcgcgcttctcttatgggcgtctgctgcagtctggctgcggtcgaactgaaagcggcggcgggagaccaaacttagaccccgctgtggactagagaactcagagaaggcagagggagagggagagagagagagagaagggacccgaggaggaggcttccatcacgtcattgcaggatgttctggaagctttccctgtccttgttcctggtggcggtgctggtgaaggtggcggaagcccggaagaaccggccggcgggcgccatcccctcgccttacaaggacggcagcagcaacaactcggagagatggcagcaccagatcaaggaggtgctggcctccagccaggaggccctggtggtcaccgagcgcaagtacctcaagagtgactggtgcaagacgcagccgctgcggcagacggtgagcgaggagggctgccggagccgcaccatcctcaaccgcttctgctacggccagtgcaactccttctacatcccgcggcacgtgaagaaggaggaggagtccttccagtcctgcgccttctgcaagccccagcgcgtcacctccgtcctcgtggagctcgagtgccccggcctggacccacccttccgactcaagaaaatccagaaggtgaagcagtgccggtgcatgtccgtgaacctgagcgactcggacaagcagtgagcgccgggccggacgcagctcagccccgcgcgcgcccggccgctgggtggcgccgccgccgcctctgtccctgccctccgagcccactgtcacgctgcctggtgttccccctcagcagcaagcacttctcttagggctgacggtgtccttgtcacagacgtggatcgcaagtggagcttttgctgatgtgttcctgaccgaccccgggtcccacctgtgccccctaaaccaggcggtggatcaggcccgaaggaaaatgctggaaaaccaccaccgccacccagcagtcagagaggacctttcgaggtgatgcactgtaaatccggcattgatgtttccaccatgtggaaaagcaaggatttccctggccccgccctgcactccagctcgcccctttcccgcgcgaagtgaaggatgcgtcacttttctgagcggcccctcagacctctcctgctggtccctggacctctggctgggagcgctcattcttgtgactggcaggctgccctcggtcgctgctgtgatgaggatatgtgcaacctccataaatatgtcggtggacggggcgtctcctaataaacctgataccaagaagacaacttgagccacttggatcccgaagtgggcttcccgggaaacctcgagcagagcaggctacacaatcccccatcctcaagtccccaccgcctcttcttcctcactgtccccgccccctatttgtggactaaagatgaactctggtgtgcatgctattattgctgcaattagaatattatcacacacaaaggtctctatattaacgctggttttataagtgaccgtatattgtaaagagctgttaaaaagtattatagacctattcatgtattatttcacatgttttgactctggcttgcagcaccattcggagtaaggatgacagcaggcccagaaggtgtcttactcagaaaaaaaaatgcctggtcagcaattcactgtcatgcacctatttttagattgggcagggagatgggaggagtcgtgatttttactttgaatactatttcactgacgttactaagcattgcagcacaatgtagaaattggcttgggatggataggtatagggaagggcattcgttgggaaattgatgaccggaaactagaaagcccctataatgtggaatatgcatatgtggggtgaaaccgtatactactttcactgccatgacactaggcaaaaaatatttcctgttaaaagaaagagaaaaagagagggatattgaaaaatataaggagttgagtcgctttgtggtatagaagggagtaaggaataaaagatatagaatagtaatctagttgaactgttctgcacaaaacatgcttccttttcaaagaatagacttcaaaagggacgaacaaacattaggtcaccttttgtgtttataatgaattgttgacgtttccatgctgtggtctcttgatatacggaagtagacgtaacttattttccagcgaaattatatacttcttctgggctcctttgctcagttgccccaggaaggcttccctgtgagtaatgcttatggaatctgacaaatgtgaatgagctgccattggtgggaatcagtaaactttgaaaacctttcactgatgattccctggtaagtgctcctgtgaggggccacttccctagtatgtgagagagaccctctgcaagccgctgtggggacttagcttcctgatactaggtagtgatggtggatctagagacattcacttgaagagcaaggattggggtggggtgggttggtgaatctatctcaggccactgcactgcaaggtgcatttctgtcatttctgcaacaccatgagacctgagcaagaatgtgctgtggcagagggggtcttggtttcataaatgggtatatacagcctgaactcaggaggcagaaatcaaaagaaatccttgagggctggaacctgaggatagagcgaaaatggagagaagggtgttcaaggtcaggagtgatttttgcatttggtggaaaacctcaagtcagactcagtggcagaacatgcagcagaaaagctgtgaaggaaggaaatttacgtgattgtaatggaggctaggggtggattgggaggtgagtggaggagagtctctgaccagctgcagagccaacccctatcattttattaacatggaacccacacagataggggagggattaagctaagaacttacagaatgcaaacacgagcacactctcttcgaacccaattgtgggtgtagcaatgaaagcaatatgatatgctgcagtgtgaagctccttctggggttatcgtatgtacaaagtttaccttataatggctcaaattgtatttaatttttttgttttgtttataaatgaagaaaagctataagtataatgtaattattttataggtatactattaaattatagaacaaataaagataatctaggattatatgtg

SEQ ID NO: 3467 - protein, 168 aa, Homo sapiens; identical to SEQ ID NO: 217

SEQ ID NO: 3468 - DNA, 774 bp, Homo sapiens
atggagtttcacccttggtgcccaggctggagtgcaatggcatgatcttggctcacagcaatctccacttcccgggttcaagcgattcttctgcctcagcctcccgagtagctgggattacagtagagacggggtttcaccctgttagccaggatggtgtcgatctcctgacctcatgatccgcctgcctcggcctcccaaagtgctgggattacagacgtgagccaccgcgcccggccctggagaattaatttgaaggggaggaaaattcagtttcagctcagctagggatttagtcttactaaagacgtgggaggaagttctccagctgaccagctttccccaacgtggaaaggaccacggcaaggtcacctgacctctccaacaaacattacacgccaagggattcacagtcccgccttggccatgagggagattgtgctcacgcagacggggcagtgcgggaaccggatcggcgccaagttctgggaggtgatctctgatgaacatgccatcgactccgctggcacctaccgcggggacagggacctgctgctgaagcgtatcaacgtatactacaatgaggccagcggtagcaggtatgtgccccgcgctgtgctaactgatctggagccgggcaccctggactctgtgcgctccgggcccttcggccagatcttcaggccggagaacttcatcttgggactccccagtacaacatggcctggagatctttccatgttcctctgtacagatctgtcatcgatttccagc

SEQ ID NO: 3469 - protein, 115 aa, Homo sapiens
MREIVLTQTGQCGNRIGAKFWEVISDEHAIDSAGTYRGDRDLLLKRINVYYNEASGSRYVPRAVLTDLEPGTLDSVRSGPFGQIFRPENFILGLPSTTWPGDLSMFLCTDLSSIS

SEQ ID NO: 3470 - DNA, 269 bp, Homo sapiens
ttctgggaggtgatctctgatgaacatgccatcgactccgctggcacctaccgcggggacagggacctgctgctgaagcgtatcaacgtatactacaatgaggccagcggactccccagtacaacatggcctggagatctttccatgttcctctgtacagatctgtcatcgatttccagcttcatggtaaccacaggatagatggacacaagttgtttaacccactgatagacttcattcctatactttccctaatgcaaaaataaaac

SEQ ID NO: 3471 - protein, 30 aa, Homo sapiens [sequence omitted]

SEQ ID NO: 3472 - DNA, 3526 bp, Homo sapiens
agccgccgcgagcgccgggagggagggcagcgccgcgccagacggagcccggggttcgacgccaggattggctgcaagtagggagctttcgccgccgccccgggcccctcggactgtgccggcgccgcacccgaggctctcgccagcccggcgccccggtgctgaggaatcattgacatagagtaactccacagcatgtgtcttcaagagcttccctaaaagattaaaggttatacaaaacttaaaagaagcagcaattctattcgcttgttattggacttgaaactccctttgacctcggaaactgaagatgaggttgccatgggaactgctggtactgcaatcattcattttgtgccttgcagatgattccacactgcatggcccgatttttattcaagaaccaagtcctgtaatgttccctttggattctgaggagaaaaaagtgaagctcaattgtgaagttaaaggaaatccaaaacctcatatcaggtggaagttaaatggaacagatgttgacactggtatggatttccgctacagtgttgttgaagggagcttgttgatcaataaccccaataaaacccaagatgctggaacgtaccagtgcacagcgacaaactcgtttggaacaattgttagcagagaagcaaagcttcagtttgcttatcttgacaactttaaaacaagaacaagaagcactgtgtctgtccgtcgaggtcaaggaatggtgctactgtgtggcccgccaccccattctggagagctgagttatgcctggatcttcaatgaatacccttcctatcaggataatcgccgctttgtttctcaagagactgggaatctgtatattgccaaagtagaaaaatcagatgttgggaattatacctgtgtggttaccaataccgtgacaaaccacaaggtcctggggccacctacaccactaatattgagaaatgatggagtgatgggtgaatatgagcccaaaatagaagtgcagttcccagaaacagttccgactgcaaaaggagcaacggtgaagctggaatgctttgctttaggaaatccagtaccaactattatctggcgaagagctgatggaaagccaatagcaaggaaagccagaagacacaagtcaaatggaattcttgagatccctaattttcagcaggaggatgctggtttatatgaatgtgtagctgaaaattccagagggaaaaatgtagcaaggggacagctaactttctatgctcaacctaattggattcaaaaaataaatgatattcacgtggccatggaagaaaatgtcttttgggaatgtaaagcaaatggaaggcctaagcctacatacaagtggctaaaaaatggcgaacctctgctaactcgggatagaattcaaattgagcaaggaacactcaacataacaatagtgaacctctcagatgctggcatgtatcagtgtttggcagagaataaacatggagttatcttttccaacgcagagcttagtgttatagctgtaggtccagatttttcaagaacactcttgaaaagagtaactcttgtcaaagtgggaggtgaagttgtcattgagtgtaagccaaaagcgtctccaaaacctgtttacacctggaagaaaggaagggatatattaaaagaaaatgaaagaattaccatttctgaagatggaaacctcagaatcatcaacgttactaaatcagacgctgggagttatacctgtatagccactaaccattttggaactgctagcagtactggaaacttggtagtgaaagatccaacaagggtaatggtacccccttccagtatggatgtcactgttggagagagtattgttttaccgtgccaggtaacgcatgatcactcgctagacatcgtgtttacttggtcatttaatggacacctgatagactttgacagagatggggaccactttgaaagagttggagggcaggattcagctggtgatttgatgatccgaaacatccaactgaagcatgctgggaaatatgtctgcatggtccaaacaagtgtggacaggctatctgctgctgcagacctgattgtaagaggtcctccaggtcccccagaggctgtgacaatagacgaaatcacagataccactgctcagctctcctggagacccgggcctgacaaccacagccccatcaccatgtatgtcattcaagccaggactccattctccgtgggctggcaagcagtcagtacagtcccagaactcattgatgggaagacattcacagcgaccgtggtgggtttgaacccttgggttgaatatgaattccgcacagttgcagccaacgtgattgggattggggagcccagccgcccctcagagaaacggagaacagaagaagctctccccgaagtcacaccagcgaatgtcagtggtggcggaggcagcaaatctgaactggttataacctgggagacggtccctgaggaattacagaatggtcgaggctttggttatgtggtggccttccggccctacggtaaaatgatctggatgctgacagtgctggcctcagctgatgcctctagatacgtgttcaggaatgagagcgtgcaccccttctctccctttgaggttaaagtaggtgtcttcaacaacaaaggagaaggccctttcagtcccaccacggtggtgtattctgcagaagaagaacccaccaaaccaccagccagtatctttgccagaagtctttctgccacagatattgaagttttctgggcctccccactggagaagaatagaggacgaatacaaggttatgaggttaaatattggagacatgaagacaaagaagaaaatgctagaaaaatacgaacagttggaaatcagacatcaacaaaaatcacgaacttaaaaggcagtgtgctgtatcacttagctgtcaaggcatataattctgctgggacaggcccctctagtgcaacagtcaatgtgacaacccgaaagccaccaccaagtcaaccccccggaaacatcatatggaattcatcagactccaaaattatcctgaattgggatcaagtgaaggccctggataatgagtcggaagtaaaaggatacaaagtcttgtacagatggaacagacaaagcagcacatctgtcattgaaacaaataaaacatcggtggagctttctttgcctttcgatgaagattatataatagaaattaagccattcagcgacggaggagatggcagcagcagtgaacaaattcgaattccaaagatatcaaatgcctacgcgagaggatctggggcttccacttcgaatgcatgtacgctgtcagccatcagtacaataatgatttccctcacagctaggtccagtttatgacaaaagttatctgaaggacttgctgtttataatataagcaacatttagctagttgttttgaagacacccagtactaagtaatattgttgttcaagtacatcttattactggaataaaaatgttttttgcttcttt

SEQ ID NO: 3473 - protein, 1026 aa, Homo sapiens; identical to SEQ ID NO: 317

SEQ ID NO: 3474 - DNA, 5293 bp, Homo sapiens
agccgccgcgagcgccgggagggagggcagcgccgcgccagacggagcccggggttcgacgccaggattggctgcaagtagggagctttcgccgccgccccgggcccctcggactgtgccggcgccgcacccgaggctctcgccagcccggcgccccggtgctgaggaatcattgacatagagtaactccacagcatgtgtcttcaagagcttccctaaaagattaaaggttatacaaaacttaaaagaagcagcaattctattcgcttgttattggacttgaaactccctttgacctcggaaactgaagatgaggttgccatgggaactgctggtactgcaatcattcattttgtgccttgcagatgattccacactgcatggcccgatttttattcaagaaccaagtcctgtaatgttccctttggattctgaggagaaaaaagtgaagctcaattgtgaagttaaaggaaatccaaaacctcatatcaggtggaagttaaatggaacagatgttgacactggtatggatttccgctacagtgttgttgaagggagcttgttgatcaataaccccaataaaacccaagatgctggaacgtaccagtgcacagcgacaaactcgtttggaacaattgttagcagagaagcaaagcttcagtttgcttatcttgacaactttaaaacaagaacaagaagcactgtgtctgtccgtcgaggtcaaggaatggtgctactgtgtggcccgccaccccattctggagagctgagttatgcctggatcttcaatgaatacccttcctatcaggataatcgccgctttgtttctcaagagactgggaatctgtatattgccaaagtagaaaaatcagatgttgggaattatacctgtgtggttaccaataccgtgacaaaccacaaggtcctggggccacctacaccactaatattgagaaatgatggagtgatgggtgaatatgagcccaaaatagaagtgcagttcccagaaacagttccgactgcaaaaggagcaacggtgaagctggaatgctttgctttaggaaatccagtaccaactattatctggcgaagagctgatggaaagccaatagcaaggaaagccagaagacacaagtcaaatggaattcttgagatccctaattttcagcaggaggatgctggtttatatgaatgtgtagctgaaaattccagagggaaaaatgtagcaaggggacagctaactttctatgctcaacctaattggattcaaaaaataaatgatattcacgtggccatggaagaaaatgtcttttgggaatgtaaagcaaatggaaggcctaagcctacatacaagtggctaaaaaatggcgaacctctgctaactcgggatagaattcaaattgagcaaggaacactcaacataacaatagtgaacctctcagatgctggcatgtatcagtgtttggcagagaataaacatggagttatcttttccaacgcagagcttagtgttatagctgtaggtccagatttttcaagaacactcttgaaaagagtaactcttgtcaaagtgggaggtgaagttgtcattgagtgtaagccaaaagcgtctccaaaacctgtttacacctggaagaaaggaagggatatattaaaagaaaatgaaagaattaccatttctgaagatggaaacctcagaatcatcaacgttactaaatcagacgctgggagttatacctgtatagccactaaccattttggaactgctagcagtactggaaacttggtagtgaaagatccaacaagggtaatggtacccccttccagtatggatgtcactgttggagagagtattgttttaccgtgccaggtaacgcatgatcactcgctagacatcgtgtttacttggtcatttaatggacacctgatagactttgacagagatggggaccactttgaaagagttggagggcaggattcagctggtgatttgatgatccgaaacatccaactgaagcatgctgggaaatatgtctgcatggtccaaacaagtgtggacaggctatctgctgctgcagacctgattgtaagaggtcctccaggtcccccagaggctgtgacaatagacgaaatcacagataccactgctcagctctcctggagacccgggcctgacaaccacagccccatcaccatgtatgtcattcaagccaggactccattctccgtgggctggcaagcagtcagtacagtcccagaactcattgatgggaagacattcacagcgaccgtggtgggtttgaacccttgggttgaatatgaattccgcacagttgcagccaacgtgattgggattggggagcccagccgcccctcagagaaacggagaacagaagaagctctccccgaagtcacaccagcgaatgtcagtggtggcggaggcagcaaatctgaactggttataacctgggagacggtccctgaggaattacagaatggtcgaggctttggttatgtggtggccttccggccctacggtaaaatgatctggatgctgacagtgctggcctcagctgatgcctctagatacgtgttcaggaatgagagcgtgcaccccttctctccctttgaggttaaagtaggtgtcttcaacaacaaaggagaaggccctttcagtcccaccacggtggtgtattctgcagaagaagaacccaccaaaccaccagccagtatctttgccagaagtctttctgccacagatattgaagttttctgggcctccccactggagaagaatagaggacgaatacaaggttatgaggttaaatattggagacatgaagacaaagaagaaaatgctagaaaaatacgaacagttggaaatcagacatcaacaaaaatcacgaacttaaaaggcagtgtgctgtatcacttagctgtcaaggcatataattctgctgggacaggcccctctagtgcaacagtcaatgtgacaacccgaaagccaccaccaagtcaaccccccggaaacatcatatggaattcatcagactccaaaattatcctgaattgggatcaagtgaaggccctggataatgagtcggaagtaaaaggatacaaagtcttgtacagatggaacagacaaagcagcacatctgtcattgaaacaaataaaacatcggtggagctttctttgcctttcgatgaagattatataatagaaattaagccattcagcgacggaggagatggcagcagcagtgaacaaattcgaattccaaagatatcaaatgcctacgcgagaggatctggggcttccacttcgaatgcatgtacgctgtcagccatcagtacaataatgatttccctcacagctaggtccagtttatgacaaaagttatctgaaggacttgctgtttataatataagcaacatttagctagttgttttgaagacacccagtactaagtaatattgttgttcaagtacatcttattactggaataaaaatgttttttgcttctttaggaatggcattatacagtacttcctcaaagcaaatctagctttgtctgaagtttctttggaaactctgcaatgcactgaagacatctgtaatatgatgttaccaaagcagtttacatatgtccttatatgccctcggctgtaaaatgctatgggcaacacaatcatgcaattataatttgaaaatatttcctttaaagacagagtttgaaactcatcttggtaaataaattgcaaattactcgtacagttttacaaggatctcatggcagaacagcggaagacttggtccgtaactcaaggctgttgtatgcaaactactcttctagtggttaatgcacttgacatgtacagtatgtttcccatgccgttgtgattttgacatgtacagtatgttttcatgccgttgtgaattttgttgttcaacccaacttgagatggtttcaggaatggctgcaatctcaaaagctcaatgtactgcccaagaggcaccttgtgcaatattcccatccctgaatttagcattgtacaggaagattttcttttcactcaactgagttagcattgtctttgtggtagcattatcttagacattaaatttgaagtaacatatatcctgtagtaacatagacccaaagttactatagtcaaccaagtctttcaaaggataaaagatcattttattatctttaactgtatctattttgaatgtaaatttaaaaaaagtaattctctgtcaatggattcgtaatttctttacaaaatttcttatatataatatgtgtatctctgtaataatagagcccttcttttgaatcaaaattacatatggactttggaagattgctcctatttcaacaaatagttgctgcaagaatttttaatatgactctataaaagctctttagtacaattgtatggtttcttgatgattctgttttgcaataggtagcctagttgctttatatgctttaccttctaggtcttaaaatcacacattggaaaatgacaatatcaacaaaactgtattcttatgaaaagaactatttgttacaatgagaaaggttttgtgagtaaaccctactggacagtgacataaaaggcaatggaattttctataaacattttctcatgtaaacatgctgccaccttttcttctttctcagagaactcaaatttgctatagtttgtcatttttgcttacaaataatataacttttcaaccttctagttatatttatccaataaagtcataatcgggattccatttgtgtaaaaactagggtggtaaccggaaaaaaatattgtcagtatttcaagctgtgttcctttcttagtttgatatggttacttctatgttgaaataaaatttaaaatcacatgcaaaaaaaaaatcagcaaaataataaaatgaacgaaaaaaaatgacacccagggagttcccaaccccagtgtaaatgatatttaccagtgatctagcatatgtaatcttttttaaaggtattgttaataaatattctgtcatttgtaaagatacttgtctttcgggagcatttttcctgcctgcctgtcagggaatttgttagcttacctttgtgctagttataatttgggatcatagagggactcaaaagtctctacccaaatctagatgacccagagcttttcctttggaattgacaaccctgaagcaccatttcaaatcctctttggaagtagagagggtcctaatccacaagtaaatgtcctgaagatgagacttgaatat

SEQ ID NO: 3475 - protein, 1026 aa, Homo sapiens; identical to SEQ ID NO: 317

SEQ ID NO: 3476 - DNA, 3849 bp, Homo sapiens
gttcgacgccaggattggctgcaagtagggagctttcgccgccgccccgggcccctcggactgtgccggcgccgcacccgaggctctcgccagcccggcgccccggtgctgagccggaaaataagtttgttgcgctgcgaggcagccacaaaacaaggaaccgagagcccggaatgctgcgggaagccttcaagtcagctcctccgactggttcgggctactgccccctctccgtgcgccctggcctctggcgccgggttcccggcggggcttttcttctgacagcccagtcacagcccgcagcagagggacgcgaacctggggagtggagggacctgggactaaaggaacaggagcccgtagccgtggtggaaggagccgcgtggagacggaggctgatgtctgtggcgcccgctgggtgccgggctggctgctgagcgctgaggctgcggcggcgagcgacaggccaggtgcctgctcttagggaaggaatcattgacatagagtaactccacagcatgtgtcttcaagagcttccctaaaagattaaaggttatacaaaacttaaaagaagcagcaattctattcgcttgttattggacttgaaactccctttgacctcggaaactgaagatgaggttgccatgggaactgctggtactgcaatcattcattttgtgccttgcagatgattccacactgcatggcccgatttttattcaagaaccaagtcctgtaatgttccctttggattctgaggagaaaaaagtgaagctcaattgtgaagttaaaggaaatccaaaacctcatatcaggtggaagttaaatggaacagatgttgacactggtatggatttccgctacagtgttgttgaagggagcttgttgatcaataaccccaataaaacccaagatgctggaacgtaccagtgcacagcgacaaactcgtttggaacaattgttagcagagaagcaaagcttcagtttgcttatcttgacaactttaaaacaagaacaagaagcactgtgtctgtccgtcgaggtcaaggaatggtgctactgtgtggcccgccaccccattctggagagctgagttatgcctggatcttcaatgaatacccttcctatcaggataatcgccgctttgtttctcaagagactgggaatctgtatattgccaaagtagaaaaatcagatgttgggaattatacctgtgtggttaccaataccgtgacaaaccacaaggtcctggggccacctacaccactaatattgagaaatgatggagtgatgggtgaatatgagcccaaaatagaagtgcagttcccagaaacagttccgactgcaaaaggagcaacggtgaagctggaatgctttgctttaggaaatccagtaccaactattatctggcgaagagctgatggaaagccaatagcaaggaaagccagaagacacaagtcaaatggaattcttgagatccctaattttcagcaggaggatgctggtttatatgaatgtgtagctgaaaattccagagggaaaaatgtagcaaggggacagctaactttctatgctcaacctaattggattcaaaaaataaatgatattcacgtggccatggaagaaaatgtcttttgggaatgtaaagcaaatggaaggcctaagcctacatacaagtggctaaaaaatggcgaacctctgctaactcgggatagaattcaaattgagcaaggaacactcaacataacaatagtgaacctctcagatgctggcatgtatcagtgtttggcagagaataaacatggagttatcttttccaacgcagagcttagtgttatagctgtaggtccagatttttcaagaacactcttgaaaagagtaactcttgtcaaagtgggaggtgaagttgtcattgagtgtaagccaaaagcgtctccaaaacctgtttacacctggaagaaaggaagggatatattaaaagaaaatgaaagaattaccatttctgaagatggaaacctcagaatcatcaacgttactaaatcagacgctgggagttatacctgtatagccactaaccattttggaactgctagcagtactggaaacttggtagtgaaagatccaacaagggtaatggtacccccttccagtatggatgtcactgttggagagagtattgttttaccgtgccaggtaacgcatgatcactcgctagacatcgtgtttacttggtcatttaatggacacctgatagactttgacagagatggggaccactttgaaagagttggagggcaggattcagctggtgatttgatgatccgaaacatccaactgaagcatgctgggaaatatgtctgcatggtccaaacaagtgtggacaggctatctgctgctgcagacctgattgtaagaggtcctccaggtcccccagaggctgtgacaatagacgaaatcacagataccactgctcagctctcctggagacccgggcctgacaaccacagccccatcaccatgtatgtcattcaagccaggactccattctccgtgggctggcaagcagtcagtacagtcccagaactcattgatgggaagacattcacagcgaccgtggtgggtttgaacccttgggttgaatatgaattccgcacagttgcagccaacgtgattgggattggggagcccagccgcccctcagagaaacggagaacagaagaagctctccccgaagtcacaccagcgaatgtcagtggtggcggaggcagcaaatctgaactggttataacctgggagacggtccctgaggaattacagaatggtcgaggctttggttatgtggtggccttccggccctacggtaaaatgatctggatgctgacagtgctggcctcagctgatgcctctagatacgtgttcaggaatgagagcgtgcaccccttctctccctttgaggttaaagtaggtgtcttcaacaacaaaggagaaggccctttcagtcccaccacggtggtgtattctgcagaagaagaacccaccaaaccaccagccagtatctttgccagaagtctttctgccacagatattgaagttttctgggcctccccactggagaagaatagaggacgaatacaaggttatgaggttaaatattggagacatgaagacaaagaagaaaatgctagaaaaatacgaacagttggaaatcagacatcaacaaaaatcacgaacttaaaaggcagtgtgctgtatcacttagctgtcaaggcatataattctgctgggacaggcccctctagtgcaacagtcaatgtgacaacccgaaagccaccaccaagtcaaccccccggaaacatcatatggaattcatcagactccaaaattatcctgaattgggatcaagtgaaggccctggataatgagtcggaagtaaaaggatacaaagtcttgtacagatggaacagacaaagcagcacatctgtcattgaaacaaataaaacatcggtggagctttctttgcctttcgatgaagattatataatagaaattaagccattcagcgacggaggagatggcagcagcagtgaacaaattcgaattccaaagatatcaaatgcctacgcgagaggatctggggcttccacttcgaatgcatgtacgctgtcagccatcagtacaataatgatttccctcacagctaggtccagtttatgacaaaagttatctgaaggacttgctgtttataatataagcaacatttagctagttgttttgaagacacccagtactaagtaatattgttgttcaagtacatcttattactggaataaaaatgttttttgcttcttt

SEQ ID NO: 3477 - protein, 1026 aa, Homo sapiens; identical to SEQ ID NO: 317

SEQ ID NO: 3478 - DNA, 3746 bp, Homo sapiens
gttcgacgccaggattggctgcaagtagggagctttcgccgccgccccgggcccctcggactgtgccggcgccgcacccgaggctctcgccagcccggcgccccggtgctgagccggaaaataagtttgttgcgctgcgaggcagccacaaaacaaggaaccgagagcccggaatgctgcgggaagccttcaagtcagctcctccgactggttcgggctactgccccctctccgtgcgccctggcctctggcgccgggttcccggcggggcttttcttctgacagcccagtcacagcccgcagcagagggacgcgaacctggggagtggagggacctgggactaaaggaacaggagcccgtagccgtggtggaaggagccgcgtggagacggaggctgatgtctgtggcgcccgctgggtgccgggctggctgctgagcgctgaggctgcggcggcgagcgacaggccaggtgcctgctcttagggaaggaatcattgacatagagtaactccacagcatgtgtcttcaagagcttccctaaaagattaaaggttatacaaaacttaaaagaagcagcaattctattcgcttgttattggacttgaaactccctttgacctcggaaactgaagatgaggttgccatgggaactgctggtactgcaatcattcattttgtgccttgcagatgattccacactgcatggcccgatttttattcaagaaccaagtcctgtaatgttccctttggattctgaggagaaaaaagtgaagctcaattgtgaagttaaaggaaatccaaaacctcatatcaggtggaagttaaatggaacagatgttgacactggtatggatttccgctacagtgttgttgaagggagcttgttgatcaataaccccaataaaacccaagatgctggaacgtaccagtgcacagcgacaaactcgtttggaacaattgttagcagagaagcaaagcttcagtttgcttatcttgacaactttaaaacaagaacaagaagcactgtgtctgtccgtcgaggtcaaggaatggtgctactgtgtggcccgccaccccattctggagagctgagttatgcctggatcttcaatgaatacccttcctatcaggataatcgccgctttgtttctcaagagactgggaatctgtatattgccaaagtagaaaaatcagatgttgggaattatacctgtgtggttaccaataccgtgacaaaccacaaggtcctggggccacctacaccactaatattgagaaatgatgtccagtaccaactattatctggcgaagagctgatggaaagccaatagcaaggaaagccagaagacacaagtcaaatggaattcttgagatccctaattttcagcaggaggatgctggtttatatgaatgtgtagctgaaaattccagagggaaaaatgtagcaaggggacagctaactttctatgctcaacctaattggattcaaaaaataaatgatattcacgtggccatggaagaaaatgtcttttgggaatgtaaagcaaatggaaggcctaagcctacatacaagtggctaaaaaatggcgaacctctgctaactcgggatagaattcaaattgagcaaggaacactcaacataacaatagtgaacctctcagatgctggcatgtatcagtgtttggcagagaataaacatggagttatcttttccaacgcagagcttagtgttatagctgtaggtccagatttttcaagaacactcttgaaaagagtaactcttgtcaaagtgggaggtgaagttgtcattgagtgtaagccaaaagcgtctccaaaacctgtttacacctggaagaaaggaagggatatattaaaagaaaatgaaagaattaccatttctgaagatggaaacctcagaatcatcaacgttactaaatcagacgctgggagttatacctgtatagccactaaccattttggaactgctagcagtactggaaacttggtagtgaaagatccaacaagggtaatggtacccccttccagtatggatgtcactgttggagagagtattgttttaccgtgccaggtaacgcatgatcactcgctagacatcgtgtttacttggtcatttaatggacacctgatagactttgacagagatggggaccactttgaaagagttggagggcaggattcagctggtgatttgatgatccgaaacatccaactgaagcatgctgggaaatatgtctgcatggtccaaacaagtgtggacaggctatctgctgctgcagacctgattgtaagaggtcctccaggtcccccagaggctgtgacaatagacgaaatcacagataccactgctcagctctcctggagacccgggcctgacaaccacagccccatcaccatgtatgtcattcaagccaggactccattctccgtgggctggcaagcagtcagtacagtcccagaactcattgatgggaagacattcacagcgaccgtggtgggtttgaacccttgggttgaatatgaattccgcacagttgcagccaacgtgattgggattggggagcccagccgcccctcagagaaacggagaacagaagaagctctccccgaagtcacaccagcgaatgtcagtggtggcggaggcagcaaatctgaactggttataacctgggagacggtccctgaggaattacagaatggtcgaggctttggttatgtggtggccttccggccctacggtaaaatgatctggatgctgacagtgctggcctcagctgatgcctctagatacgtgttcaggaatgagagcgtgcaccccttctctccctttgaggttaaagtaggtgtcttcaacaacaaaggagaaggccctttcagtcccaccacggtggtgtattctgcagaagaagaacccaccaaaccaccagccagtatctttgccagaagtctttctgccacagatattgaagttttctgggcctccccactggagaagaatagaggacgaatacaaggttatgaggttaaatattggagacatgaagacaaagaagaaaatgctagaaaaatacgaacagttggaaatcagacatcaacaaaaatcacgaacttaaaaggcagtgtgctgtatcacttagctgtcaaggcatataattctgctgggacaggcccctctagtgcaacagtcaatgtgacaacccgaaagccaccaccaagtcaaccccccggaaacatcatatggaattcatcagactccaaaattatcctgaattgggatcaagtgaaggccctggataatgagtcggaagtaaaaggatacaaagtcttgtacagatggaacagacaaagcagcacatctgtcattgaaacaaataaaacatcggtggagctttctttgcctttcgatgaagattatataatagaaattaagccattcagcgacggaggagatggcagcagcagtgaacaaattcgaattccaaagatatcaaatgcctacgcgagaggatctggggcttccacttcgaatgcatgtacgctgtcagccatcagtacaataatgatttccctcacagctaggtccagtttatgacaaaagttatctgaaggacttgctgtttataatataagcaacatttagctagttgttttgaagacacccagtactaagtaatattgttgttcaagtacatcttattactggaataaaaatgttttttgcttcttt

SEQ ID NO: 3479 - protein, 698 aa, Homo sapiens; identical to SEQ ID NO: 321

SEQ ID NO: 3480 - DNA, 5616 bp, Homo sapiens
gttcgacgccaggattggctgcaagtagggagctttcgccgccgccccgggcccctcggactgtgccggcgccgcacccgaggctctcgccagcccggcgccccggtgctgagccggaaaataagtttgttgcgctgcgaggcagccacaaaacaaggaaccgagagcccggaatgctgcgggaagccttcaagtcagctcctccgactggttcgggctactgccccctctccgtgcgccctggcctctggcgccgggttcccggcggggcttttcttctgacagcccagtcacagcccgcagcagagggacgcgaacctggggagtggagggacctgggactaaaggaacaggagcccgtagccgtggtggaaggagccgcgtggagacggaggctgatgtctgtggcgcccgctgggtgccgggctggctgctgagcgctgaggctgcggcggcgagcgacaggccaggtgcctgctcttagggaaggaatcattgacatagagtaactccacagcatgtgtcttcaagagcttccctaaaagattaaaggttatacaaaacttaaaagaagcagcaattctattcgcttgttattggacttgaaactccctttgacctcggaaactgaagatgaggttgccatgggaactgctggtactgcaatcattcattttgtgccttgcagatgattccacactgcatggcccgatttttattcaagaaccaagtcctgtaatgttccctttggattctgaggagaaaaaagtgaagctcaattgtgaagttaaaggaaatccaaaacctcatatcaggtggaagttaaatggaacagatgttgacactggtatggatttccgctacagtgttgttgaagggagcttgttgatcaataaccccaataaaacccaagatgctggaacgtaccagtgcacagcgacaaactcgtttggaacaattgttagcagagaagcaaagcttcagtttgcttatcttgacaactttaaaacaagaacaagaagcactgtgtctgtccgtcgaggtcaaggaatggtgctactgtgtggcccgccaccccattctggagagctgagttatgcctggatcttcaatgaatacccttcctatcaggataatcgccgctttgtttctcaagagactgggaatctgtatattgccaaagtagaaaaatcagatgttgggaattatacctgtgtggttaccaataccgtgacaaaccacaaggtcctggggccacctacaccactaatattgagaaatgatggagtgatgggtgaatatgagcccaaaatagaagtgcagttcccagaaacagttccgactgcaaaaggagcaacggtgaagctggaatgctttgctttaggaaatccagtaccaactattatctggcgaagagctgatggaaagccaatagcaaggaaagccagaagacacaagtcaaatggaattcttgagatccctaattttcagcaggaggatgctggtttatatgaatgtgtagctgaaaattccagagggaaaaatgtagcaaggggacagctaactttctatgctcaacctaattggattcaaaaaataaatgatattcacgtggccatggaagaaaatgtcttttgggaatgtaaagcaaatggaaggcctaagcctacatacaagtggctaaaaaatggcgaacctctgctaactcgggatagaattcaaattgagcaaggaacactcaacataacaatagtgaacctctcagatgctggcatgtatcagtgtttggcagagaataaacatggagttatcttttccaacgcagagcttagtgttatagctgtaggtccagatttttcaagaacactcttgaaaagagtaactcttgtcaaagtgggaggtgaagttgtcattgagtgtaagccaaaagcgtctccaaaacctgtttacacctggaagaaaggaagggatatattaaaagaaaatgaaagaattaccatttctgaagatggaaacctcagaatcatcaacgttactaaatcagacgctgggagttatacctgtatagccactaaccattttggaactgctagcagtactggaaacttggtagtgaaagatccaacaagggtaatggtacccccttccagtatggatgtcactgttggagagagtattgttttaccgtgccaggtaacgcatgatcactcgctagacatcgtgtttacttggtcatttaatggacacctgatagactttgacagagatggggaccactttgaaagagttggagggcaggattcagctggtgatttgatgatccgaaacatccaactgaagcatgctgggaaatatgtctgcatggtccaaacaagtgtggacaggctatctgctgctgcagacctgattgtaagaggtcctccaggtcccccagaggctgtgacaatagacgaaatcacagataccactgctcagctctcctggagacccgggcctgacaaccacagccccatcaccatgtatgtcattcaagccaggactccattctccgtgggctggcaagcagtcagtacagtcccagaactcattgatgggaagacattcacagcgaccgtggtgggtttgaacccttgggttgaatatgaattccgcacagttgcagccaacgtgattgggattggggagcccagccgcccctcagagaaacggagaacagaagaagctctccccgaagtcacaccagcgaatgtcagtggtggcggaggcagcaaatctgaactggttataacctgggagacggtccctgaggaattacagaatggtcgaggctttggttatgtggtggccttccggccctacggtaaaatgatctggatgctgacagtgctggcctcagctgatgcctctagatacgtgttcaggaatgagagcgtgcaccccttctctccctttgaggttaaagtaggtgtcttcaacaacaaaggagaaggccctttcagtcccaccacggtggtgtattctgcagaagaagaacccaccaaaccaccagccagtatctttgccagaagtctttctgccacagatattgaagttttctgggcctccccactggagaagaatagaggacgaatacaaggttatgaggttaaatattggagacatgaagacaaagaagaaaatgctagaaaaatacgaacagttggaaatcagacatcaacaaaaatcacgaacttaaaaggcagtgtgctgtatcacttagctgtcaaggcatataattctgctgggacaggcccctctagtgcaacagtcaatgtgacaacccgaaagccaccaccaagtcaaccccccggaaacatcatatggaattcatcagactccaaaattatcctgaattgggatcaagtgaaggccctggataatgagtcggaagtaaaaggatacaaagtcttgtacagatggaacagacaaagcagcacatctgtcattgaaacaaataaaacatcggtggagctttctttgcctttcgatgaagattatataatagaaattaagccattcagcgacggaggagatggcagcagcagtgaacaaattcgaattccaaagatatcaaatgcctacgcgagaggatctggggcttccacttcgaatgcatgtacgctgtcagccatcagtacaataatgatttccctcacagctaggtccagtttatgacaaaagttatctgaaggacttgctgtttataatataagcaacatttagctagttgttttgaagacacccagtactaagtaatattgttgttcaagtacatcttattactggaataaaaatgttttttgcttctttaggaatggcattatacagtacttcctcaaagcaaatctagctttgtctgaagtttctttggaaactctgcaatgcactgaagacatctgtaatatgatgttaccaaagcagtttacatatgtccttatatgccctcggctgtaaaatgctatgggcaacacaatcatgcaattataatttgaaaatatttcctttaaagacagagtttgaaactcatcttggtaaataaattgcaaattactcgtacagttttacaaggatctcatggcagaacagcggaagacttggtccgtaactcaaggctgttgtatgcaaactactcttctagtggttaatgcacttgacatgtacagtatgtttcccatgccgttgtgattttgacatgtacagtatgttttcatgccgttgtgaattttgttgttcaacccaacttgagatggtttcaggaatggctgcaatctcaaaagctcaatgtactgcccaagaggcaccttgtgcaatattcccatccctgaatttagcattgtacaggaagattttcttttcactcaactgagttagcattgtctttgtggtagcattatcttagacattaaatttgaagtaacatatatcctgtagtaacatagacccaaagttactatagtcaaccaagtctttcaaaggataaaagatcattttattatctttaactgtatctattttgaatgtaaatttaaaaaaagtaattctctgtcaatggattcgtaatttctttacaaaatttcttatatataatatgtgtatctctgtaataatagagcccttcttttgaatcaaaattacatatggactttggaagattgctcctatttcaacaaatagttgctgcaagaatttttaatatgactctataaaagctctttagtacaattgtatggtttcttgatgattctgttttgcaataggtagcctagttgctttatatgctttaccttctaggtcttaaaatcacacattggaaaatgacaatatcaacaaaactgtattcttatgaaaagaactatttgttacaatgagaaaggttttgtgagtaaaccctactggacagtgacataaaaggcaatggaattttctataaacattttctcatgtaaacatgctgccaccttttcttctttctcagagaactcaaatttgctatagtttgtcatttttgcttacaaataatataacttttcaaccttctagttatatttatccaataaagtcataatcgggattccatttgtgtaaaaactagggtggtaaccggaaaaaaatattgtcagtatttcaagctgtgttcctttcttagtttgatatggttacttctatgttgaaataaaatttaaaatcacatgcaaaaaaaaaatcagcaaaataataaaatgaacgaaaaaaaatgacacccagggagttcccaaccccagtgtaaatgatatttaccagtgatctagcatatgtaatcttttttaaaggtattgttaataaatattctgtcatttgtaaagatacttgtctttcgggagcatttttcctgcctgcctgtcagggaatttgttagcttacctttgtgctagttataatttgggatcatagagggactcaaaagtctctacccaaatctagatgacccagagcttttcctttggaattgacaaccctgaagcaccatttcaaatcctctttggaagtagagagggtcctaatccacaagtaaatgtcctgaagatgagacttgaatat

SEQ ID NO: 3481 - protein, 1026 aa, Homo sapiens; identical to SEQ ID NO: 317

SEQ ID NO: 3482 - DNA, 3618 bp, Homo sapiens
aagtagggagctttcgccgccgccccgggcccctcggactgtgccggcgccgcacccgaggctctcgccagcccggcgccccggtgctgagtgggtgaaaaagaacagtgtgtcatgaagacaggcacctggaggtgatttgggtggcattcatgagaaaattcacgttacccacttcgctaactgatgaaacactgccagagcccacttggactgtttcgcaactttacttaagggaataaaagctctcatgctgaggaatcattgacatagagtaactccacagcatgtgtcttcaagagcttccctaaaagattaaaggttatacaaaacttaaaagaagcagcaattctattcgcttgttattggacttgaaactccctttgacctcggaaactgaagatgaggttgccatgggaactgctggtactgcaatcattcattttgtgccttgcagatgattccacactgcatggcccgatttttattcaagaaccaagtcctgtaatgttccctttggattctgaggagaaaaaagtgaagctcaattgtgaagttaaaggaaatccaaaacctcatatcaggtggaagttaaatggaacagatgttgacactggtatggatttccgctacagtgttgttgaagggagcttgttgatcaataaccccaataaaacccaagatgctggaacgtaccagtgcacagcgacaaactcgtttggaacaattgttagcagagaagcaaagcttcagtttgcttatcttgacaactttaaaacaagaacaagaagcactgtgtctgtccgtcgaggtcaaggaatggtgctactgtgtggcccgccaccccattctggagagctgagttatgcctggatcttcaatgaatacccttcctatcaggataatcgccgctttgtttctcaagagactgggaatctgtatattgccaaagtagaaaaatcagatgttgggaattatacctgtgtggttaccaataccgtgacaaaccacaaggtcctggggccacctacaccactaatattgagaaatgatggagtgatgggtgaatatgagcccaaaatagaagtgcagttcccagaaacagttccgactgcaaaaggagcaacggtgaagctggaatgctttgctttaggaaatccagtaccaactattatctggcgaagagctgatggaaagccaatagcaaggaaagccagaagacacaagtcaaatggaattcttgagatccctaattttcagcaggaggatgctggtttatatgaatgtgtagctgaaaattccagagggaaaaatgtagcaaggggacagctaactttctatgctcaacctaattggattcaaaaaataaatgatattcacgtggccatggaagaaaatgtcttttgggaatgtaaagcaaatggaaggcctaagcctacatacaagtggctaaaaaatggcgaacctctgctaactcgggatagaattcaaattgagcaaggaacactcaacataacaatagtgaacctctcagatgctggcatgtatcagtgtttggcagagaataaacatggagttatcttttccaacgcagagcttagtgttatagctgtaggtccagatttttcaagaacactcttgaaaagagtaactcttgtcaaagtgggaggtgaagttgtcattgagtgtaagccaaaagcgtctccaaaacctgtttacacctggaagaaaggaagggatatattaaaagaaaatgaaagaattaccatttctgaagatggaaacctcagaatcatcaacgttactaaatcagacgctgggagttatacctgtatagccactaaccattttggaactgctagcagtactggaaacttggtagtgaaagatccaacaagggtaatggtacccccttccagtatggatgtcactgttggagagagtattgttttaccgtgccaggtaacgcatgatcactcgctagacatcgtgtttacttggtcatttaatggacacctgatagactttgacagagatggggaccactttgaaagagttggagggcaggattcagctggtgatttgatgatccgaaacatccaactgaagcatgctgggaaatatgtctgcatggtccaaacaagtgtggacaggctatctgctgctgcagacctgattgtaagaggtcctccaggtcccccagaggctgtgacaatagacgaaatcacagataccactgctcagctctcctggagacccgggcctgacaaccacagccccatcaccatgtatgtcattcaagccaggactccattctccgtgggctggcaagcagtcagtacagtcccagaactcattgatgggaagacattcacagcgaccgtggtgggtttgaacccttgggttgaatatgaattccgcacagttgcagccaacgtgattgggattggggagcccagccgcccctcagagaaacggagaacagaagaagctctccccgaagtcacaccagcgaatgtcagtggtggcggaggcagcaaatctgaactggttataacctgggagacggtccctgaggaattacagaatggtcgaggctttggttatgtggtggccttccggccctacggtaaaatgatctggatgctgacagtgctggcctcagctgatgcctctagatacgtgttcaggaatgagagcgtgcaccccttctctccctttgaggttaaagtaggtgtcttcaacaacaaaggagaaggccctttcagtcccaccacggtggtgtattctgcagaagaagaacccaccaaaccaccagccagtatctttgccagaagtctttctgccacagatattgaagttttctgggcctccccactggagaagaatagaggacgaatacaaggttatgaggttaaatattggagacatgaagacaaagaagaaaatgctagaaaaatacgaacagttggaaatcagacatcaacaaaaatcacgaacttaaaaggcagtgtgctgtatcacttagctgtcaaggcatataattctgctgggacaggcccctctagtgcaacagtcaatgtgacaacccgaaagccaccaccaagtcaaccccccggaaacatcatatggaattcatcagactccaaaattatcctgaattgggatcaagtgaaggccctggataatgagtcggaagtaaaaggatacaaagtcttgtacagatggaacagacaaagcagcacatctgtcattgaaacaaataaaacatcggtggagctttctttgcctttcgatgaagattatataatagaaattaagccattcagcgacggaggagatggcagcagcagtgaacaaattcgaattccaaagatatcaaatgcctacgcgagaggatctggggcttccacttcgaatgcatgtacgctgtcagccatcagtacaataatgatttccctcacagctaggtccagtttatgacaaaagttatctgaaggacttgctgtttataatataagcaacatttagctagttgttttgaagacacccagtactaagtaatattgttgttcaagtacatcttattactggaataaaaatgttttttgcttcttt

SEQ ID NO: 3483 - protein, 1026 aa, Homo sapiens; identical to SEQ ID NO: 317

SEQ ID NO: 3484 - DNA, 5385 bp, Homo sapiens
aagtagggagctttcgccgccgccccgggcccctcggactgtgccggcgccgcacccgaggctctcgccagcccggcgccccggtgctgagtgggtgaaaaagaacagtgtgtcatgaagacaggcacctggaggtgatttgggtggcattcatgagaaaattcacgttacccacttcgctaactgatgaaacactgccagagcccacttggactgtttcgcaactttacttaagggaataaaagctctcatgctgaggaatcattgacatagagtaactccacagcatgtgtcttcaagagcttccctaaaagattaaaggttatacaaaacttaaaagaagcagcaattctattcgcttgttattggacttgaaactccctttgacctcggaaactgaagatgaggttgccatgggaactgctggtactgcaatcattcattttgtgccttgcagatgattccacactgcatggcccgatttttattcaagaaccaagtcctgtaatgttccctttggattctgaggagaaaaaagtgaagctcaattgtgaagttaaaggaaatccaaaacctcatatcaggtggaagttaaatggaacagatgttgacactggtatggatttccgctacagtgttgttgaagggagcttgttgatcaataaccccaataaaacccaagatgctggaacgtaccagtgcacagcgacaaactcgtttggaacaattgttagcagagaagcaaagcttcagtttgcttatcttgacaactttaaaacaagaacaagaagcactgtgtctgtccgtcgaggtcaaggaatggtgctactgtgtggcccgccaccccattctggagagctgagttatgcctggatcttcaatgaatacccttcctatcaggataatcgccgctttgtttctcaagagactgggaatctgtatattgccaaagtagaaaaatcagatgttgggaattatacctgtgtggttaccaataccgtgacaaaccacaaggtcctggggccacctacaccactaatattgagaaatgatggagtgatgggtgaatatgagcccaaaatagaagtgcagttcccagaaacagttccgactgcaaaaggagcaacggtgaagctggaatgctttgctttaggaaatccagtaccaactattatctggcgaagagctgatggaaagccaatagcaaggaaagccagaagacacaagtcaaatggaattcttgagatccctaattttcagcaggaggatgctggtttatatgaatgtgtagctgaaaattccagagggaaaaatgtagcaaggggacagctaactttctatgctcaacctaattggattcaaaaaataaatgatattcacgtggccatggaagaaaatgtcttttgggaatgtaaagcaaatggaaggcctaagcctacatacaagtggctaaaaaatggcgaacctctgctaactcgggatagaattcaaattgagcaaggaacactcaacataacaatagtgaacctctcagatgctggcatgtatcagtgtttggcagagaataaacatggagttatcttttccaacgcagagcttagtgttatagctgtaggtccagatttttcaagaacactcttgaaaagagtaactcttgtcaaagtgggaggtgaagttgtcattgagtgtaagccaaaagcgtctccaaaacctgtttacacctggaagaaaggaagggatatattaaaagaaaatgaaagaattaccatttctgaagatggaaacctcagaatcatcaacgttactaaatcagacgctgggagttatacctgtatagccactaaccattttggaactgctagcagtactggaaacttggtagtgaaagatccaacaagggtaatggtacccccttccagtatggatgtcactgttggagagagtattgttttaccgtgccaggtaacgcatgatcactcgctagacatcgtgtttacttggtcatttaatggacacctgatagactttgacagagatggggaccactttgaaagagttggagggcaggattcagctggtgatttgatgatccgaaacatccaactgaagcatgctgggaaatatgtctgcatggtccaaacaagtgtggacaggctatctgctgctgcagacctgattgtaagaggtcctccaggtcccccagaggctgtgacaatagacgaaatcacagataccactgctcagctctcctggagacccgggcctgacaaccacagccccatcaccatgtatgtcattcaagccaggactccattctccgtgggctggcaagcagtcagtacagtcccagaactcattgatgggaagacattcacagcgaccgtggtgggtttgaacccttgggttgaatatgaattccgcacagttgcagccaacgtgattgggattggggagcccagccgcccctcagagaaacggagaacagaagaagctctccccgaagtcacaccagcgaatgtcagtggtggcggaggcagcaaatctgaactggttataacctgggagacggtccctgaggaattacagaatggtcgaggctttggttatgtggtggccttccggccctacggtaaaatgatctggatgctgacagtgctggcctcagctgatgcctctagatacgtgttcaggaatgagagcgtgcaccccttctctccctttgaggttaaagtaggtgtcttcaacaacaaaggagaaggccctttcagtcccaccacggtggtgtattctgcagaagaagaacccaccaaaccaccagccagtatctttgccagaagtctttctgccacagatattgaagttttctgggcctccccactggagaagaatagaggacgaatacaaggttatgaggttaaatattggagacatgaagacaaagaagaaaatgctagaaaaatacgaacagttggaaatcagacatcaacaaaaatcacgaacttaaaaggcagtgtgctgtatcacttagctgtcaaggcatataattctgctgggacaggcccctctagtgcaacagtcaatgtgacaacccgaaagccaccaccaagtcaaccccccggaaacatcatatggaattcatcagactccaaaattatcctgaattgggatcaagtgaaggccctggataatgagtcggaagtaaaaggatacaaagtcttgtacagatggaacagacaaagcagcacatctgtcattgaaacaaataaaacatcggtggagctttctttgcctttcgatgaagattatataatagaaattaagccattcagcgacggaggagatggcagcagcagtgaacaaattcgaattccaaagatatcaaatgcctacgcgagaggatctggggcttccacttcgaatgcatgtacgctgtcagccatcagtacaataatgatttccctcacagctaggtccagtttatgacaaaagttatctgaaggacttgctgtttataatataagcaacatttagctagttgttttgaagacacccagtactaagtaatattgttgttcaagtacatcttattactggaataaaaatgttttttgcttctttaggaatggcattatacagtacttcctcaaagcaaatctagctttgtctgaagtttctttggaaactctgcaatgcactgaagacatctgtaatatgatgttaccaaagcagtttacatatgtccttatatgccctcggctgtaaaatgctatgggcaacacaatcatgcaattataatttgaaaatatttcctttaaagacagagtttgaaactcatcttggtaaataaattgcaaattactcgtacagttttacaaggatctcatggcagaacagcggaagacttggtccgtaactcaaggctgttgtatgcaaactactcttctagtggttaatgcacttgacatgtacagtatgtttcccatgccgttgtgattttgacatgtacagtatgttttcatgccgttgtgaattttgttgttcaacccaacttgagatggtttcaggaatggctgcaatctcaaaagctcaatgtactgcccaagaggcaccttgtgcaatattcccatccctgaatttagcattgtacaggaagattttcttttcactcaactgagttagcattgtctttgtggtagcattatcttagacattaaatttgaagtaacatatatcctgtagtaacatagacccaaagttactatagtcaaccaagtctttcaaaggataaaagatcattttattatctttaactgtatctattttgaatgtaaatttaaaaaaagtaattctctgtcaatggattcgtaatttctttacaaaatttcttatatataatatgtgtatctctgtaataatagagcccttcttttgaatcaaaattacatatggactttggaagattgctcctatttcaacaaatagttgctgcaagaatttttaatatgactctataaaagctctttagtacaattgtatggtttcttgatgattctgttttgcaataggtagcctagttgctttatatgctttaccttctaggtcttaaaatcacacattggaaaatgacaatatcaacaaaactgtattcttatgaaaagaactatttgttacaatgagaaaggttttgtgagtaaaccctactggacagtgacataaaaggcaatggaattttctataaacattttctcatgtaaacatgctgccaccttttcttctttctcagagaactcaaatttgctatagtttgtcatttttgcttacaaataatataacttttcaaccttctagttatatttatccaataaagtcataatcgggattccatttgtgtaaaaactagggtggtaaccggaaaaaaatattgtcagtatttcaagctgtgttcctttcttagtttgatatggttacttctatgttgaaataaaatttaaaatcacatgcaaaaaaaaaatcagcaaaataataaaatgaacgaaaaaaaatgacacccagggagttcccaaccccagtgtaaatgatatttaccagtgatctagcatatgtaatcttttttaaaggtattgttaataaatattctgtcatttgtaaagatacttgtctttcgggagcatttttcctgcctgcctgtcagggaatttgttagcttacctttgtgctagttataatttgggatcatagagggactcaaaagtctctacccaaatctagatgacccagagcttttcctttggaattgacaaccctgaagcaccatttcaaatcctctttggaagtagagagggtcctaatccacaagtaaatgtcctgaagatgagacttgaatat

SEQ ID NO: 3485 - protein, 1026 aa, Homo sapiens; identical to SEQ ID NO: 317

SEQ ID NO: 3486 - DNA, 3495 bp, Homo sapiens
ctgtgccggcgccgcacccgaggctctcgccagcccggcgccccggtgctgagtgggtgaaaaagaacagtgtgtcatgaagacaggcacctggaggtgatttgggtggcattcatgagaaaattcacgttacccgaatcattgacatagagtaactccacagcatgtgtcttcaagagcttccctaaaagattaaaggttatacaaaacttaaaagaagcagcaattctattcgcttgttattggacttgaaactccctttgacctcggaaactgaagatgaggttgccatgggaactgctggtactgcaatcattcattttgtgccttgcagatgattccacactgcatggcccgatttttattcaagaaccaagtcctgtaatgttccctttggattctgaggagaaaaaagtgaagctcaattgtgaagttaaaggaaatccaaaacctcatatcaggtggaagttaaatggaacagatgttgacactggtatggatttccgctacagtgttgttgaagggagcttgttgatcaataaccccaataaaacccaagatgctggaacgtaccagtgcacagcgacaaactcgtttggaacaattgttagcagagaagcaaagcttcagtttgcttatcttgacaactttaaaacaagaacaagaagcactgtgtctgtccgtcgaggtcaaggaatggtgctactgtgtggcccgccaccccattctggagagctgagttatgcctggatcttcaatgaatacccttcctatcaggataatcgccgctttgtttctcaagagactgggaatctgtatattgccaaagtagaaaaatcagatgttgggaattatacctgtgtggttaccaataccgtgacaaaccacaaggtcctggggccacctacaccactaatattgagaaatgatggagtgatgggtgaatatgagcccaaaatagaagtgcagttcccagaaacagttccgactgcaaaaggagcaacggtgaagctggaatgctttgctttaggaaatccagtaccaactattatctggcgaagagctgatggaaagccaatagcaaggaaagccagaagacacaagtcaaatggaattcttgagatccctaattttcagcaggaggatgctggtttatatgaatgtgtagctgaaaattccagagggaaaaatgtagcaaggggacagctaactttctatgctcaacctaattggattcaaaaaataaatgatattcacgtggccatggaagaaaatgtcttttgggaatgtaaagcaaatggaaggcctaagcctacatacaagtggctaaaaaatggcgaacctctgctaactcgggatagaattcaaattgagcaaggaacactcaacataacaatagtgaacctctcagatgctggcatgtatcagtgtttggcagagaataaacatggagttatcttttccaacgcagagcttagtgttatagctgtaggtccagatttttcaagaacactcttgaaaagagtaactcttgtcaaagtgggaggtgaagttgtcattgagtgtaagccaaaagcgtctccaaaacctgtttacacctggaagaaaggaagggatatattaaaagaaaatgaaagaattaccatttctgaagatggaaacctcagaatcatcaacgttactaaatcagacgctgggagttatacctgtatagccactaaccattttggaactgctagcagtactggaaacttggtagtgaaagatccaacaagggtaatggtacccccttccagtatggatgtcactgttggagagagtattgttttaccgtgccaggtaacgcatgatcactcgctagacatcgtgtttacttggtcatttaatggacacctgatagactttgacagagatggggaccactttgaaagagttggagggcaggattcagctggtgatttgatgatccgaaacatccaactgaagcatgctgggaaatatgtctgcatggtccaaacaagtgtggacaggctatctgctgctgcagacctgattgtaagaggtcctccaggtcccccagaggctgtgacaatagacgaaatcacagataccactgctcagctctcctggagacccgggcctgacaaccacagccccatcaccatgtatgtcattcaagccaggactccattctccgtgggctggcaagcagtcagtacagtcccagaactcattgatgggaagacattcacagcgaccgtggtgggtttgaacccttgggttgaatatgaattccgcacagttgcagccaacgtgattgggattggggagcccagccgcccctcagagaaacggagaacagaagaagctctccccgaagtcacaccagcgaatgtcagtggtggcggaggcagcaaatctgaactggttataacctgggagacggtccctgaggaattacagaatggtcgaggctttggttatgtggtggccttccggccctacggtaaaatgatctggatgctgacagtgctggcctcagctgatgcctctagatacgtgttcaggaatgagagcgtgcaccccttctctccctttgaggttaaagtaggtgtcttcaacaacaaaggagaaggccctttcagtcccaccacggtggtgtattctgcagaagaagaacccaccaaaccaccagccagtatctttgccagaagtctttctgccacagatattgaagttttctgggcctccccactggagaagaatagaggacgaatacaaggttatgaggttaaatattggagacatgaagacaaagaagaaaatgctagaaaaatacgaacagttggaaatcagacatcaacaaaaatcacgaacttaaaaggcagtgtgctgtatcacttagctgtcaaggcatataattctgctgggacaggcccctctagtgcaacagtcaatgtgacaacccgaaagccaccaccaagtcaaccccccggaaacatcatatggaattcatcagactccaaaattatcctgaattgggatcaagtgaaggccctggataatgagtcggaagtaaaaggatacaaagtcttgtacagatggaacagacaaagcagcacatctgtcattgaaacaaataaaacatcggtggagctttctttgcctttcgatgaagattatataatagaaattaagccattcagcgacggaggagatggcagcagcagtgaacaaattcgaattccaaagatatcaaatgcctacgcgagaggatctggggcttccacttcgaatgcatgtacgctgtcagccatcagtacaataatgatttccctcacagctaggtccagtttatgacaaaagttatctgaaggacttgctgtttataatataagcaacatttagctagttgttttgaagacacccagtactaagtaatattgttgttcaagtacatcttattactggaataaaaatgttttttgcttcttt

SEQ ID NO: 3487 - protein, 1026 aa, Homo sapiens; identical to SEQ ID NO: 317

SEQ ID NO: 3488 - DNA, 5262 bp, Homo sapiens
ctgtgccggcgccgcacccgaggctctcgccagcccggcgccccggtgctgagtgggtgaaaaagaacagtgtgtcatgaagacaggcacctggaggtgatttgggtggcattcatgagaaaattcacgttacccgaatcattgacatagagtaactccacagcatgtgtcttcaagagcttccctaaaagattaaaggttatacaaaacttaaaagaagcagcaattctattcgcttgttattggacttgaaactccctttgacctcggaaactgaagatgaggttgccatgggaactgctggtactgcaatcattcattttgtgccttgcagatgattccacactgcatggcccgatttttattcaagaaccaagtcctgtaatgttccctttggattctgaggagaaaaaagtgaagctcaattgtgaagttaaaggaaatccaaaacctcatatcaggtggaagttaaatggaacagatgttgacactggtatggatttccgctacagtgttgttgaagggagcttgttgatcaataaccccaataaaacccaagatgctggaacgtaccagtgcacagcgacaaactcgtttggaacaattgttagcagagaagcaaagcttcagtttgcttatcttgacaactttaaaacaagaacaagaagcactgtgtctgtccgtcgaggtcaaggaatggtgctactgtgtggcccgccaccccattctggagagctgagttatgcctggatcttcaatgaatacccttcctatcaggataatcgccgctttgtttctcaagagactgggaatctgtatattgccaaagtagaaaaatcagatgttgggaattatacctgtgtggttaccaataccgtgacaaaccacaaggtcctggggccacctacaccactaatattgagaaatgatggagtgatgggtgaatatgagcccaaaatagaagtgcagttcccagaaacagttccgactgcaaaaggagcaacggtgaagctggaatgctttgctttaggaaatccagtaccaactattatctggcgaagagctgatggaaagccaatagcaaggaaagccagaagacacaagtcaaatggaattcttgagatccctaattttcagcaggaggatgctggtttatatgaatgtgtagctgaaaattccagagggaaaaatgtagcaaggggacagctaactttctatgctcaacctaattggattcaaaaaataaatgatattcacgtggccatggaagaaaatgtcttttgggaatgtaaagcaaatggaaggcctaagcctacatacaagtggctaaaaaatggcgaacctctgctaactcgggatagaattcaaattgagcaaggaacactcaacataacaatagtgaacctctcagatgctggcatgtatcagtgtttggcagagaataaacatggagttatcttttccaacgcagagcttagtgttatagctgtaggtccagatttttcaagaacactcttgaaaagagtaactcttgtcaaagtgggaggtgaagttgtcattgagtgtaagccaaaagcgtctccaaaacctgtttacacctggaagaaaggaagggatatattaaaagaaaatgaaagaattaccatttctgaagatggaaacctcagaatcatcaacgttactaaatcagacgctgggagttatacctgtatagccactaaccattttggaactgctagcagtactggaaacttggtagtgaaagatccaacaagggtaatggtacccccttccagtatggatgtcactgttggagagagtattgttttaccgtgccaggtaacgcatgatcactcgctagacatcgtgtttacttggtcatttaatggacacctgatagactttgacagagatggggaccactttgaaagagttggagggcaggattcagctggtgatttgatgatccgaaacatccaactgaagcatgctgggaaatatgtctgcatggtccaaacaagtgtggacaggctatctgctgctgcagacctgattgtaagaggtcctccaggtcccccagaggctgtgacaatagacgaaatcacagataccactgctcagctctcctggagacccgggcctgacaaccacagccccatcaccatgtatgtcattcaagccaggactccattctccgtgggctggcaagcagtcagtacagtcccagaactcattgatgggaagacattcacagcgaccgtggtgggtttgaacccttgggttgaatatgaattccgcacagttgcagccaacgtgattgggattggggagcccagccgcccctcagagaaacggagaacagaagaagctctccccgaagtcacaccagcgaatgtcagtggtggcggaggcagcaaatctgaactggttataacctgggagacggtccctgaggaattacagaatggtcgaggctttggttatgtggtggccttccggccctacggtaaaatgatctggatgctgacagtgctggcctcagctgatgcctctagatacgtgttcaggaatgagagcgtgcaccccttctctccctttgaggttaaagtaggtgtcttcaacaacaaaggagaaggccctttcagtcccaccacggtggtgtattctgcagaagaagaacccaccaaaccaccagccagtatctttgccagaagtctttctgccacagatattgaagttttctgggcctccccactggagaagaatagaggacgaatacaaggttatgaggttaaatattggagacatgaagacaaagaagaaaatgctagaaaaatacgaacagttggaaatcagacatcaacaaaaatcacgaacttaaaaggcagtgtgctgtatcacttagctgtcaaggcatataattctgctgggacaggcccctctagtgcaacagtcaatgtgacaacccgaaagccaccaccaagtcaaccccccggaaacatcatatggaattcatcagactccaaaattatcctgaattgggatcaagtgaaggccctggataatgagtcggaagtaaaaggatacaaagtcttgtacagatggaacagacaaagcagcacatctgtcattgaaacaaataaaacatcggtggagctttctttgcctttcgatgaagattatataatagaaattaagccattcagcgacggaggagatggcagcagcagtgaacaaattcgaattccaaagatatcaaatgcctacgcgagaggatctggggcttccacttcgaatgcatgtacgctgtcagccatcagtacaataatgatttccctcacagctaggtccagtttatgacaaaagttatctgaaggacttgctgtttataatataagcaacatttagctagttgttttgaagacacccagtactaagtaatattgttgttcaagtacatcttattactggaataaaaatgttttttgcttctttaggaatggcattatacagtacttcctcaaagcaaatctagctttgtctgaagtttctttggaaactctgcaatgcactgaagacatctgtaatatgatgttaccaaagcagtttacatatgtccttatatgccctcggctgtaaaatgctatgggcaacacaatcatgcaattataatttgaaaatatttcctttaaagacagagtttgaaactcatcttggtaaataaattgcaaattactcgtacagttttacaaggatctcatggcagaacagcggaagacttggtccgtaactcaaggctgttgtatgcaaactactcttctagtggttaatgcacttgacatgtacagtatgtttcccatgccgttgtgattttgacatgtacagtatgttttcatgccgttgtgaattttgttgttcaacccaacttgagatggtttcaggaatggctgcaatctcaaaagctcaatgtactgcccaagaggcaccttgtgcaatattcccatccctgaatttagcattgtacaggaagattttcttttcactcaactgagttagcattgtctttgtggtagcattatcttagacattaaatttgaagtaacatatatcctgtagtaacatagacccaaagttactatagtcaaccaagtctttcaaaggataaaagatcattttattatctttaactgtatctattttgaatgtaaatttaaaaaaagtaattctctgtcaatggattcgtaatttctttacaaaatttcttatatataatatgtgtatctctgtaataatagagcccttcttttgaatcaaaattacatatggactttggaagattgctcctatttcaacaaatagttgctgcaagaatttttaatatgactctataaaagctctttagtacaattgtatggtttcttgatgattctgttttgcaataggtagcctagttgctttatatgctttaccttctaggtcttaaaatcacacattggaaaatgacaatatcaacaaaactgtattcttatgaaaagaactatttgttacaatgagaaaggttttgtgagtaaaccctactggacagtgacataaaaggcaatggaattttctataaacattttctcatgtaaacatgctgccaccttttcttctttctcagagaactcaaatttgctatagtttgtcatttttgcttacaaataatataacttttcaaccttctagttatatttatccaataaagtcataatcgggattccatttgtgtaaaaactagggtggtaaccggaaaaaaatattgtcagtatttcaagctgtgttcctttcttagtttgatatggttacttctatgttgaaataaaatttaaaatcacatgcaaaaaaaaaatcagcaaaataataaaatgaacgaaaaaaaatgacacccagggagttcccaaccccagtgtaaatgatatttaccagtgatctagcatatgtaatcttttttaaaggtattgttaataaatattctgtcatttgtaaagatacttgtctttcgggagcatttttcctgcctgcctgtcagggaatttgttagcttacctttgtgctagttataatttgggatcatagagggactcaaaagtctctacccaaatctagatgacccagagcttttcctttggaattgacaaccctgaagcaccatttcaaatcctctttggaagtagagagggtcctaatccacaagtaaatgtcctgaagatgagacttgaatat

SEQ ID NO: 3489 - protein, 1026 aa, Homo sapiens; identical to SEQ ID NO: 317

SEQ ID NO: 3490 - DNA, 3258 bp, Homo sapiens
aatctccatccctcccccgaaatctatcaacagctgtgtgagcctctgtgtatttttgaaaggttgaacacatttgatcggagaacaaacttgatttcctaatcaggttcgatgcgaggagagccagttagagatgtgtgtgattctcccagtgtgcgtctttgattcgtgtgctaattatgtcgatcctttggggaacacagccaggaagctgggtcctccttgatgaatgctggcggagagccatgcagcgcgcagcggagagcagttcagcatctctagtcccagctgagaatatggtcccattatctcccagctgcctaagcaatccataagggcctgttctgcgtggatgatcagtgtagtggaagcagggacttgctgagagctgaaatctctgtttgatttgctgtaacatgtaaagcgaaactgggacattttactttacagtctattaaaggttatacaaaacttaaaagaagcagcaattctattcgcttgttattggacttgaaactccctttgacctcggaaactgaagatgaggttgccatgggaactgctggtactgcaatcattcattttgtgccttgcagatgattccacactgcatggcccgatttttattcaagaaccaagtcctgtaatgttccctttggattctgaggagaaaaaagtgaagctcaattgtgaagttaaaggaaatccaaaacctcatatcaggtggaagttaaatggaacagatgttgacactggtatggatttccgctacagtgttgttgaagggagcttgttgatcaataaccccaataaaacccaagatgctggaacgtaccagtgcacagcgacaaactcgtttggaacaattgttagcagagaagcaaagcttcagtttgcttatcttgacaactttaaaacaagaacaagaagcactgtgtctgtccgtcgaggtcaaggaatggtgctactgtgtggcccgccaccccattctggagagctgagttatgcctggatcttcaatgaatacccttcctatcaggataatcgccgctttgtttctcaagagactgggaatctgtatattgccaaagtagaaaaatcagatgttgggaattatacctgtgtggttaccaataccgtgacaaaccacaaggtcctggggccacctacaccactaatattgagaaatgatggagtgatgggtgaatatgagcccaaaatagaagtgcagttcccagaaacagttccgactgcaaaaggagcaacggtgaagctggaatgctttgctttaggaaatccagtaccaactattatctggcgaagagctgatggaaagccaatagcaaggaaagccagaagacacaagtcaaatggaattcttgagatccctaattttcagcaggaggatgctggtttatatgaatgtgtagctgaaaattccagagggaaaaatgtagcaaggggacagctaactttctatgctcaacctaattggattcaaaaaataaatgatattcacgtggccatggaagaaaatgtcttttgggaatgtaaagcaaatggaaggcctaagcctacatacaagtggctaaaaaatggcgaacctctgctaactcgggatagaattcaaattgagcaaggaacactcaacataacaatagtgaacctctcagatgctggcatgtatcagtgtttggcagagaataaacatggagttatcttttccaacgcagagcttagtgttatagctgtaggtccagatttttcaagaacactcttgaaaagagtaactcttgtcaaagtgggaggtgaagttgtcattgagtgtaagccaaaagcgtctccaaaacctgtttacacctggaagaaaggaagggatatattaaaagaaaatgaaagaattaccatttctgaagatggaaacctcagaatcatcaacgttactaaatcagacgctgggagttatacctgtatagccactaaccattttggaactgctagcagtactggaaacttggtagtgaaagatccaacaagggtaatggtacccccttccagtatggatgtcactgttggagagagtattgttttaccgtgccaggtaacgcatgatcactcgctagacatcgtgtttacttggtcatttaatggacacctgatagactttgacagagatggggaccactttgaaagagttggagggcaggattcagctggtgatttgatgatccgaaacatccaactgaagcatgctgggaaatatgtctgcatggtccaaacaagtgtggacaggctatctgctgctgcagacctgattgtaagaggtcctccaggtcccccagaggctgtgacaatagacgaaatcacagataccactgctcagctctcctggagacccgggcctgacaaccacagccccatcaccatgtatgtcattcaagccaggactccattctccgtgggctggcaagcagtcagtacagtcccagaactcattgatgggaagacattcacagcgaccgtggtgggtttgaacccttgggttgaatatgaattccgcacagttgcagccaacgtgattgggattggggagcccagccgcccctcagagaaacggagaacagaagaagctcgtgagtagcacccgagattcagatcatctgttctgccagctgctgttccttaggaaaagcgtttgaattcttgctgctcttcagcgctcatgcggctctgtgttagctcacccttccctttaaatgtttataatgatagaaatcaggccaggagaagcccagctgaacacgcaacgggtttcaatcaagagttgttttcttcattaggtccacttgtacagcaagagacacacggtgcttagtcctctcaaaagccagccctttcttcattggttcatttgtcaccaagattctaacagaatttcaaaaaaaaatcccacatttcaaataaaattatctcacataagtaactaatggcaaagaataatttgtgactgctctggacacagccaccatggggtaatcctgtttagaatagaaataaaaaataatttcttcagaaatgttcacttagattatctttcttagggtataaaccattcccagaaacgaagattcagaacatcgtgctcattcgaacaagaccagtcagcaattcagtatggccctctgcatatgcagcttgaatgagcacggggagagaagaacaagttcatcagggtcagccgtacttttacttagctgg

SEQ ID NO: 3491 - protein, 699 aa, Homo sapiens
MRLPWELLVLQSFILCLADDSTLHGPIFIQEPSPVMFPLDSEEKKVKLNCEVKGNPKPHIRWKLNGTDVDTGMDFRYSVVEGSLLINNPNKTQDAGTYQCTATNSFGTIVSREAKLQFAYLDNFKTRTRSTVSVRRGQGMVLLCGPPPHSGELSYAWIFNEYPSYQDNRRFVSQETGNLYIAKVEKSDVGNYTCVVTNTVTNHKVLGPPTPLILRNDGVMGEYEPKIEVQFPETVPTAKGATVKLECFALGNPVPTIIWRRADGKPIARKARRHKSNGILEIPNFQQEDAGLYECVAENSRGKNVARGQLTFYAQPNWIQKINDIHVAMEENVFWECKANGRPKPTYKWLKNGEPLLTRDRIQIEQGTLNITIVNLSDAGMYQCLAENKHGVIFSNAELSVIAVGPDFSRTLLKRVTLVKVGGEVVIECKPKASPKPVYTWKKGRDILKENERITISEDGNLRIINVTKSDAGSYTCIATNHFGTASSTGNLVVKDPTRVMVPPSSMDVTVGESIVLPCQVTHDHSLDIVFTWSFNGHLIDFDRDGDHFERVGGQDSAGDLMIRNIQLKHAGKYVCMVQTSVDRLSAAADLIVRGPPGPPEAVTIDEITDTTAQLSWRPGPDNHSPITMYVIQARTPFSVGWQAVSTVPELIDGKTFTATVVGLNPWVEYEFRTVAANVIGIGEPSRPSEKRRTEEARE

SEQ ID NO: 3492 - DNA, 3811 bp, Homo sapiens
aatctccatccctcccccgaaatctatcaacagctgtgtgagcctctgtgtatttttgaaaggttgaacacatttgatcggagaacaaacttgatttcctaatcaggttcgatgcgaggagagccagttagagatgtgtgtgattctcccagtgtgcgtctttgattcgtgtgctaattatgtcgatcctttggggaacacagccaggaagctgggtcctccttgatgaatgctggcggagagccatgcagcgcgcagcggagagcagttcagcatctctagtcccagctgagaatatggtcccattatctcccagctgcctaagcaatccataagggcctgttctgcgtggatgatcagtgtagtggaagcagggacttgctgagagctgaaatctctgtttgatttgctgtaacatgtaaagcgaaactgggacattttactttacagtctattaaaggttatacaaaacttaaaagaagcagcaattctattcgcttgttattggacttgaaactccctttgacctcggaaactgaagatgaggttgccatgggaactgctggtactgcaatcattcattttgtgccttgcaggttcacagactgacttctggtccttgctgggggtgctgccagccttggaggctgatgattccacactgcatggcccgatttttattcaagaaccaagtcctgtaatgttccctttggattctgaggagaaaaaagtgaagctcaattgtgaagttaaaggaaatccaaaacctcatatcaggtggaagttaaatggaacagatgttgacactggtatggatttccgctacagtgttgttgaagggagcttgttgatcaataaccccaataaaacccaagatgctggaacgtaccagtgcacagcgacaaactcgtttggaacaattgttagcagagaagcaaagcttcagtttgcttatcttgacaactttaaaacaagaacaagaagcactgtgtctgtccgtcgaggtcaaggaatggtgctactgtgtggcccgccaccccattctggagagctgagttatgcctggatcttcaatgaatacccttcctatcaggataatcgccgctttgtttctcaagagactgggaatctgtatattgccaaagtagaaaaatcagatgttgggaattatacctgtgtggttaccaataccgtgacaaaccacaaggtcctggggccacctacaccactaatattgagaaatgatggagtgatgggtgaatatgagcccaaaatagaagtgcagttcccagaaacagttccgactgcaaaaggagcaacggtgaagctggaatgctttgctttaggaaatccagtaccaactattatctggcgaagagctgatggaaagccaatagcaaggaaagccagaagacacaagtcaaatggaattcttgagatccctaattttcagcaggaggatgctggtttatatgaatgtgtagctgaaaattccagagggaaaaatgtagcaaggggacagctaactttctatgctcaacctaattggattcaaaaaataaatgatattcacgtggccatggaagaaaatgtcttttgggaatgtaaagcaaatggaaggcctaagcctacatacaagtggctaaaaaatggcgaacctctgctaactcgggatagaattcaaattgagcaaggaacactcaacataacaatagtgaacctctcagatgctggcatgtatcagtgtttggcagagaataaacatggagttatcttttccaacgcagagcttagtgttatagctgtaggtccagatttttcaagaacactcttgaaaagagtaactcttgtcaaagtgggaggtgaagttgtcattgagtgtaagccaaaagcgtctccaaaacctgtttacacctggaagaaaggaagggatatattaaaagaaaatgaaagaattaccatttctgaagatggaaacctcagaatcatcaacgttactaaatcagacgctgggagttatacctgtatagccactaaccattttggaactgctagcagtactggaaacttggtagtgaaagatccaacaagggtaatggtacccccttccagtatggatgtcactgttggagagagtattgttttaccgtgccaggtaacgcatgatcactcgctagacatcgtgtttacttggtcatttaatggacacctgatagactttgacagagatggggaccactttgaaagagttggagggcaggattcagctggtgatttgatgatccgaaacatccaactgaagcatgctgggaaatatgtctgcatggtccaaacaagtgtggacaggctatctgctgctgcagacctgattgtaagaggtcctccaggtcccccagaggctgtgacaatagacgaaatcacagataccactgctcagctctcctggagacccgggcctgacaaccacagccccatcaccatgtatgtcattcaagccaggactccattctccgtgggctggcaagcagtcagtacagtcccagaactcattgatgggaagacattcacagcgaccgtggtgggtttgaacccttgggttgaatatgaattccgcacagttgcagccaacgtgattgggattggggagcccagccgcccctcagagaaacggagaacagaagaagctctccccgaagtcacaccagcgaatgtcagtggtggcggaggcagcaaatctgaactggttataacctgggagacggtccctgaggaattacagaatggtcgaggctttggttatgtggtggccttccggccctacggtaaaatgatctggatgctgacagtgctggcctcagctgatgcctctagatacgtgttcaggaatgagagcgtgcaccccttctctccctttgaggttaaagtaggtgtcttcaacaacaaaggagaaggccctttcagtcccaccacggtggtgtattctgcagaagaagaacccaccaaaccaccagccagtatctttgccagaagtctttctgccacagatattgaagttttctgggcctccccactggagaagaatagaggacgaatacaaggttatgaggttaaatattggagacatgaagacaaagaagaaaatgctagaaaaatacgaacagttggaaatcagacatcaacaaaaatcacgaacttaaaaggcagtgtgctgtatcacttagctgtcaaggcatataattctgctgggacaggcccctctagtgcaacagtcaatgtgacaacccgaaagccaccaccaagtcaaccccccggaaacatcatatggaattcatcagactccaaaattatcctgaattgggatcaagtgaaggccctggataatgagtcggaagtaaaaggatacaaagtcttgtacagatggaacagacaaagcagcacatctgtcattgaaacaaataaaacatcggtggagctttctttgcctttcgatgaagattatataatagaaattaagccattcagcgacggaggagatggcagcagcagtgaacaaattcgaattccaaagatatcaaatgcctacgcgagaggatctggggcttccacttcgaatgcatgtacgctgtcagccatcagtacaataatgatttccctcacagctaggtccagtttatgacaaaagttatctgaaggacttgctgtttataatataagcaacatttagctagttgttttgaagacacccagtactaagtaatattgttgttcaagtacatcttattactggaataaaaatgttttttgcttcttt

SEQ ID NO: 3493 - protein, 1044 aa, Homo sapiens
MRLPWELLVLQSFILCLAGSQTDFWSLLGVLPALEADDSTLHGPIFIQEPSPVMFPLDSEEKKVKLNCEVKGNPKPHIRWKLNGTDVDTGMDFRYSVVEGSLLINNPNKTQDAGTYQCTATNSFGTIVSREAKLQFAYLDNFKTRTRSTVSVRRGQGMVLLCGPPPHSGELSYAWIFNEYPSYQDNRRFVSQETGNLYIAKVEKSDVGNYTCVVTNTVTNHKVLGPPTPLILRNDGVMGEYEPKIEVQFPETVPTAKGATVKLECFALGNPVPTIIWRRADGKPIARKARRHKSNGILEIPNFQQEDAGLYECVAENSRGKNVARGQLTFYAQPNWIQKINDIHVAMEENVFWECKANGRPKPTYKWLKNGEPLLTRDRIQIEQGTLNITIVNLSDAGMYQCLAENKHGVIFSNAELSVIAVGPDFSRTLLKRVTLVKVGGEVVIECKPKASPKPVYTWKKGRDILKENERITISEDGNLRIINVTKSDAGSYTCIATNHFGTASSTGNLVVKDPTRVMVPPSSMDVTVGESIVLPCQVTHDHSLDIVFTWSFNGHLIDFDRDGDHFERVGGQDSAGDLMIRNIQLKHAGKYVCMVQTSVDRLSAAADLIVRGPPGPPEAVTIDEITDTTAQLSWRPGPDNHSPITMYVIQARTPFSVGWQAVSTVPELIDGKTFTATVVGLNPWVEYEFRTVAANVIGIGEPSRPSEKRRTEEALPEVTPANVSGGGGSKSELVITWETVPEELQNGRGFGYVVAFRPYGKMIWMLTVLASADASRYVFRNESVHPFSPFEVKVGVFNNKGEGPFSPTTVVYSAEEEPTKPPASIFARSLSATDIEVFWASPLEKNRGRIQGYEVKYWRHEDKEENARKIRTVGNQTSTKITNLKGSVLYHLAVKAYNSAGTGPSSATVNVTTRKPPPSQPPGNIIWNSSDSKIILNWDQVKALDNESEVKGYKVLYRWNRQSSTSVIETNKTSVELSLPFDEDYIIEIKPFSDGGDGSSSEQIRIPKISNAYARGSGASTSNACTLSAISTIMISLTARSSL

SEQ ID NO: 3494 - DNA, 3757 bp, Homo sapiens
aatctccatccctcccccgaaatctatcaacagctgtgtgagcctctgtgtatttttgaaaggttgaacacatttgatcggagaacaaacttgatttcctaatcaggttcgatgcgaggagagccagttagagatgtgtgtgattctcccagtgtgcgtctttgattcgtgtgctaattatgtcgatcctttggggaacacagccaggaagctgggtcctccttgatgaatgctggcggagagccatgcagcgcgcagcggagagcagttcagcatctctagtcccagctgagaatatggtcccattatctcccagctgcctaagcaatccataagggcctgttctgcgtggatgatcagtgtagtggaagcagggacttgctgagagctgaaatctctgtttgatttgctgtaacatgtaaagcgaaactgggacattttactttacagtctattaaaggttatacaaaacttaaaagaagcagcaattctattcgcttgttattggacttgaaactccctttgacctcggaaactgaagatgaggttgccatgggaactgctggtactgcaatcattcattttgtgccttgcagatgattccacactgcatggcccgatttttattcaagaaccaagtcctgtaatgttccctttggattctgaggagaaaaaagtgaagctcaattgtgaagttaaaggaaatccaaaacctcatatcaggtggaagttaaatggaacagatgttgacactggtatggatttccgctacagtgttgttgaagggagcttgttgatcaataaccccaataaaacccaagatgctggaacgtaccagtgcacagcgacaaactcgtttggaacaattgttagcagagaagcaaagcttcagtttgcttatcttgacaactttaaaacaagaacaagaagcactgtgtctgtccgtcgaggtcaaggaatggtgctactgtgtggcccgccaccccattctggagagctgagttatgcctggatcttcaatgaatacccttcctatcaggataatcgccgctttgtttctcaagagactgggaatctgtatattgccaaagtagaaaaatcagatgttgggaattatacctgtgtggttaccaataccgtgacaaaccacaaggtcctggggccacctacaccactaatattgagaaatgatggagtgatgggtgaatatgagcccaaaatagaagtgcagttcccagaaacagttccgactgcaaaaggagcaacggtgaagctggaatgctttgctttaggaaatccagtaccaactattatctggcgaagagctgatggaaagccaatagcaaggaaagccagaagacacaagtcaaatggaattcttgagatccctaattttcagcaggaggatgctggtttatatgaatgtgtagctgaaaattccagagggaaaaatgtagcaaggggacagctaactttctatgctcaacctaattggattcaaaaaataaatgatattcacgtggccatggaagaaaatgtcttttgggaatgtaaagcaaatggaaggcctaagcctacatacaagtggctaaaaaatggcgaacctctgctaactcgggatagaattcaaattgagcaaggaacactcaacataacaatagtgaacctctcagatgctggcatgtatcagtgtttggcagagaataaacatggagttatcttttccaacgcagagcttagtgttatagctgtaggtccagatttttcaagaacactcttgaaaagagtaactcttgtcaaagtgggaggtgaagttgtcattgagtgtaagccaaaagcgtctccaaaacctgtttacacctggaagaaaggaagggatatattaaaagaaaatgaaagaattaccatttctgaagatggaaacctcagaatcatcaacgttactaaatcagacgctgggagttatacctgtatagccactaaccattttggaactgctagcagtactggaaacttggtagtgaaagatccaacaagggtaatggtacccccttccagtatggatgtcactgttggagagagtattgttttaccgtgccaggtaacgcatgatcactcgctagacatcgtgtttacttggtcatttaatggacacctgatagactttgacagagatggggaccactttgaaagagttggagggcaggattcagctggtgatttgatgatccgaaacatccaactgaagcatgctgggaaatatgtctgcatggtccaaacaagtgtggacaggctatctgctgctgcagacctgattgtaagaggtcctccaggtcccccagaggctgtgacaatagacgaaatcacagataccactgctcagctctcctggagacccgggcctgacaaccacagccccatcaccatgtatgtcattcaagccaggactccattctccgtgggctggcaagcagtcagtacagtcccagaactcattgatgggaagacattcacagcgaccgtggtgggtttgaacccttgggttgaatatgaattccgcacagttgcagccaacgtgattgggattggggagcccagccgcccctcagagaaacggagaacagaagaagctctccccgaagtcacaccagcgaatgtcagtggtggcggaggcagcaaatctgaactggttataacctgggagacggtccctgaggaattacagaatggtcgaggctttggttatgtggtggccttccggccctacggtaaaatgatctggatgctgacagtgctggcctcagctgatgcctctagatacgtgttcaggaatgagagcgtgcaccccttctctccctttgaggttaaagtaggtgtcttcaacaacaaaggagaaggccctttcagtcccaccacggtggtgtattctgcagaagaagaacccaccaaaccaccagccagtatctttgccagaagtctttctgccacagatattgaagttttctgggcctccccactggagaagaatagaggacgaatacaaggttatgaggttaaatattggagacatgaagacaaagaagaaaatgctagaaaaatacgaacagttggaaatcagacatcaacaaaaatcacgaacttaaaaggcagtgtgctgtatcacttagctgtcaaggcatataattctgctgggacaggcccctctagtgcaacagtcaatgtgacaacccgaaagccaccaccaagtcaaccccccggaaacatcatatggaattcatcagactccaaaattatcctgaattgggatcaagtgaaggccctggataatgagtcggaagtaaaaggatacaaagtcttgtacagatggaacagacaaagcagcacatctgtcattgaaacaaataaaacatcggtggagctttctttgcctttcgatgaagattatataatagaaattaagccattcagcgacggaggagatggcagcagcagtgaacaaattcgaattccaaagatatcaaatgcctacgcgagaggatctggggcttccacttcgaatgcatgtacgctgtcagccatcagtacaataatgatttccctcacagctaggtccagtttatgacaaaagttatctgaaggacttgctgtttataatataagcaacatttagctagttgttttgaagacacccagtactaagtaatattgttgttcaagtacatcttattactggaataaaaatgttttttgcttcttt

SEQ ID NO: 3495 - protein, 1026 aa, Homo sapiens; identical to SEQ ID NO: 317

SEQ ID NO: 3496 - DNA, 5524 bp, Homo sapiens
aatctccatccctcccccgaaatctatcaacagctgtgtgagcctctgtgtatttttgaaaggttgaacacatttgatcggagaacaaacttgatttcctaatcaggttcgatgcgaggagagccagttagagatgtgtgtgattctcccagtgtgcgtctttgattcgtgtgctaattatgtcgatcctttggggaacacagccaggaagctgggtcctccttgatgaatgctggcggagagccatgcagcgcgcagcggagagcagttcagcatctctagtcccagctgagaatatggtcccattatctcccagctgcctaagcaatccataagggcctgttctgcgtggatgatcagtgtagtggaagcagggacttgctgagagctgaaatctctgtttgatttgctgtaacatgtaaagcgaaactgggacattttactttacagtctattaaaggttatacaaaacttaaaagaagcagcaattctattcgcttgttattggacttgaaactccctttgacctcggaaactgaagatgaggttgccatgggaactgctggtactgcaatcattcattttgtgccttgcagatgattccacactgcatggcccgatttttattcaagaaccaagtcctgtaatgttccctttggattctgaggagaaaaaagtgaagctcaattgtgaagttaaaggaaatccaaaacctcatatcaggtggaagttaaatggaacagatgttgacactggtatggatttccgctacagtgttgttgaagggagcttgttgatcaataaccccaataaaacccaagatgctggaacgtaccagtgcacagcgacaaactcgtttggaacaattgttagcagagaagcaaagcttcagtttgcttatcttgacaactttaaaacaagaacaagaagcactgtgtctgtccgtcgaggtcaaggaatggtgctactgtgtggcccgccaccccattctggagagctgagttatgcctggatcttcaatgaatacccttcctatcaggataatcgccgctttgtttctcaagagactgggaatctgtatattgccaaagtagaaaaatcagatgttgggaattatacctgtgtggttaccaataccgtgacaaaccacaaggtcctggggccacctacaccactaatattgagaaatgatggagtgatgggtgaatatgagcccaaaatagaagtgcagttcccagaaacagttccgactgcaaaaggagcaacggtgaagctggaatgctttgctttaggaaatccagtaccaactattatctggcgaagagctgatggaaagccaatagcaaggaaagccagaagacacaagtcaaatggaattcttgagatccctaattttcagcaggaggatgctggtttatatgaatgtgtagctgaaaattccagagggaaaaatgtagcaaggggacagctaactttctatgctcaacctaattggattcaaaaaataaatgatattcacgtggccatggaagaaaatgtcttttgggaatgtaaagcaaatggaaggcctaagcctacatacaagtggctaaaaaatggcgaacctctgctaactcgggatagaattcaaattgagcaaggaacactcaacataacaatagtgaacctctcagatgctggcatgtatcagtgtttggcagagaataaacatggagttatcttttccaacgcagagcttagtgttatagctgtaggtccagatttttcaagaacactcttgaaaagagtaactcttgtcaaagtgggaggtgaagttgtcattgagtgtaagccaaaagcgtctccaaaacctgtttacacctggaagaaaggaagggatatattaaaagaaaatgaaagaattaccatttctgaagatggaaacctcagaatcatcaacgttactaaatcagacgctgggagttatacctgtatagccactaaccattttggaactgctagcagtactggaaacttggtagtgaaagatccaacaagggtaatggtacccccttccagtatggatgtcactgttggagagagtattgttttaccgtgccaggtaacgcatgatcactcgctagacatcgtgtttacttggtcatttaatggacacctgatagactttgacagagatggggaccactttgaaagagttggagggcaggattcagctggtgatttgatgatccgaaacatccaactgaagcatgctgggaaatatgtctgcatggtccaaacaagtgtggacaggctatctgctgctgcagacctgattgtaagaggtcctccaggtcccccagaggctgtgacaatagacgaaatcacagataccactgctcagctctcctggagacccgggcctgacaaccacagccccatcaccatgtatgtcattcaagccaggactccattctccgtgggctggcaagcagtcagtacagtcccagaactcattgatgggaagacattcacagcgaccgtggtgggtttgaacccttgggttgaatatgaattccgcacagttgcagccaacgtgattgggattggggagcccagccgcccctcagagaaacggagaacagaagaagctctccccgaagtcacaccagcgaatgtcagtggtggcggaggcagcaaatctgaactggttataacctgggagacggtccctgaggaattacagaatggtcgaggctttggttatgtggtggccttccggccctacggtaaaatgatctggatgctgacagtgctggcctcagctgatgcctctagatacgtgttcaggaatgagagcgtgcaccccttctctccctttgaggttaaagtaggtgtcttcaacaacaaaggagaaggccctttcagtcccaccacggtggtgtattctgcagaagaagaacccaccaaaccaccagccagtatctttgccagaagtctttctgccacagatattgaagttttctgggcctccccactggagaagaatagaggacgaatacaaggttatgaggttaaatattggagacatgaagacaaagaagaaaatgctagaaaaatacgaacagttggaaatcagacatcaacaaaaatcacgaacttaaaaggcagtgtgctgtatcacttagctgtcaaggcatataattctgctgggacaggcccctctagtgcaacagtcaatgtgacaacccgaaagccaccaccaagtcaaccccccggaaacatcatatggaattcatcagactccaaaattatcctgaattgggatcaagtgaaggccctggataatgagtcggaagtaaaaggatacaaagtcttgtacagatggaacagacaaagcagcacatctgtcattgaaacaaataaaacatcggtggagctttctttgcctttcgatgaagattatataatagaaattaagccattcagcgacggaggagatggcagcagcagtgaacaaattcgaattccaaagatatcaaatgcctacgcgagaggatctggggcttccacttcgaatgcatgtacgctgtcagccatcagtacaataatgatttccctcacagctaggtccagtttatgacaaaagttatctgaaggacttgctgtttataatataagcaacatttagctagttgttttgaagacacccagtactaagtaatattgttgttcaagtacatcttattactggaataaaaatgttttttgcttctttaggaatggcattatacagtacttcctcaaagcaaatctagctttgtctgaagtttctttggaaactctgcaatgcactgaagacatctgtaatatgatgttaccaaagcagtttacatatgtccttatatgccctcggctgtaaaatgctatgggcaacacaatcatgcaattataatttgaaaatatttcctttaaagacagagtttgaaactcatcttggtaaataaattgcaaattactcgtacagttttacaaggatctcatggcagaacagcggaagacttggtccgtaactcaaggctgttgtatgcaaactactcttctagtggttaatgcacttgacatgtacagtatgtttcccatgccgttgtgattttgacatgtacagtatgttttcatgccgttgtgaattttgttgttcaacccaacttgagatggtttcaggaatggctgcaatctcaaaagctcaatgtactgcccaagaggcaccttgtgcaatattcccatccctgaatttagcattgtacaggaagattttcttttcactcaactgagttagcattgtctttgtggtagcattatcttagacattaaatttgaagtaacatatatcctgtagtaacatagacccaaagttactatagtcaaccaagtctttcaaaggataaaagatcattttattatctttaactgtatctattttgaatgtaaatttaaaaaaagtaattctctgtcaatggattcgtaatttctttacaaaatttcttatatataatatgtgtatctctgtaataatagagcccttcttttgaatcaaaattacatatggactttggaagattgctcctatttcaacaaatagttgctgcaagaatttttaatatgactctataaaagctctttagtacaattgtatggtttcttgatgattctgttttgcaataggtagcctagttgctttatatgctttaccttctaggtcttaaaatcacacattggaaaatgacaatatcaacaaaactgtattcttatgaaaagaactatttgttacaatgagaaaggttttgtgagtaaaccctactggacagtgacataaaaggcaatggaattttctataaacattttctcatgtaaacatgctgccaccttttcttctttctcagagaactcaaatttgctatagtttgtcatttttgcttacaaataatataacttttcaaccttctagttatatttatccaataaagtcataatcgggattccatttgtgtaaaaactagggtggtaaccggaaaaaaatattgtcagtatttcaagctgtgttcctttcttagtttgatatggttacttctatgttgaaataaaatttaaaatcacatgcaaaaaaaaaatcagcaaaataataaaatgaacgaaaaaaaatgacacccagggagttcccaaccccagtgtaaatgatatttaccagtgatctagcatatgtaatcttttttaaaggtattgttaataaatattctgtcatttgtaaagatacttgtctttcgggagcatttttcctgcctgcctgtcagggaatttgttagcttacctttgtgctagttataatttgggatcatagagggactcaaaagtctctacccaaatctagatgacccagagcttttcctttggaattgacaaccctgaagcaccatttcaaatcctctttggaagtagagagggtcctaatccacaagtaaatgtcctgaagatgagacttgaatat

SEQ ID NO: 3497 - protein, 1026 aa, Homo sapiens; identical to SEQ ID NO: 317

SEQ ID NO: 3498 - DNA, 3653 bp, Homo sapiens
gacattttactttacagtctgtaagtaccaggttttacccccctctttctccctacagctccatgtgaatgtgactttgcaagctgcatttgattttctgttccattgctctttgttgaatcaagctggtgaggtagagtgtgatctgtttagagcttgctgtttctgttaaatctcttatataattgattcatacaaggaaataggagcctttcagaatgcttttatagaaattagaaattattggctttgtttttaatttgggagtgtggttgcattatctttggtgccaggatgattagagcatatatttatcttcttctgtacctctggccattgcaagaaaaatattaaaggttatacaaaacttaaaagaagcagcaattctattcgcttgttattggacttgaaactccctttgacctcggaaactgaagatgaggttgccatgggaactgctggtactgcaatcattcattttgtgccttgcagatgattccacactgcatggcccgatttttattcaagaaccaagtcctgtaatgttccctttggattctgaggagaaaaaagtgaagctcaattgtgaagttaaaggaaatccaaaacctcatatcaggtggaagttaaatggaacagatgttgacactggtatggatttccgctacagtgttgttgaagggagcttgttgatcaataaccccaataaaacccaagatgctggaacgtaccagtgcacagcgacaaactcgtttggaacaattgttagcagagaagcaaagcttcagtttgcttatcttgacaactttaaaacaagaacaagaagcactgtgtctgtccgtcgaggtcaaggaatggtgctactgtgtggcccgccaccccattctggagagctgagttatgcctggatcttcaatgaatacccttcctatcaggataatcgccgctttgtttctcaagagactgggaatctgtatattgccaaagtagaaaaatcagatgttgggaattatacctgtgtggttaccaataccgtgacaaaccacaaggtcctggggccacctacaccactaatattgagaaatgatggagtgatgggtgaatatgagcccaaaatagaagtgcagttcccagaaacagttccgactgcaaaaggagcaacggtgaagctggaatgctttgctttaggaaatccagtaccaactattatctggcgaagagctgatggaaagccaatagcaaggaaagccagaagacacaagtcaaatggaattcttgagatccctaattttcagcaggaggatgctggtttatatgaatgtgtagctgaaaattccagagggaaaaatgtagcaaggggacagctaactttctatgctcaacctaattggattcaaaaaataaatgatattcacgtggccatggaagaaaatgtcttttgggaatgtaaagcaaatggaaggcctaagcctacatacaagtggctaaaaaatggcgaacctctgctaactcgggatagaattcaaattgagcaaggaacactcaacataacaatagtgaacctctcagatgctggcatgtatcagtgtttggcagagaataaacatggagttatcttttccaacgcagagcttagtgttatagctgtaggtccagatttttcaagaacactcttgaaaagagtaactcttgtcaaagtgggaggtgaagttgtcattgagtgtaagccaaaagcgtctccaaaacctgtttacacctggaagaaaggaagggatatattaaaagaaaatgaaagaattaccatttctgaagatggaaacctcagaatcatcaacgttactaaatcagacgctgggagttatacctgtatagccactaaccattttggaactgctagcagtactggaaacttggtagtgaaagatccaacaagggtaatggtacccccttccagtatggatgtcactgttggagagagtattgttttaccgtgccaggtaacgcatgatcactcgctagacatcgtgtttacttggtcatttaatggacacctgatagactttgacagagatggggaccactttgaaagagttggagggcaggattcagctggtgatttgatgatccgaaacatccaactgaagcatgctgggaaatatgtctgcatggtccaaacaagtgtggacaggctatctgctgctgcagacctgattgtaagaggtcctccaggtcccccagaggctgtgacaatagacgaaatcacagataccactgctcagctctcctggagacccgggcctgacaaccacagccccatcaccatgtatgtcattcaagccaggactccattctccgtgggctggcaagcagtcagtacagtcccagaactcattgatgggaagacattcacagcgaccgtggtgggtttgaacccttgggttgaatatgaattccgcacagttgcagccaacgtgattgggattggggagcccagccgcccctcagagaaacggagaacagaagaagctctccccgaagtcacaccagcgaatgtcagtggtggcggaggcagcaaatctgaactggttataacctgggagacggtccctgaggaattacagaatggtcgaggctttggttatgtggtggccttccggccctacggtaaaatgatctggatgctgacagtgctggcctcagctgatgcctctagatacgtgttcaggaatgagagcgtgcaccccttctctccctttgaggttaaagtaggtgtcttcaacaacaaaggagaaggccctttcagtcccaccacggtggtgtattctgcagaagaagaacccaccaaaccaccagccagtatctttgccagaagtctttctgccacagatattgaagttttctgggcctccccactggagaagaatagaggacgaatacaaggttatgaggttaaatattggagacatgaagacaaagaagaaaatgctagaaaaatacgaacagttggaaatcagacatcaacaaaaatcacgaacttaaaaggcagtgtgctgtatcacttagctgtcaaggcatataattctgctgggacaggcccctctagtgcaacagtcaatgtgacaacccgaaagccaccaccaagtcaaccccccggaaacatcatatggaattcatcagactccaaaattatcctgaattgggatcaagtgaaggccctggataatgagtcggaagtaaaaggatacaaagtcttgtacagatggaacagacaaagcagcacatctgtcattgaaacaaataaaacatcggtggagctttctttgcctttcgatgaagattatataatagaaattaagccattcagcgacggaggagatggcagcagcagtgaacaaattcgaattccaaagatatcaaatgcctacgcgagaggatctggggcttccacttcgaatgcatgtacgctgtcagccatcagtacaataatgatttccctcacagctaggtccagtttatgacaaaagttatctgaaggacttgctgtttataatataagcaacatttagctagttgttttgaagacacccagtactaagtaatattgttgttcaagtacatcttattactggaataaaaatgttttttgcttcttt

SEQ ID NO: 3499 - protein, 1026 aa, Homo sapiens; identical to SEQ ID NO: 317

SEQ ID NO: 3500 - DNA, 5420 bp, Homo sapiens
gacattttactttacagtctgtaagtaccaggttttacccccctctttctccctacagctccatgtgaatgtgactttgcaagctgcatttgattttctgttccattgctctttgttgaatcaagctggtgaggtagagtgtgatctgtttagagcttgctgtttctgttaaatctcttatataattgattcatacaaggaaataggagcctttcagaatgcttttatagaaattagaaattattggctttgtttttaatttgggagtgtggttgcattatctttggtgccaggatgattagagcatatatttatcttcttctgtacctctggccattgcaagaaaaatattaaaggttatacaaaacttaaaagaagcagcaattctattcgcttgttattggacttgaaactccctttgacctcggaaactgaagatgaggttgccatgggaactgctggtactgcaatcattcattttgtgccttgcagatgattccacactgcatggcccgatttttattcaagaaccaagtcctgtaatgttccctttggattctgaggagaaaaaagtgaagctcaattgtgaagttaaaggaaatccaaaacctcatatcaggtggaagttaaatggaacagatgttgacactggtatggatttccgctacagtgttgttgaagggagcttgttgatcaataaccccaataaaacccaagatgctggaacgtaccagtgcacagcgacaaactcgtttggaacaattgttagcagagaagcaaagcttcagtttgcttatcttgacaactttaaaacaagaacaagaagcactgtgtctgtccgtcgaggtcaaggaatggtgctactgtgtggcccgccaccccattctggagagctgagttatgcctggatcttcaatgaatacccttcctatcaggataatcgccgctttgtttctcaagagactgggaatctgtatattgccaaagtagaaaaatcagatgttgggaattatacctgtgtggttaccaataccgtgacaaaccacaaggtcctggggccacctacaccactaatattgagaaatgatggagtgatgggtgaatatgagcccaaaatagaagtgcagttcccagaaacagttccgactgcaaaaggagcaacggtgaagctggaatgctttgctttaggaaatccagtaccaactattatctggcgaagagctgatggaaagccaatagcaaggaaagccagaagacacaagtcaaatggaattcttgagatccctaattttcagcaggaggatgctggtttatatgaatgtgtagctgaaaattccagagggaaaaatgtagcaaggggacagctaactttctatgctcaacctaattggattcaaaaaataaatgatattcacgtggccatggaagaaaatgtcttttgggaatgtaaagcaaatggaaggcctaagcctacatacaagtggctaaaaaatggcgaacctctgctaactcgggatagaattcaaattgagcaaggaacactcaacataacaatagtgaacctctcagatgctggcatgtatcagtgtttggcagagaataaacatggagttatcttttccaacgcagagcttagtgttatagctgtaggtccagatttttcaagaacactcttgaaaagagtaactcttgtcaaagtgggaggtgaagttgtcattgagtgtaagccaaaagcgtctccaaaacctgtttacacctggaagaaaggaagggatatattaaaagaaaatgaaagaattaccatttctgaagatggaaacctcagaatcatcaacgttactaaatcagacgctgggagttatacctgtatagccactaaccattttggaactgctagcagtactggaaacttggtagtgaaagatccaacaagggtaatggtacccccttccagtatggatgtcactgttggagagagtattgttttaccgtgccaggtaacgcatgatcactcgctagacatcgtgtttacttggtcatttaatggacacctgatagactttgacagagatggggaccactttgaaagagttggagggcaggattcagctggtgatttgatgatccgaaacatccaactgaagcatgctgggaaatatgtctgcatggtccaaacaagtgtggacaggctatctgctgctgcagacctgattgtaagaggtcctccaggtcccccagaggctgtgacaatagacgaaatcacagataccactgctcagctctcctggagacccgggcctgacaaccacagccccatcaccatgtatgtcattcaagccaggactccattctccgtgggctggcaagcagtcagtacagtcccagaactcattgatgggaagacattcacagcgaccgtggtgggtttgaacccttgggttgaatatgaattccgcacagttgcagccaacgtgattgggattggggagcccagccgcccctcagagaaacggagaacagaagaagctctccccgaagtcacaccagcgaatgtcagtggtggcggaggcagcaaatctgaactggttataacctgggagacggtccctgaggaattacagaatggtcgaggctttggttatgtggtggccttccggccctacggtaaaatgatctggatgctgacagtgctggcctcagctgatgcctctagatacgtgttcaggaatgagagcgtgcaccccttctctccctttgaggttaaagtaggtgtcttcaacaacaaaggagaaggccctttcagtcccaccacggtggtgtattctgcagaagaagaacccaccaaaccaccagccagtatctttgccagaagtctttctgccacagatattgaagttttctgggcctccccactggagaagaatagaggacgaatacaaggttatgaggttaaatattggagacatgaagacaaagaagaaaatgctagaaaaatacgaacagttggaaatcagacatcaacaaaaatcacgaacttaaaaggcagtgtgctgtatcacttagctgtcaaggcatataattctgctgggacaggcccctctagtgcaacagtcaatgtgacaacccgaaagccaccaccaagtcaaccccccggaaacatcatatggaattcatcagactccaaaattatcctgaattgggatcaagtgaaggccctggataatgagtcggaagtaaaaggatacaaagtcttgtacagatggaacagacaaagcagcacatctgtcattgaaacaaataaaacatcggtggagctttctttgcctttcgatgaagattatataatagaaattaagccattcagcgacggaggagatggcagcagcagtgaacaaattcgaattccaaagatatcaaatgcctacgcgagaggatctggggcttccacttcgaatgcatgtacgctgtcagccatcagtacaataatgatttccctcacagctaggtccagtttatgacaaaagttatctgaaggacttgctgtttataatataagcaacatttagctagttgttttgaagacacccagtactaagtaatattgttgttcaagtacatcttattactggaataaaaatgttttttgcttctttaggaatggcattatacagtacttcctcaaagcaaatctagctttgtctgaagtttctttggaaactctgcaatgcactgaagacatctgtaatatgatgttaccaaagcagtttacatatgtccttatatgccctcggctgtaaaatgctatgggcaacacaatcatgcaattataatttgaaaatatttcctttaaagacagagtttgaaactcatcttggtaaataaattgcaaattactcgtacagttttacaaggatctcatggcagaacagcggaagacttggtccgtaactcaaggctgttgtatgcaaactactcttctagtggttaatgcacttgacatgtacagtatgtttcccatgccgttgtgattttgacatgtacagtatgttttcatgccgttgtgaattttgttgttcaacccaacttgagatggtttcaggaatggctgcaatctcaaaagctcaatgtactgcccaagaggcaccttgtgcaatattcccatccctgaatttagcattgtacaggaagattttcttttcactcaactgagttagcattgtctttgtggtagcattatcttagacattaaatttgaagtaacatatatcctgtagtaacatagacccaaagttactatagtcaaccaagtctttcaaaggataaaagatcattttattatctttaactgtatctattttgaatgtaaatttaaaaaaagtaattctctgtcaatggattcgtaatttctttacaaaatttcttatatataatatgtgtatctctgtaataatagagcccttcttttgaatcaaaattacatatggactttggaagattgctcctatttcaacaaatagttgctgcaagaatttttaatatgactctataaaagctctttagtacaattgtatggtttcttgatgattctgttttgcaataggtagcctagttgctttatatgctttaccttctaggtcttaaaatcacacattggaaaatgacaatatcaacaaaactgtattcttatgaaaagaactatttgttacaatgagaaaggttttgtgagtaaaccctactggacagtgacataaaaggcaatggaattttctataaacattttctcatgtaaacatgctgccaccttttcttctttctcagagaactcaaatttgctatagtttgtcatttttgcttacaaataatataacttttcaaccttctagttatatttatccaataaagtcataatcgggattccatttgtgtaaaaactagggtggtaaccggaaaaaaatattgtcagtatttcaagctgtgttcctttcttagtttgatatggttacttctatgttgaaataaaatttaaaatcacatgcaaaaaaaaaatcagcaaaataataaaatgaacgaaaaaaaatgacacccagggagttcccaaccccagtgtaaatgatatttaccagtgatctagcatatgtaatcttttttaaaggtattgttaataaatattctgtcatttgtaaagatacttgtctttcgggagcatttttcctgcctgcctgtcagggaatttgttagcttacctttgtgctagttataatttgggatcatagagggactcaaaagtctctacccaaatctagatgacccagagcttttcctttggaattgacaaccctgaagcaccatttcaaatcctctttggaagtagagagggtcctaatccacaagtaaatgtcctgaagatgagacttgaatat

SEQ ID NO: 3501 - protein, 1026 aa, Homo sapiens; identical to SEQ ID NO: 317

SEQ ID NO: 3502 - DNA, 2841 bp, Homo sapiens
gagcattactcaatacatgttacatagtgcctgacacctgattagcaaactataaatgcttagcccttgacttaaagagagctgagttatgcctggatcttcaatgaatacccttcctatcaggataatcgccgctttgtttctcaagagactgggaatctgtatattgccaaagtagaaaaatcagatgttgggaattatacctgtgtggttaccaataccgtgacaaaccacaaggtcctggggccacctacaccactaatattgagaaatgatggagtgatgggtgaatatgagcccaaaatagaagtgcagttcccagaaacagttccgactgcaaaaggagcaacggtgaagctggaatgctttgctttaggaaatccagtaccaactattatctggcgaagagctgatggaaagccaatagcaaggaaagccagaagacacaagtcaaatggaattcttgagatccctaattttcagcaggaggatgctggtttatatgaatgtgtagctgaaaattccagagggaaaaatgtagcaaggggacagctaactttctatgctcaacctaattggattcaaaaaataaatgatattcacgtggccatggaagaaaatgtcttttgggaatgtaaagcaaatggaaggcctaagcctacatacaagtggctaaaaaatggcgaacctctgctaactcgggatagaattcaaattgagcaaggaacactcaacataacaatagtgaacctctcagatgctggcatgtatcagtgtttggcagagaataaacatggagttatcttttccaacgcagagcttagtgttatagctgtaggtccagatttttcaagaacactcttgaaaagagtaactcttgtcaaagtgggaggtgaagttgtcattgagtgtaagccaaaagcgtctccaaaacctgtttacacctggaagaaaggaagggatatattaaaagaaaatgaaagaattaccatttctgaagatggaaacctcagaatcatcaacgttactaaatcagacgctgggagttatacctgtatagccactaaccattttggaactgctagcagtactggaaacttggtagtgaaagatccaacaagggtaatggtacccccttccagtatggatgtcactgttggagagagtattgttttaccgtgccaggtaacgcatgatcactcgctagacatcgtgtttacttggtcatttaatggacacctgatagactttgacagagatggggaccactttgaaagagttggagggcaggattcagctggtgatttgatgatccgaaacatccaactgaagcatgctgggaaatatgtctgcatggtccaaacaagtgtggacaggctatctgctgctgcagacctgattgtaagaggtcctccaggtcccccagaggctgtgacaatagacgaaatcacagataccactgctcagctctcctggagacccgggcctgacaaccacagccccatcaccatgtatgtcattcaagccaggactccattctccgtgggctggcaagcagtcagtacagtcccagaactcattgatgggaagacattcacagcgaccgtggtgggtttgaacccttgggttgaatatgaattccgcacagttgcagccaacgtgattgggattggggagcccagccgcccctcagagaaacggagaacagaagaagctctccccgaagtcacaccagcgaatgtcagtggtggcggaggcagcaaatctgaactggttataacctgggagacggtccctgaggaattacagaatggtcgaggctttggttatgtggtggccttccggccctacggtaaaatgatctggatgctgacagtgctggcctcagctgatgcctctagatacgtgttcaggaatgagagcgtgcaccccttctctccctttgaggttaaagtaggtgtcttcaacaacaaaggagaaggccctttcagtcccaccacggtggtgtattctgcagaagaagaacccaccaaaccaccagccagtatctttgccagaagtctttctgccacagatattgaagttttctgggcctccccactggagaagaatagaggacgaatacaaggttatgaggttaaatattggagacatgaagacaaagaagaaaatgctagaaaaatacgaacagttggaaatcagacatcaacaaaaatcacgaacttaaaaggcagtgtgctgtatcacttagctgtcaaggcatataattctgctgggacaggcccctctagtgcaacagtcaatgtgacaacccgaaagccaccaccaagtcaaccccccggaaacatcatatggaattcatcagactccaaaattatcctgaattgggatcaagtgaaggccctggataatgagtcggaagtaaaaggatacaaagtcttgtacagatggaacagacaaagcagcacatctgtcattgaaacaaataaaacatcggtggagctttctttgcctttcgatgaagattatataatagaaattaagccattcagcgacggaggagatggcagcagcagtgaacaaattcgaattccaaagatatcaaatgcctacgcgagaggatctggggcttccacttcgaatgcatgtacgctgtcagccatcagtacaataatgatttccctcacagctaggtccagtttatgacaaaagttatctgaaggacttgctgtttataatataagcaacatttagctagttgttttgaagacacccagtactaagtaatattgttgttcaagtacatcttattactggaataaaaatgttttttgcttcttt

SEQ ID NO: 3503 - protein, 807 aa, Homo sapiens
MGEYEPKIEVQFPETVPTAKGATVKLECFALGNPVPTIIWRRADGKPIARKARRHKSNGILEIPNFQQEDAGLYECVAENSRGKNVARGQLTFYAQPNWIQKINDIHVAMEENVFWECKANGRPKPTYKWLKNGEPLLTRDRIQIEQGTLNITIVNLSDAGMYQCLAENKHGVIFSNAELSVIAVGPDFSRTLLKRVTLVKVGGEVVIECKPKASPKPVYTWKKGRDILKENERITISEDGNLRIINVTKSDAGSYTCIATNHFGTASSTGNLVVKDPTRVMVPPSSMDVTVGESIVLPCQVTHDHSLDIVFTWSFNGHLIDFDRDGDHFERVGGQDSAGDLMIRNIQLKHAGKYVCMVQTSVDRLSAAADLIVRGPPGPPEAVTIDEITDTTAQLSWRPGPDNHSPITMYVIQARTPFSVGWQAVSTVPELIDGKTFTATVVGLNPWVEYEFRTVAANVIGIGEPSRPSEKRRTEEALPEVTPANVSGGGGSKSELVITWETVPEELQNGRGFGYVVAFRPYGKMIWMLTVLASADASRYVFRNESVHPFSPFEVKVGVFNNKGEGPFSPTTVVYSAEEEPTKPPASIFARSLSATDIEVFWASPLEKNRGRIQGYEVKYWRHEDKEENARKIRTVGNQTSTKITNLKGSVLYHLAVKAYNSAGTGPSSATVNVTTRKPPPSQPPGNIIWNSSDSKIILNWDQVKALDNESEVKGYKVLYRWNRQSSTSVIETNKTSVELSLPFDEDYIIEIKPFSDGGDGSSSEQIRIPKISNAYARGSGASTSNACTLSAISTIMISLTARSSL

SEQ ID NO: 3504 - DNA, 3782 bp, Homo sapiens
gagcattactcaatacatgttacatagtgcctgacacctgattagcaaactataaatgcttagcccttgacttaaagagagctgagttatgcctggatcttcaatgaatacccttcctatcaggataatcgccgctttgtttctcaagagactgggaatctgtatattgccaaagtagaaaaatcagatgttgggaattatacctgtgtggttaccaataccgtgacaaaccacaaggtcctggggccacctacaccactaatattgagaaatgatggagtgatgggtgaatatgagcccaaaatagaagtgcagttcccagaaacagttccgactgcaaaaggagcaacggtgaagctggaatgctttgctttaggaaatccagtaccaactattatctggcgaagagctgatggaaagccaatagcaaggaaagccagaagacacaagtcaaatggaattcttgagatccctaattttcagcaggaggatgctggtttatatgaatgtgtagctgaaaattccagagggaaaaatgtagcaaggggacagctaactttctatgctcaacctaattggattcaaaaaataaatgatattcacgtggccatggaagaaaatgtcttttgggaatgtaaagcaaatggaaggcctaagcctacatacaagtggctaaaaaatggcgaacctctgctaactcgggatagaattcaaattgagcaaggaacactcaacataacaatagtgaacctctcagatgctggcatgtatcagtgtttggcagagaataaacatggagttatcttttccaacgcagagcttagtgttatagctgtaggtccagatttttcaagaacactcttgaaaagagtaactcttgtcaaagtgggaggtgaagttgtcattgagtgtaagccaaaagcgtctccaaaacctgtttacacctggaagaaaggaagggatatattaaaagaaaatgaaagaattaccatttctgaagatggaaacctcagaatcatcaacgttactaaatcagacgctgggagttatacctgtatagccactaaccattttggaactgctagcagtactggaaacttggtagtgaaagatccaacaagggtaatggtacccccttccagtatggatgtcactgttggagagagtattgttttaccgtgccaggtaacgcatgatcactcgctagacatcgtgtttacttggtcatttaatggacacctgatagactttgacagagatggggaccactttgaaagagttggagggcaggattcagctggtgatttgatgatccgaaacatccaactgaagcatgctgggaaatatgtctgcatggtccaaacaagtgtggacaggctatctgctgctgcagacctgattgtaagaggtcctccaggtcccccagaggctgtgacaatagacgaaatcacagataccactgctcagctctcctggagacccgggcctgacaaccacagccccatcaccatgtatgtcattcaagccaggactccattctccgtgggctggcaagcagtcagtacagtcccagaactcattgatgggaagacattcacagcgaccgtggtgggtttgaacccttgggttgaatatgaattccgcacagttgcagccaacgtgattgggattggggagcccagccgcccctcagagaaacggagaacagaagaagctctccccgaagtcacaccagcgaatgtcagtggtggcggaggcagcaaatctgaactggttataacctgggagacggtccctgaggaattacagaatggtcgaggctttggttatgtggtggccttccggccctacggtaaaatgatctggatgctgacagtgctggcctcagctgatgcctctagatacgtgttcaggaatgagagcgtgcaccccttctctccctttgaggttaaagtaggtgtcttcaacaacaaaggagaaggccctttcagtcccaccacggtggtgtattctgcagaagaagaacccaccaaaccaccagccagtatctttgccagaagtctttctgccacagatattgaagttttctgggcctccccactggagaagaatagaggacgaatacaaggttatgaggttaaatattggagacatgaagacaaagaagaaaatgctagaaaaatacgaacagttggaaatcagacatcaacaaaaatcacgaacttaaaaggcagtgtgctgtatcacttagctgtcaaggcatataattctgctgggacaggcccctctagtgcaacagtcaatgtgacaacccgaaagccaccaccaagtcaaccccccggaaacatcatatggaattcatcagactccaaaattatcctgaattgggatcaagtgaaggccctggataatgagtcggaagtaaaaggatacaaagtcttgtacagatggaacagacaaagcagcacatctgtcattgaaacaaataaaacatcggtggagctttctttgcctttcgatgaagattatataatagaaattaagccattcagcgacggaggagatggcagcagcagtgaacaaattcgaattccaaagatatcaaatgcctacgcgagaggatctggggcttccacttcgaatgcatgtacgctgtcagccatcagtacaataatgatttccctcacagctaggtccagtttatgacaaaagttatctgaaggacttgctgtttataatataagcaacatttagctagttgttttgaagacacccagtactaagtaatattgttgttcaagtacatcttattactggaataaaaatgttttttgcttctttaggaatggcattatacagtacttcctcaaagcaaatctagctttgtctgaagtttctttggaaactctgcaatgcactgaagacatctgtaatatgatgttaccaaagcagtttacatatgtccttatatgcatattttttattatatatttagtgttttatagaattttttaaagttaacatataatgtagatattaattttttcctcggctgtaaaatgctatgggcaacacaatcatgcaattataatttgaaaatatttcctttaaagacagagtttgaaactcatcttggtaaataaattgcaaattactcgtacagttttacaaggatctcatggcagaacagcggaagacttggtccgtaactcaaggctgttgtatgcaaactactcttctagtggttaatgcacttgacatgtacagtatgtttcccatgccgttgtgattttgacatgtacagtatgttttcatgccgttgtgaattttgttgttcaacccaacttgagatggtttcaggaatggctgcaatctcaaaagctcaatgtactgcccaagaggcaccttgtgcaatattcccatccctgaatttagcattgtacaggaagattttcttttcactcaactgagttagcattgtctttgtggtagcattatcttagacattaaatttgaagtaacatatatcctgtagtaacatagacccaaagttactatagtcaaccaagtctttcaaaggataaaagatcattttattatctttaactgtatctattttgaatgtaaatttaaaaaaagtaattctctgtcaatggattcgtaatttctttacaaaatttcttatatataatatgtgtatctctgtaataatagagcccttcttttgaatcaaaattacatatggactttggaagattgctcctatttcaacaaatagttgc

SEQ ID NO: 3505 - protein, 807 aa, Homo sapiens; identical to SEQ ID NO: 3503

SEQ ID NO: 3506 - DNA, 565 bp, Homo sapiens
taagcatgcaggtatttttgagtacttttattaataaatcttacaaatttttctgcagtatacttccaaagagataatttaattttcctgatgactagcacttcatccccttctcctttttttccttaagactaccttaaaacaatacttttgaggggcaaagttgtatgcatggagaatttaatccaggcaaatggtgtggttctgcgacacaaatttttctgtagcagtaactgggagaagagccacaattcatgactgctggagataggacctgctttaaatgaaggaattaattgtgcacataatgatgtgtataagcattctgcattaacagaaaaatgagttttacattttatacattttaaaagaatctccaagacttagcccctttatttattcacaggagtgatgggtgaatatgagcccaaaatagaagtgcagttcccagaaacagttccgactgcaaaaggagcaacggtgaagctggaatgctttgctttaggaaatccagtaccaactattatctggcgaagagctgatggaaagccaatagcaaggaaag

SEQ ID NO: 3507 - protein, 50 aa, Homo sapiens
MGEYEPKIEVQFPETVPTAKGATVKLECFALGNPVPTIIWRRADGKPIAR

SEQ ID NO: 3508 - DNA, 1012 bp, Homo sapiens
cacacccagatgccaacgctgaggtgccgtgtgtctactataaggcggaagacaccaacaaaaatgatttaaatataagcattttcttctttgtcttcatgtctccaatatttaacctaagaagataaacagaaagaccttggaaaccatacccaatggggatatttgcaatgtcatcagatgttttaacatggtcccattctgagcatcatctttaaaacaacatagacgaactccaaaggtaacgaagactgtgtgagaggcatcccgagagcagggatagcatggaggtatgccttcaagatacatgtaccatgcgaaattgattgtacgtgctacaatccacattttagaattgaagaaatattaacagtcaatgatctaggcagcataaacgataccttcttctgcagaatacaccaccgtggtgggactgaaagggccttctcctttgttgttgaagacacctactttaacctcaaagggagagaaggggtgcacgctctcattcctgaacacgtatctagaggcatcagctgaggccagcactgtcagcatccagatcattttaccgtagggccggaaggccaccacataaccaaagcctcgaccattctgtaattcctcagggaccgtctgggaaagaaggaaggtggtcttcagaaatcacagtagtttcactcaaatgcaaaaatcgtttttgtttcccttgtaacattcttgtctacatccttctccacccatcttatttggcgttttgttaacagtcttttaaatttagggcttgcagtcagtctatcttaaacagttatgatgtactggacagggttgaaaacgtaatgaggatctgcagtccagagcttgctctttgatggggcagacccagctctgaaatggttggaaatgattgtaaaaaaaaaaacactggacatcggtctcctgaaaaaccacatttccaacacgtatcctctaatactaatcttcttccattgccaaatagacaaaagatctc

SEQ ID NO: 3509 - protein, 38 aa, Homo sapiens
MVGNDCKKKNTGHRSPEKPHFQHVSSNTNLLPLPNRQK

SEQ ID NO: 3510 - DNA, 2514 bp, Homo sapiens
aaacaaaacagaaatgcaacgctttagagtacccacggaaaacttgtttaccttgtcaccatgagtaaaagttaattcccactcctgaagagagcaaaccaactctgaaagagagtgaaaatgcagacaagacagttatcagataatggctatctggacgagagattctttcgtttgacagcagtttggttgttgggagttccagttcagctcctgcacagttgctctgtacaaatcctcctccatatttgcttagagaaaacgtgttgccatcccatcatgaaggaagctgcctgagagtttttaaccattacagccgtgatgatgaaagagtgaagaaccgcctctaagttaaaaagtgcacccagagataaggttcgttctcaatgccctgccgctgcttctcatcgcatggccaccgcatttctcaggccaggcacattgagcattggtcctgtgcctgacgctatgctagatgctggggttgcagccacgagcatagacacgacagacacggtcctcgccatcttctgttgagtactggtcggaacaagaggatcgtctgtagacaggatatgatcatcgtggcgcatgtattactcatccttttgggggccactgagatactgcaagctgacttacttcctgatgaaaagatttcacttctcccacctgtcaatttcaccattaaagttactggtttggctcaagttcttttacaatggaaaccaaatcctgatcaagagcaaaggaatgttaatctagaatatcaagtgaaaataaacgctccaaaagaagatgactatgaaaccagaatcactgaaagcaaatgtgtaaccatcctccacaaaggcttttcagcaagtgtgcggaccatcctgcagaacgaccactcactactggccagcagctgggcttctgctgaacttcatgccccaccagggtctcctggaacctcaattgtgaatttaacttgcaccacaaacactacagaagacaattattcacgtttaaggtcataccaagtttcccttcactgcacctggcttgttggcacagatgcccctgaggacacgcagtattttctctactataggtatggctcttggactgaagaatgccaagaatacagcaaagacacactggggagaaatatcgcatgctggtttcccaggacttttatcctcagcaaagggcgtgactggcttgcggtgcttgttaacggctccagcaagcactctgctatcaggccctttgatcagctgtttgcccttcacgccattgatcaaataaatcctccactgaatgtcacagcagagattgaaggaactcgtctctctatccaatgggagaaaccagtgtctgcttttccaatccattgctttgattatgaagtaaaaatacacaatacaaggaatggatatttgcagatagaaaaattgatgaccaatgcattcatctcaataattgatgatctttctaagtacgatgttcaagtgagagcagcagtgagctccatgtgcagagaggcagggctctggagtgagtggagccaacctatttatgtgggaaatgatgaacacaagcccttgagagagtggtttgtcattgtgattatggcaaccatctgcttcatcttgttaattctctcgcttatctgtaaaatatgtcatttatggatcaagttgtttccaccaattccagcaccaaaaagtaatatcaaagatctctttgtaaccactaactatgagaaagctgggtccagtgagacggaaattgaagtcatctgttatatagagaagcctggagttgagaccctggaggattctgtgttttgactgtcactttggcatcctctgatgaactcacacatgcctcagtgcctcagtgaaaagaacagggatgctggctcttggctaagaggtgttcagaatttaggcaacactcaatttacctgcgaagcaatacacccagacacaccagtcttgtatctcttaaaagtatggatgcttcatccaaatcgcctcacctacagcagggaagttgactcatccaagcattttgccatgttttttctccccatgccgtacagggtagcacctcctcacctgccaatctttgcaatttgcttgactcacctcagacttttcattcacaacagacagcttttaaggctaacgtccagctgtatttacttctggctgtgcccgtttggctgtttaagctgccaattgtagcactcagctaccatctgaggaagaaagcattttgcatcagcctggagtgaaccatgaacttggattcaagactgtcttttctatagcaagtgagagccacaaattcctcacccccctacattctagaatgatctttttctaggtagattgtgtatgtgtgtgtatgagagagagagagagagagagagagagagaaattatctcaagctccagaggcctgatccaggatacatcatttgaaaccaactaatttaaaagcataatagagctaatatat

SEQ ID NO: 3511 - protein, 420 aa, Homo sapiens; identical to SEQ ID NO: 323

SEQ ID NO: 3512 - DNA, 2271 bp, Homo sapiens
agtacccacggaaaacttgtttaccttgtcaccatgagtaaaagttaattcccactcctgaagagagcaaaccaactctgaaagagagtgaaaatgcagacaagacagttatcagataatggctatctggacgagagattctttcgtttgacagcagtttggttgttgggagttccagttcagctcctgcacagttgctctgtacaaatcctcctccatatttgcttagagaaaacgtgttgccatcccatcatgaaggaagctgcctgagagtttttaaccattacagccgtgatgatgaaagagtgaagaaccgcctctaagttaaaaagtgcacccagagataaggttcgttctcaatgccctgccgctgcttctcatcgcatggccaccgcatttctcagttctgttgagtactggtcggaacaagaggatcgtctgtagacaggctacagattgttttagattgaagtttcctgtcatgttcactcatctttaaatcctcatagtgaaaaaggatatgatcatcgtggcgcatgtattactcatccttttgggggccactgagatactgcaagctgacttacttcctgatgaaaagatttcacttctcccacctgtcaatttcaccattaaagttactggtttggctcaagttcttttacaatggaaaccaaatcctgatcaagagcaaaggaatgttaatctagaatatcaagtgaaaataaacgctccaaaagaagatgactatgaaaccagaatcactgaaagcaaatgtgtaaccatcctccacaaaggcttttcagcaagtgtgcggaccatcctgcagaacgaccactcactactggccagcagctgggcttctgctgaacttcatgccccaccagggtctcctggaacctcaattgtgaatttaacttgcaccacaaacactacagaagacaattattcacgtttaaggtcataccaagtttcccttcactgcacctggcttgttggcacagatgcccctgaggacacgcagtattttctctactataggtatggctcttggactgaagaatgccaagaatacagcaaagacacactggggagaaatatcgcatgctggtttcccaggacttttatcctcagcaaagggcgtgactggcttgcggtgcttgttaacggctccagcaagcactctgctatcaggccctttgatcagctgtttgcccttcacgccattgatcaaataaatcctccactgaatgtcacagcagagattgaaggaactcgtctctctatccaatgggagaaaccagtgtctgcttttccaatccattgctttgattatgaagtaaaaatacacaatacaaggaatggatatttgcagatagaaaaattgatgaccaatgcattcatctcaataattgatgatctttctaagtacgatgttcaagtgagagcagcagtgagctccatgtgcagagaggcagggctctggagtgagtggagccaacctatttatgtgggaaatgatgaacacaagcccttgagagagtggtttgtcattgtgattatggcaaccatctgcttcatcttgttaattctctcgcttatctgtaaaatatgtcatttatggatcaagttgtttccaccaattccagcaccaaaaagtaatatcaaagatctctttgtaaccactaactatgagaaagctgggtccagtgagacggaaattgaagtcatctgttatatagagaagcctggagttgagaccctggaggattctgtgttttgactgtcactttggcatcctctgatgaactcacacatgcctcagtgcctcagtgaaaagaacagggatgctggctcttggctaagaggtgttcagaatttaggcaacactcaatttacctgcgaagcaatacacccagacacaccagtcttgtatctcttaaaagtatggatgcttcatccaaatcgcctcacctacagcagggaagttgactcatccaagcattttgccatgttttttctccccatgccgtacagggtagcacctcctcacctgccaatctttgcaatttgcttgactcacctcagacttttcattcacaacagacagcttttaaggctaacgtccagctgtatttacttctggctgtgcccgtttggctgtttaagctgccaattgtagcactcagctaccatctgaggaagaaagcattttgcatcagcctggagtgaaccatgaacttggattcaagactgtcttttctatagcaa

SEQ ID NO: 3513 - protein, 420 aa, Homo sapiens; identical to SEQ ID NO: 323

SEQ ID NO: 3514 - DNA, 445 bp, Homo sapiens
agcatgttatagagtccaaggaatttgccaaatccgtgtgagaagatttgcctctcacatgtgagagaattttttgagaaaaaaaagatcctgaccccgtccctctgccaccacccgagtgaggaagactgacagagcacattggcttgctgtggagacaagatcagggaaagcgcccctgaaaagaaagcattttggaagtcctgaaggtggagaaggagatttagaggaagagtgataaatcagaagtcttcgtccaagaattagctttgcaccatctacagacctaagcagctgcagtcctggaactgtgtgataacttgcccagaaaatcttcttgtggaatctgtctttacatggaaaagacttggcaatatttgtacagcaactggaagaaaggtctttgctgagatatacaaagaggcagaatgtgtgtggatcaccg

SEQ ID NO: 3515 - protein, 58 aa, Homo sapiens
LCTIYRPKQLQSWNCVITCPENLLVESVFTWKRLGNICTATGRKVFAEIYKEAECVWI

SEQ ID NO: 3516 - DNA, 7680 bp, Homo sapiens
aactttgcatgaataatgtgagtgcgcttggaaaagagacctcctgctccgcgggctcggggcaagagcccgcaggctaccttccccgggcaggggcgctcaacccaaccggctccagggcactggtaatttggctagaggaccgcgcggaggcagcgggatctgcgatttccttctggttggctgtcctgcgtgggtgccaagttccacacatgatttaatgaataagaagggggcttggaggctcatagcaaaggtccttgaagagagcaagaaaaagtcttcccaggaaaagtggacacctgagtgagtgttacaacgagaaggggggcatcccaggcaaggcagctaccaagcacaggtgtgaagtgacttcactgtaggaagaggaaatgcagaaaaacaaacgtcttgaagactgaaagcctgttattcaaagaggttagcagtagactgttggaagtaaggagatgtcagtgaaaaaagggatccagaatgattactaacctatgactcccaacagtatgacagaaaatggccttacagcctgggacaaaccgaagcactgtccagaccgagaacacgactggaagctagtaggaatgtctgaagcctgcctacataggaagagccattcagagaggcgcagcacgttgaaaaatgaacagtcgtcgccacatctcatccagaccacttggactagctcaatattccatctggaccatgatgatgtgaacgaccagagtgtctcaagtgcccagaccttccaaacggaggagaagaaatgtaaagggtacatccccagttacttagacaaggacgagctctgtgtagtgtgtggtgacaaagccaccgggtatcactaccgctgtatcacgtgtgaaggctgcaagggtttctttagaagaaccattcagaaaaatctccatccatcctattcctgtaaatatgaaggaaaatgtgtcatagacaaagtcacgcgaaatcagtgccaggaatgtcgctttaagaaatgcatctatgttggcatggcaacagatttggtgctggatgacagcaagaggctggccaagaggaagctgatagaggagaaccgggagaaaagacggcgggaagagctgcagaagtccatcgggcacaagccagagcccacagacgaggaatgggagctcatcaaaactgtcaccgaagcccatgtggcgaccaacgcccaaggcagccactggaagcaaaaacggaaattcctgccagaagacattggacaagcaccaatagtcaatgccccagaaggtggaaaggttgacttggaagccttcagccattttacaaaaatcatcacaccagcaattaccagagtggtggattttgccaaaaagttgcctatgttttgtgagctgccatgtgaagaccagatcatcctcctcaaaggctgctgcatggagatcatgtcccttcgcgctgctgtgcgctatgacccagaaagtgagactttaaccttgaatggggaaatggcagtgacacggggccagctgaaaaatgggggtcttggggtggtgtcagacgccatctttgacctgggcatgtctctgtcttctttcaacctggatgacactgaagtagccctccttcaggccgtcctgctgatgtcttcagatcgcccggggcttgcctgtgttgagagaatagaaaagtaccaagatagtttcctgctggcctttgaacactatatcaattaccgaaaacaccacgtgacacacttttggccaaaactcctgatgaaggtgacagatctgcggatgataggagcctgccatgccagccgcttcctgcacatgaaggtggaatgccccacagaactcttcccccctttgttcttggaagtgttcgaggattagactgactggattcattctcataattcctacagcactactgggtgtcatttcattccattgcctagctcttttttgtttgtttctttgtgttgggagggattatttgggagggaaaagggaagtagtccttggcatagacatggatgaaattgccccttgaatgcgggtacttgaaactattgcatttcgttctccggtcctgtgatgtgaatgctctgaaggttttatggttgtggaggtggggtgggggacaatcattaactcaccagcaccaagcatcaccagctcccacccgtccctggtccaagacttgagtcagcaaaatggcgccacaggacactaaagaagccttaaaaccaagataatacgaccacctccacccaatcctgatgttcgcagggctgaagttaacagagcacagaccacctttagttagatgtggctttcagccttttagggaaagactcgaacaaattttcatctattcaagagcatgctgtttgcagcactctttatggtctcctaggagcataacttggaatgtacaggaatatttgtgtcctaaaaaaatcagctgcccttccaatatcatttttataacgttatggtttaattcaagttatacaaaggtgtgactcaaggatgtgcaggtattgactgatggaggccaacaaggaaaatattttttttcagtgagcccagagaaattagaaatcttcaccaatgtcagtgactgcatggtttccaaaaattcacatagtattacctcacagtaggaaggcttctttcccatttaggctcagagaacacttttacagaaatcaaacctatttacagggtggcaccccttttctgtggcatctgatctgtcatctcccaagctcctgaagttctttatccaggttgtatctttgctgagctgacaacagatttctctatggatcaaatattctaatcaaggaaagatacggtgaaacttcagtcttcttctggagaaatgctgaggcgagattagtgcagctacattctgagttgaaggaaatgcagtgttctgagggcccctttgtgtcctgatggctggaggacgcttcctcctggttagatcctcaagctccttgcctcattgacaaatgtctcctagtcccctttttccctctgactctgaggaactaaatagcttgactatctctaaacagagactggccctgccactgaccctcctgtccctctcatagcataccctgacagatactcaatagaaaacacctgcagaccatgtgcacacttaactttcctgcccaacctgcctccccaacggcccatgctagaatagcttgtgcccagaaaacaaacagtgacacttcatctcttcagcgtcagaaaatgggcatagaatgtacccatgcaattgaatgtatctcattctccactggcatagtagatataaactattcctttgcctaccttttactgccttatcctggaaatattggggaaaataagccatatcagtgagatttacctaaaaacaaaggaaggaaagtcactatggaaaccaagtagatgctttttgtaagtttggtggagcataactggcccagaagtctgggtgcctgagttctagttcgtgctctgtcaactggtagatttgtaattctaggtcttggttttcttacctggtgaataagtcatgatctctaaaacccttcctgcccttaatattgtctgaatttcaaggggaaaaaaaaaatctggttcctttaattatttttttttaacacttaaattcctaactttattagacaagaagtatggcccacttaacagttaaggaacgtaaatttgttattggctcgaaataataatttgacacaatactagtcaaccatttagaggccttggaaaaagaagaggaacagcactgaaaattccaagtatgattggaaattatctgggagcggggaattaaatattcaatgcatgaaagcaattgtactggcttctgggaaaaaggaaacaagaacattgctatggaacttgttacccagagaaaggaagtgaaaagatttacaattataagcacgaaattcattggcagattacctgctttatctacagacagattgttttggggtttggttttgtctaggcagcctctggccaggctccttaattgcttgctctgctaatatttcagcttcctctcttgactccttgaggaaccaaccgctctttggaagacaaacacttagccacctctgtgctccagggtaaccctgagaagctctgctgtctggggcaagctttctttccaaagggaatgagaggaaggcaagcaggcagggtcctgcagcgtcaggccttctggggaaagtttcctcattttgtttgacagggtcctcagtacatcagacacccagatttgaatataagttcagagcctgatctcaagctaaatcagaatgctttggggactaaccatgatcgagaattggccaaatagtatggcatataaacagccatccagccagccgcaagtaaaggaacgtttgatccttggcaccttaaatgattgattgccttcaataggcaaactgctggtctggaaatctcgttgaaggctgaatacttcatgcggagtaggacaagccttagcccaccttcaggttgaaaggaaaggccataggactcaaaagataatgactctgaaactaaactccttccttctgaagctgacagaggtacttagtgcatctcaagactccatctcataaaactcatttgtgagggatttgctctagatttttctaaacattttttcatctattgtccagacttgcaaatccagtgtggacctgatggagatacccttcacacctgcgctcccaccccctcggcagggagacgtctcagtagaggagaacacacccattatgctgggatttgtatttataaatcacttcccttttagggatgagcggtgtggggcgtgtgtgcgtgtgagtgtatgcgcgtgcgtgtgtgaccctcaagtgtactttgctcaatttagacgtgcagtatttccagaaacaatgaaaaaagtaagatgttttcttctttatgattctgctcaaaacaccacgtgccgcctcagagctttttctagagcctcggtcctcaatgacgcgcttgacctgttgatgcctcagcccagcgaagcccctcacctgtgccccgggcgacagctcttcagtgtgcagtgcaggcctggggtggactgccaggccttcgctctgtgccagcaacgccgttcttgttgctcctccatgaacaggggtacaagccctggcccctcctcgacactaagccccccacagactcagcctccaaggaaccgctgagcacccttgaagcatgtcattgtcagtgatacctttttattctatggaactctaacctattcgtgtcatattgaccttttgctgcatgagtcataaattatgaaatcagtcttacagtttttgaaatgtagccagcatttgtaaggctaaacctttttcatgaactgaatttaagtgaataaccaagccacagttcctcctcaaatggagagtgatgatcgacatttgaatctctttgccctttccaacggctatggcatcaggttctaaaataagctcgtaatttttcctgttattttaataatatggaaatattagcatagtgtttcttttgatagtgatagactataatccatatttaaattttatagagaagaaattttattgtactgtgatgtagatatttattatccaggtaaggatttgcccggtgtgtattttttacaattgagacattttactttaatctttaaaaaaaatgcattaaaaacacactcaaaaaaaaaaaaaaaaaaaaaaaaaaaaaaccagactgggggaaaaaaggtttggccttatcacagaatttttactgtgctgtataaatgtttgcaaatgcgaaaagtgtgcatttatagtgtgtttccacattaattaatgccgccttcaagagcaatattgtgcaggtaaaacgctgtttgtggctttctgttgcacagttaaagctgacccaccctatgcacaagacaatcaaatataaatctgtcctcctcaggatgcagataatactcatgtaaattatggagcacaatgtaagacaaaaggagacactttacatatgtattgttgatacagaaattatcagggcatgaatgagctgatgtgacattatgccacttctttcttttggttctcccttattaacttggcatttttaatttgaccatagagccaaattagttctccatgctttcttcgtagaaaatccttttttttcccataatgttttcatgccctgagaatcagaaaaatactacagaatagaaaaagatttacagtcattggaagatttgtgttttgcaaacagtgttaagtgatattgctagatggtgatatttttttcagcctaaaactctgttgaaatctgtgatcaaaatgttttaaactatccaaaaaaaatttgtatatttgggaaaaatggatttttacatagcttttgtatgcagatataaaactgtaattatgaatatagtgggcgtagataaactcataagcttaaattctaaaaaagaaaaagcttataacagatatattttcctgtctctttctttaaatattattattttctacataggcaaagagttgcctgctcttctcacttcagctgctgccaaaagacggaaccacggatgtaaggacatttatttcataaataaacatctactagaataagcaaatttacttgagaagaaactatggagggagagaagaaactaagtaaaatgctgatggggggttacctctttggaaggggccacaaagatgaagggaggagagaggtgaagttttgcagctcaaggacaacattcatcttctcatctcaaattattcaggaatattactaatggaattatgttaacatcagctgccaacatatatctcaatctctgttgccctgaacacatgttaattgagattctttctatgacaagtaacaaaaagctaactcaaactggcttaagcagaaagctaattattgactttaatatctgggatctagggtattgcataccaaagcttcaggcatggctggatctgggtgcacttactcagtattctcaggaagctcctttttttgtcattcatgtagacttaacattcacatggcctttcaccttacggtggcctccaatagctccaggatgagctttacagctccaaatatagtgaaaggagaatttcttttctccaacaattctaatgaaaattctggcctaattctcactggcccaagttcagtcatgtgcccattcctgagccaatcactgtggtgaggaaaacagatgcataaccaaccttatcctcaggaatcctggaactgggtgaggggaaagagggacagtcagcttcatctaaactatggactgagagttgaggcaagatgattcctgaaagaaaattctaagtcttgctgctataagtggaagagaatggtgggcaagcaaaagcaaccagtgcccacaccaaaggtaaatctaaaacaacatcccatttcagtacagcaagcggttctccttcacacagaggaagctcatctccaagtttttatttggccaggacatgaaccaaataaacaccttccaaagaaagtgtttgatcgcattcttcctggttcgtgaaaacaccagttcaggtaagatggg

SEQ ID NO: 3517 - protein, 461 aa, Homo sapiens; identical to SEQ ID NO: 335

SEQ ID NO: 3518 - DNA, 7322 bp, Homo sapiens
cggcggggattaactttgcatgaataatgtgagtgcgcttggaaaagagacctcctgctccgcgggctcggggcaagagcccgcaggctaccttccccgggcaggggcgctcaacccaaccggctccagggcactggtaatttggctagaggaccgcgcggaggcagcgggagaaaatggccttacagcctgggacaaaccgaagcactgtccagaccgagaacacgactggaagctagtaggaatgtctgaagcctgcctacataggaagagccattcagagaggcgcagcacgttgaaaaatgaacagtcgtcgccacatctcatccagaccacttggactagctcaatattccatctggaccatgatgatgtgaacgaccagagtgtctcaagtgcccagaccttccaaacggaggagaagaaatgtaaagggtacatccccagttacttagacaaggacgagctctgtgtagtgtgtggtgacaaagccaccgggtatcactaccgctgtatcacgtgtgaaggctgcaagggtttctttagaagaaccattcagaaaaatctccatccatcctattcctgtaaatatgaaggaaaatgtgtcatagacaaagtcacgcgaaatcagtgccaggaatgtcgctttaagaaatgcatctatgttggcatggcaacagatttggtgctggatgacagcaagaggctggccaagaggaagctgatagaggagaaccgggagaaaagacggcgggaagagctgcagaagtccatcgggcacaagccagagcccacagacgaggaatgggagctcatcaaaactgtcaccgaagcccatgtggcgaccaacgcccaaggcagccactggaagcaaaaacggaaattcctgccagaagacattggacaagcaccaatagtcaatgccccagaaggtggaaaggttgacttggaagccttcagccattttacaaaaatcatcacaccagcaattaccagagtggtggattttgccaaaaagttgcctatgttttgtgagctgccatgtgaagaccagatcatcctcctcaaaggctgctgcatggagatcatgtcccttcgcgctgctgtgcgctatgacccagaaagtgagactttaaccttgaatggggaaatggcagtgacacggggccagctgaaaaatgggggtcttggggtggtgtcagacgccatctttgacctgggcatgtctctgtcttctttcaacctggatgacactgaagtagccctccttcaggccgtcctgctgatgtcttcagatcgcccggggcttgcctgtgttgagagaatagaaaagtaccaagatagtttcctgctggcctttgaacactatatcaattaccgaaaacaccacgtgacacacttttggccaaaactcctgatgaaggtgacagatctgcggatgataggagcctgccatgccagccgcttcctgcacatgaaggtggaatgccccacagaactcttcccccctttgttcttggaagtgttcgaggattagactgactggattcattctcataattcctacagcactactgggtgtcatttcattccattgcctagctcttttttgtttgtttctttgtgttgggagggattatttgggagggaaaagggaagtagtccttggcatagacatggatgaaattgccccttgaatgcgggtacttgaaactattgcatttcgttctccggtcctgtgatgtgaatgctctgaaggttttatggttgtggaggtggggtgggggacaatcattaactcaccagcaccaagcatcaccagctcccacccgtccctggtccaagacttgagtcagcaaaatggcgccacaggacactaaagaagccttaaaaccaagataatacgaccacctccacccaatcctgatgttcgcagggctgaagttaacagagcacagaccacctttagttagatgtggctttcagccttttagggaaagactcgaacaaattttcatctattcaagagcatgctgtttgcagcactctttatggtctcctaggagcataacttggaatgtacaggaatatttgtgtcctaaaaaaatcagctgcccttccaatatcatttttataacgttatggtttaattcaagttatacaaaggtgtgactcaaggatgtgcaggtattgactgatggaggccaacaaggaaaatattttttttcagtgagcccagagaaattagaaatcttcaccaatgtcagtgactgcatggtttccaaaaattcacatagtattacctcacagtaggaaggcttctttcccatttaggctcagagaacacttttacagaaatcaaacctatttacagggtggcaccccttttctgtggcatctgatctgtcatctcccaagctcctgaagttctttatccaggttgtatctttgctgagctgacaacagatttctctatggatcaaatattctaatcaaggaaagatacggtgaaacttcagtcttcttctggagaaatgctgaggcgagattagtgcagctacattctgagttgaaggaaatgcagtgttctgagggcccctttgtgtcctgatggctggaggacgcttcctcctggttagatcctcaagctccttgcctcattgacaaatgtctcctagtcccctttttccctctgactctgaggaactaaatagcttgactatctctaaacagagactggccctgccactgaccctcctgtccctctcatagcataccctgacagatactcaatagaaaacacctgcagaccatgtgcacacttaactttcctgcccaacctgcctccccaacggcccatgctagaatagcttgtgcccagaaaacaaacagtgacacttcatctcttcagcgtcagaaaatgggcatagaatgtacccatgcaattgaatgtatctcattctccactggcatagtagatataaactattcctttgcctaccttttactgccttatcctggaaatattggggaaaataagccatatcagtgagatttacctaaaaacaaaggaaggaaagtcactatggaaaccaagtagatgctttttgtaagtttggtggagcataactggcccagaagtctgggtgcctgagttctagttcgtgctctgtcaactggtagatttgtaattctaggtcttggttttcttacctggtgaataagtcatgatctctaaaacccttcctgcccttaatattgtctgaatttcaaggggaaaaaaaaaatctggttcctttaattatttttttttaacacttaaattcctaactttattagacaagaagtatggcccacttaacagttaaggaacgtaaatttgttattggctcgaaataataatttgacacaatactagtcaaccatttagaggccttggaaaaagaagaggaacagcactgaaaattccaagtatgattggaaattatctgggagcggggaattaaatattcaatgcatgaaagcaattgtactggcttctgggaaaaaggaaacaagaacattgctatggaacttgttacccagagaaaggaagtgaaaagatttacaattataagcacgaaattcattggcagattacctgctttatctacagacagattgttttggggtttggttttgtctaggcagcctctggccaggctccttaattgcttgctctgctaatatttcagcttcctctcttgactccttgaggaaccaaccgctctttggaagacaaacacttagccacctctgtgctccagggtaaccctgagaagctctgctgtctggggcaagctttctttccaaagggaatgagaggaaggcaagcaggcagggtcctgcagcgtcaggccttctggggaaagtttcctcattttgtttgacagggtcctcagtacatcagacacccagatttgaatataagttcagagcctgatctcaagctaaatcagaatgctttggggactaaccatgatcgagaattggccaaatagtatggcatataaacagccatccagccagccgcaagtaaaggaacgtttgatccttggcaccttaaatgattgattgccttcaataggcaaactgctggtctggaaatctcgttgaaggctgaatacttcatgcggagtaggacaagccttagcccaccttcaggttgaaaggaaaggccataggactcaaaagataatgactctgaaactaaactccttccttctgaagctgacagaggtacttagtgcatctcaagactccatctcataaaactcatttgtgagggatttgctctagatttttctaaacattttttcatctattgtccagacttgcaaatccagtgtggacctgatggagatacccttcacacctgcgctcccaccccctcggcagggagacgtctcagtagaggagaacacacccattatgctgggatttgtatttataaatcacttcccttttagggatgagcggtgtggggcgtgtgtgcgtgtgagtgtatgcgcgtgcgtgtgtgaccctcaagtgtactttgctcaatttagacgtgcagtatttccagaaacaatgaaaaaagtaagatgttttcttctttatgattctgctcaaaacaccacgtgccgcctcagagctttttctagagcctcggtcctcaatgacgcgcttgacctgttgatgcctcagcccagcgaagcccctcacctgtgccccgggcgacagctcttcagtgtgcagtgcaggcctggggtggactgccaggccttcgctctgtgccagcaacgccgttcttgttgctcctccatgaacaggggtacaagccctggcccctcctcgacactaagccccccacagactcagcctccaaggaaccgctgagcacccttgaagcatgtcattgtcagtgatacctttttattctatggaactctaacctattcgtgtcatattgaccttttgctgcatgagtcataaattatgaaatcagtcttacagtttttgaaatgtagccagcatttgtaaggctaaacctttttcatgaactgaatttaagtgaataaccaagccacagttcctcctcaaatggagagtgatgatcgacatttgaatctctttgccctttccaacggctatggcatcaggttctaaaataagctcgtaatttttcctgttattttaataatatggaaatattagcatagtgtttcttttgatagtgatagactataatccatatttaaattttatagagaagaaattttattgtactgtgatgtagatatttattatccaggtaaggatttgcccggtgtgtattttttacaattgagacattttactttaatctttaaaaaaaatgcattaaaaacacactcaaaaaaaaaaaaaaaaaaaaaaaaaaaaaaccagactgggggaaaaaaggtttggccttatcacagaatttttactgtgctgtataaatgtttgcaaatgcgaaaagtgtgcatttatagtgtgtttccacattaattaatgccgccttcaagagcaatattgtgcaggtaaaacgctgtttgtggctttctgttgcacagttaaagctgacccaccctatgcacaagacaatcaaatataaatctgtcctcctcaggatgcagataatactcatgtaaattatggagcacaatgtaagacaaaaggagacactttacatatgtattgttgatacagaaattatcagggcatgaatgagctgatgtgacattatgccacttctttcttttggttctcccttattaacttggcatttttaatttgaccatagagccaaattagttctccatgctttcttcgtagaaaatccttttttttcccataatgttttcatgccctgagaatcagaaaaatactacagaatagaaaaagatttacagtcattggaagatttgtgttttgcaaacagtgttaagtgatattgctagatggtgatatttttttcagcctaaaactctgttgaaatctgtgatcaaaatgttttaaactatccaaaaaaaatttgtatatttgggaaaaatggatttttacatagcttttgtatgcagatataaaactgtaattatgaatatagtgggcgtagataaactcataagcttaaattctaaaaaagaaaaagcttataacagatatattttcctgtctctttctttaaatattattattttctacataggcaaagagttgcctgctcttctcacttcagctgctgccaaaagacggaaccacggatgtaaggacatttatttcataaataaacatctactagaataagcaaatttacttgagaagaaactatggagggagagaagaaactaagtaaaatgctgatggggggttacctctttggaaggggccacaaagatgaagggaggagagaggtgaagttttgcagctcaaggacaacattcatcttctcatctcaaattattcaggaatattactaatggaattatgttaacatcagctgccaacatatatctcaatctctgttgccctgaacacatgttaattgagattctttctatgacaagtaacaaaaagctaactcaaactggcttaagcagaaagctaattattgactttaatatctgggatctagggtattgcataccaaagcttcaggcatggctggatctgggtgcacttactcagtattctcaggaagctcctttttttgtcattcatgtagacttaacattcacatggcctttcaccttacggtggcctccaatagctccaggatgagctttacagctccaaatatagtgaaaggagaatttcttttctccaacaattctaatgaaaattctggcctaattctcactggcccaagttcagtcatgtgcccattcctgagccaatcactgtggtgaggaaaacagatgcataaccaaccttatcctcaggaatcctggaactgggtgaggggaaagagggacagtcagcttcatctaaactatggactgagagttgaggcaagatgattcctgaaagaaaattctaagtcttgctgctataagtggaagagaatggtgggcaagcaaaagcaaccagtgcccacaccaaaggtaaatctaaaacaacatcccatttcagtacagcaagcggttctccttcacacagaggaagctcatctccaagtttttatttggccaggacatgaaccaaataaacaccttccaaagaaagtgtttgatcgcattcttcctggttcgtgaaaacaccagttcaggtaagatggg

SEQ ID NO: 3519 - protein, 505 aa, Homo sapiens
MNNVSALGKETSCSAGSGQEPAGYLPRAGALNPTGSRALVIWLEDRAEAAGENGLTAWDKPKHCPDREHDWKLVGMSEACLHRKSHSERRSTLKNEQSSPHLIQTTWTSSIFHLDHDDVNDQSVSSAQTFQTEEKKCKGYIPSYLDKDELCVVCGDKATGYHYRCITCEGCKGFFRRTIQKNLHPSYSCKYEGKCVIDKVTRNQCQECRFKKCIYVGMATDLVLDDSKRLAKRKLIEENREKRRREELQKSIGHKPEPTDEEWELIKTVTEAHVATNAQGSHWKQKRKFLPEDIGQAPIVNAPEGGKVDLEAFSHFTKIITPAITRVVDFAKKLPMFCELPCEDQIILLKGCCMEIMSLRAAVRYDPESETLTLNGEMAVTRGQLKNGGLGVVSDAIFDLGMSLSSFNLDDTEVALLQAVLLMSSDRPGLACVERIEKYQDSFLLAFEHYINYRKHHVTHFWPKLLMKVTDLRMIGACHASRFLHMKVECPTELFPPLFLEVFED

SEQ ID NO: 3520 - DNA, 7456 bp, Homo sapiens
cggcggggattaactttgcatgaataatgtgagtgcgcttggaaaagagacctcctgctccgcgggctcggggcaagagcccgcaggctaccttccccgggcaggggcgctcaacccaaccggctccagggcactggtaatttggctagaggaccgcgcggaggcagcgggatctgcgatttccttctggttggctgtcctgcgtgggtgccaagttccacacatgatttaatgaataagaaggagatgtcagtgaaaaaagggatccagaatgattactaacctatgactcccaacagtatgacagaaaatggccttacagcctgggacaaaccgaagcactgtccagaccgagaacacgactggaagctagtaggaatgtctgaagcctgcctacataggaagagccattcagagaggcgcagcacgttgaaaaatgaacagtcgtcgccacatctcatccagaccacttggactagctcaatattccatctggaccatgatgatgtgaacgaccagagtgtctcaagtgcccagaccttccaaacggaggagaagaaatgtaaagggtacatccccagttacttagacaaggacgagctctgtgtagtgtgtggtgacaaagccaccgggtatcactaccgctgtatcacgtgtgaaggctgcaagggtttctttagaagaaccattcagaaaaatctccatccatcctattcctgtaaatatgaaggaaaatgtgtcatagacaaagtcacgcgaaatcagtgccaggaatgtcgctttaagaaatgcatctatgttggcatggcaacagatttggtgctggatgacagcaagaggctggccaagaggaagctgatagaggagaaccgggagaaaagacggcgggaagagctgcagaagtccatcgggcacaagccagagcccacagacgaggaatgggagctcatcaaaactgtcaccgaagcccatgtggcgaccaacgcccaaggcagccactggaagcaaaaacggaaattcctgccagaagacattggacaagcaccaatagtcaatgccccagaaggtggaaaggttgacttggaagccttcagccattttacaaaaatcatcacaccagcaattaccagagtggtggattttgccaaaaagttgcctatgttttgtgagctgccatgtgaagaccagatcatcctcctcaaaggctgctgcatggagatcatgtcccttcgcgctgctgtgcgctatgacccagaaagtgagactttaaccttgaatggggaaatggcagtgacacggggccagctgaaaaatgggggtcttggggtggtgtcagacgccatctttgacctgggcatgtctctgtcttctttcaacctggatgacactgaagtagccctccttcaggccgtcctgctgatgtcttcagatcgcccggggcttgcctgtgttgagagaatagaaaagtaccaagatagtttcctgctggcctttgaacactatatcaattaccgaaaacaccacgtgacacacttttggccaaaactcctgatgaaggtgacagatctgcggatgataggagcctgccatgccagccgcttcctgcacatgaaggtggaatgccccacagaactcttcccccctttgttcttggaagtgttcgaggattagactgactggattcattctcataattcctacagcactactgggtgtcatttcattccattgcctagctcttttttgtttgtttctttgtgttgggagggattatttgggagggaaaagggaagtagtccttggcatagacatggatgaaattgccccttgaatgcgggtacttgaaactattgcatttcgttctccggtcctgtgatgtgaatgctctgaaggttttatggttgtggaggtggggtgggggacaatcattaactcaccagcaccaagcatcaccagctcccacccgtccctggtccaagacttgagtcagcaaaatggcgccacaggacactaaagaagccttaaaaccaagataatacgaccacctccacccaatcctgatgttcgcagggctgaagttaacagagcacagaccacctttagttagatgtggctttcagccttttagggaaagactcgaacaaattttcatctattcaagagcatgctgtttgcagcactctttatggtctcctaggagcataacttggaatgtacaggaatatttgtgtcctaaaaaaatcagctgcccttccaatatcatttttataacgttatggtttaattcaagttatacaaaggtgtgactcaaggatgtgcaggtattgactgatggaggccaacaaggaaaatattttttttcagtgagcccagagaaattagaaatcttcaccaatgtcagtgactgcatggtttccaaaaattcacatagtattacctcacagtaggaaggcttctttcccatttaggctcagagaacacttttacagaaatcaaacctatttacagggtggcaccccttttctgtggcatctgatctgtcatctcccaagctcctgaagttctttatccaggttgtatctttgctgagctgacaacagatttctctatggatcaaatattctaatcaaggaaagatacggtgaaacttcagtcttcttctggagaaatgctgaggcgagattagtgcagctacattctgagttgaaggaaatgcagtgttctgagggcccctttgtgtcctgatggctggaggacgcttcctcctggttagatcctcaagctccttgcctcattgacaaatgtctcctagtcccctttttccctctgactctgaggaactaaatagcttgactatctctaaacagagactggccctgccactgaccctcctgtccctctcatagcataccctgacagatactcaatagaaaacacctgcagaccatgtgcacacttaactttcctgcccaacctgcctccccaacggcccatgctagaatagcttgtgcccagaaaacaaacagtgacacttcatctcttcagcgtcagaaaatgggcatagaatgtacccatgcaattgaatgtatctcattctccactggcatagtagatataaactattcctttgcctaccttttactgccttatcctggaaatattggggaaaataagccatatcagtgagatttacctaaaaacaaaggaaggaaagtcactatggaaaccaagtagatgctttttgtaagtttggtggagcataactggcccagaagtctgggtgcctgagttctagttcgtgctctgtcaactggtagatttgtaattctaggtcttggttttcttacctggtgaataagtcatgatctctaaaacccttcctgcccttaatattgtctgaatttcaaggggaaaaaaaaaatctggttcctttaattatttttttttaacacttaaattcctaactttattagacaagaagtatggcccacttaacagttaaggaacgtaaatttgttattggctcgaaataataatttgacacaatactagtcaaccatttagaggccttggaaaaagaagaggaacagcactgaaaattccaagtatgattggaaattatctgggagcggggaattaaatattcaatgcatgaaagcaattgtactggcttctgggaaaaaggaaacaagaacattgctatggaacttgttacccagagaaaggaagtgaaaagatttacaattataagcacgaaattcattggcagattacctgctttatctacagacagattgttttggggtttggttttgtctaggcagcctctggccaggctccttaattgcttgctctgctaatatttcagcttcctctcttgactccttgaggaaccaaccgctctttggaagacaaacacttagccacctctgtgctccagggtaaccctgagaagctctgctgtctggggcaagctttctttccaaagggaatgagaggaaggcaagcaggcagggtcctgcagcgtcaggccttctggggaaagtttcctcattttgtttgacagggtcctcagtacatcagacacccagatttgaatataagttcagagcctgatctcaagctaaatcagaatgctttggggactaaccatgatcgagaattggccaaatagtatggcatataaacagccatccagccagccgcaagtaaaggaacgtttgatccttggcaccttaaatgattgattgccttcaataggcaaactgctggtctggaaatctcgttgaaggctgaatacttcatgcggagtaggacaagccttagcccaccttcaggttgaaaggaaaggccataggactcaaaagataatgactctgaaactaaactccttccttctgaagctgacagaggtacttagtgcatctcaagactccatctcataaaactcatttgtgagggatttgctctagatttttctaaacattttttcatctattgtccagacttgcaaatccagtgtggacctgatggagatacccttcacacctgcgctcccaccccctcggcagggagacgtctcagtagaggagaacacacccattatgctgggatttgtatttataaatcacttcccttttagggatgagcggtgtggggcgtgtgtgcgtgtgagtgtatgcgcgtgcgtgtgtgaccctcaagtgtactttgctcaatttagacgtgcagtatttccagaaacaatgaaaaaagtaagatgttttcttctttatgattctgctcaaaacaccacgtgccgcctcagagctttttctagagcctcggtcctcaatgacgcgcttgacctgttgatgcctcagcccagcgaagcccctcacctgtgccccgggcgacagctcttcagtgtgcagtgcaggcctggggtggactgccaggccttcgctctgtgccagcaacgccgttcttgttgctcctccatgaacaggggtacaagccctggcccctcctcgacactaagccccccacagactcagcctccaaggaaccgctgagcacccttgaagcatgtcattgtcagtgatacctttttattctatggaactctaacctattcgtgtcatattgaccttttgctgcatgagtcataaattatgaaatcagtcttacagtttttgaaatgtagccagcatttgtaaggctaaacctttttcatgaactgaatttaagtgaataaccaagccacagttcctcctcaaatggagagtgatgatcgacatttgaatctctttgccctttccaacggctatggcatcaggttctaaaataagctcgtaatttttcctgttattttaataatatggaaatattagcatagtgtttcttttgatagtgatagactataatccatatttaaattttatagagaagaaattttattgtactgtgatgtagatatttattatccaggtaaggatttgcccggtgtgtattttttacaattgagacattttactttaatctttaaaaaaaatgcattaaaaacacactcaaaaaaaaaaaaaaaaaaaaaaaaaaaaaaccagactgggggaaaaaaggtttggccttatcacagaatttttactgtgctgtataaatgtttgcaaatgcgaaaagtgtgcatttatagtgtgtttccacattaattaatgccgccttcaagagcaatattgtgcaggtaaaacgctgtttgtggctttctgttgcacagttaaagctgacccaccctatgcacaagacaatcaaatataaatctgtcctcctcaggatgcagataatactcatgtaaattatggagcacaatgtaagacaaaaggagacactttacatatgtattgttgatacagaaattatcagggcatgaatgagctgatgtgacattatgccacttctttcttttggttctcccttattaacttggcatttttaatttgaccatagagccaaattagttctccatgctttcttcgtagaaaatccttttttttcccataatgttttcatgccctgagaatcagaaaaatactacagaatagaaaaagatttacagtcattggaagatttgtgttttgcaaacagtgttaagtgatattgctagatggtgatatttttttcagcctaaaactctgttgaaatctgtgatcaaaatgttttaaactatccaaaaaaaatttgtatatttgggaaaaatggatttttacatagcttttgtatgcagatataaaactgtaattatgaatatagtgggcgtagataaactcataagcttaaattctaaaaaagaaaaagcttataacagatatattttcctgtctctttctttaaatattattattttctacataggcaaagagttgcctgctcttctcacttcagctgctgccaaaagacggaaccacggatgtaaggacatttatttcataaataaacatctactagaataagcaaatttacttgagaagaaactatggagggagagaagaaactaagtaaaatgctgatggggggttacctctttggaaggggccacaaagatgaagggaggagagaggtgaagttttgcagctcaaggacaacattcatcttctcatctcaaattattcaggaatattactaatggaattatgttaacatcagctgccaacatatatctcaatctctgttgccctgaacacatgttaattgagattctttctatgacaagtaacaaaaagctaactcaaactggcttaagcagaaagctaattattgactttaatatctgggatctagggtattgcataccaaagcttcaggcatggctggatctgggtgcacttactcagtattctcaggaagctcctttttttgtcattcatgtagacttaacattcacatggcctttcaccttacggtggcctccaatagctccaggatgagctttacagctccaaatatagtgaaaggagaatttcttttctccaacaattctaatgaaaattctggcctaattctcactggcccaagttcagtcatgtgcccattcctgagccaatcactgtggtgaggaaaacagatgcataaccaaccttatcctcaggaatcctggaactgggtgaggggaaagagggacagtcagcttcatctaaactatggactgagagttgaggcaagatgattcctgaaagaaaattctaagtcttgctgctataagtggaagagaatggtgggcaagcaaaagcaaccagtgcccacaccaaaggtaaatctaaaacaacatcccatttcagtacagcaagcggttctccttcacacagaggaagctcatctccaagtttttatttggccaggacatgaaccaaataaacaccttccaaagaaagtgtttgatcgcattcttcctggttcgtgaaaacaccagttcaggtaagatggg

SEQ ID NO: 3521 - protein, 461 aa, Homo sapiens; identical to SEQ ID NO: 335

SEQ ID NO: 3522 - DNA, 6568 bp, Homo sapiens
aactttgcatgaataatgtgagtgcgcttggaaaagagacctcctgctccgcgggctcggggcaagagcccgcaggctaccttccccgggcaggggcgctcaacccaaccggctccagggcactggtaatttggctagaggaccgcgcggaggcagcgggatctgcgatttccttctggttggctgtcctgcgtgggtgccaagttccacacatgatttaatgaataagaagggggcttggaggctcatagcaaaggtccttgaagagagcaagaaaaagtcttcccaggaaaagtggacacctgagtgagtgttacaacgagaaggggggcatcccaggcaaggcagctaccaagcacaggtgtgaagtgacttcactgtaggaagaggaaatgcagaaaaacaaacgtcttgaagactgaaagcctgttattcaaagaggttagcagtagactgttggaagtaaggagatgtcagtgaaaaaagggatccagaatgattactaacctatgactcccaacagtatgacagaaaatggccttacagcctgggacaaaccgaagcactgtccagaccgagaacacgactggaagctagtaggaatgtctgaagcctgcctacataggaagagccattcagagaggcgcagcacgttgaaaaatgaacagtcgtcgccacatctcatccagaccacttggactagctcaatattccatctggaccatgatgatgtgaacgaccagagtgtctcaagtgcccagaccttccaaacggaggagaagaaatgtaaagggtacatccccagttacttagacaaggacgagctctgtgtagtgtgtggtgacaaagccaccgggtatcactaccgctgtatcacgtgtgaaggctgcaagggtttctttagaagaaccattcagaaaaatctccatccatcctattcctgtaaatatgaaggaaaatgtgtcatagacaaagtcacgcgaaatcagtgccaggaatgtcgctttaagaaatgcatctatgttggcatggcaacagatttggtgctggatgacagcaagaggctggccaagaggaagctgatagaggagaaccgggagaaaagacggcgggaagagctgcagaagtccatcgggcacaagccagagcccacagacgaggaatgggagctcatcaaaactgtcaccgaagcccatgtggcgaccaacgcccaaggcagccactggaagcaaaaacggaaattcctgccagaagacattggacaagcaccaatagtcaatgccccagaaggtggaaaggttgacttggaagccttcagccattttacaaaaatcatcacaccagcaattaccagagtggtggattttgccaaaaagttgcctatgttttgtgagctgccatgtgaagaccagatcatcctcctcaaaggctgctgcatggagatcatgtcccttcgcgctgctgtgcgctatgacccagaaagtgagactttaaccttgaatggggaaatggcagtgacacggggccagctgaaaaatgggggtcttggggtggtgtcagacgccatctttgacctgggcatgtctctgtcttctttcaacctggatgacactgaagtagccctccttcaggccgtcctgctgatgtcttcagatcgcccggggcttgcctgtgttgagagaatagaaaagtaccaagatagtttcctgctggcctttgaacactatatcaattaccgaaaacaccacgtgacacacttttggccaaaactcctgatgaaggtgacagatctgcggatgataggagcctgccatgccagccgcttcctgcacatgaaggtggaatgccccacagaactcttcccccctttgttcttggaagtgttcgaggattagactgactggattcattctcataattcctacagcactactgggtgtcatttcattccattgcctagctcttttttgtttgtttctttgtgttgggagggattatttgggagggaaaagggaagtagtccttggcatagacatggatgaaattgccccttgaatgcgggtacttgaaactattgcatttcgttctccggtcctgtgatgtgaatgctctgaaggttttatggttgtggaggtggggtgggggacaatcattaactcaccagcaccaagcatcaccagctcccacccgtccctggtccaagacttgagtcagcaaaatggcgccacaggacactaaagaagccttaaaaccaagataatacgaccacctccacccaatcctgatgttcgcagggctgaagttaacagagcacagaccacctttagttagatgtggctttcagccttttagggaaagactcgaacaaattttcatctattcaagagcatgctgtttgcagcactctttatggtctcctaggagcataacttggaatgtacaggaatatttgtgtcctaaaaaaatcagctgcccttccaatatcatttttataacgttatggtttaattcaagttatacaaaggtgtgactcaaggatgtgcaggtattgactgatggaggccaacaaggaaaatattttttttcagtgagcccagagaaattagaaatcttcaccaatgtcagtgactgcatggtttccaaaaattcacatagtattacctcacagtaggaaggcttctttcccatttaggctcagagaacacttttacagaaatcaaacctatttacagggtggcaccccttttctgtggcatctgatctgtcatctcccaagctcctgaagttctttatccaggttgtatctttgctgagctgacaacagatttctctatggatcaaatattctaatcaaggaaagatacggtgaaacttcagtcttcttctggagaaatgctgaggcgagattagtgcagctacattctgagttgaaggaaatgcagtgttctgagggcccctttgtgtcctgatggctggaggacgcttcctcctggttagatcctcaagctccttgcctcattgacaaatgtctcctagtcccctttttccctctgactctgaggaactaaatagcttgactatctctaaacagagactggccctgccactgaccctcctgtccctctcatagcataccctgacagatactcaatagaaaacacctgcagaccatgtgcacacttaactttcctgcccaacctgcctccccaacggcccatgctagaatagcttgtgcccagaaaacaaacagtgacacttcatctcttcagcgtcagaaaatgggcatagaatgtacccatgcaattgaatgtatctcattctccactggcatagtagatataaactattcctttgcctaccttttactgccttatcctggaaatattggggaaaataagccatatcagtgagatttacctaaaaacaaaggaaggaaagtcactatggaaaccaagtagatgctttttgtaagtttggtggagcataactggcccagaagtctgggtgcctgagttctagttcgtgctctgtcaactggtagatttgtaattctaggtcttggttttcttacctggtgaataagtcatgatctctaaaacccttcctgcccttaatattgtctgaatttcaaggggaaaaaaaaaatctggttcctttaattatttttttttaacacttaaattcctaactttattagacaagaagtatggcccacttaacagttaaggaacgtaaatttgttattggctcgaaataataatttgacacaatactagtcaaccatttagaggccttggaaaaagaagaggaacagcactgaaaattccaagtatgattggaaattatctgggagcggggaattaaatattcaatgcatgaaagcaattgtactggcttctgggaaaaaggaaacaagaacattgctatggaacttgttacccagagaaaggaagtgaaaagatttacaattataagcacgaaattcattggcagattacctgctttatctacagacagattgttttggggtttggttttgtctaggcagcctctggccaggctccttaattgcttgctctgctaatatttcagcttcctctcttgactccttgaggaaccaaccgctctttggaagacaaacacttagccacctctgtgctccagggtaaccctgagaagctctgctgtctggggcaagctttctttccaaagggaatgagaggaaggcaagcaggcagggtcctgcagcgtcaggccttctggggaaagtttcctcattttgtttgacagggtcctcagtacatcagacacccagatttgaatataagttcagagcctgatctcaagctaaatcagaatgctttggggactaaccatgatcgagaattggccaaatagtatggcatataaacagccatccagccagccgcaagtaaaggaacgtttgatccttggcaccttaaatgattgattgccttcaataggcaaactgctggtctggaaatctcgttgaaggctgaatacttcatgcggagtaggacaagccttagcccaccttcaggttgaaaggaaaggccataggactcaaaagataatgactctgaaactaaactccttccttctgaagctgacagaggtacttagtgcatctcaagactccatctcataaaactcatttgtgagggatttgctctagatttttctaaacattttttcatctattgtccagacttgcaaatccagtgtggacctgatggagatacccttcacacctgcgctcccaccccctcggcagggagacgtctcagtagaggagaacacacccattatgctgggatttgtatttataaatcacttcccttttagggatgagcggtgtggggcgtgtgtgcgtgtgagtgtatgcgcgtgcgtgtgtgaccctcaagtgtactttgctcaatttagacgtgcagtatttccagaaacaatgaaaaaagtaagatgttttcttctttatgattctgctcaaaacaccacgtgccgcctcagagctttttctagagcctcggtcctcaatgacgcgcttgacctgttgatgcctcagcccagcgaagcccctcacctgtgccccgggcgacagctcttcagtgtgcagtgcaggcctggggtggactgccaggccttcgctctgtgccagcaacgccgttcttgttgctcctccatgaacaggggtacaagccctggcccctcctcgacactaagccccccacagactcagcctccaaggaaccgctgagcacccttgaagcatgtcattgtcagtgatacctttttattctatggaactctaacctattcgtgtcatattgaccttttgctgcatgagtcataaattatgaaatcagtcttacagtttttgaaatgtagccagcatttgtaaggctaaacctttttcatgaactgaatttaagtgaataaccaagccacagttcctcctcaaatggagagtgatgatcgacatttgaatctctttgccctttccaacggctatggcatcaggttctaaaataagctcgtaatttttcctgttattttaataatatggaaatattagcatagtgtttcttttgatagtgatagactataatccatatttaaattttatagagaagaaattttattgtactgtgatgtagatatttattatccaggtaaggatttgcccggtgtgtattttttacaattgagacattttactttaatctttaaaaaaaatgcattaaaaacacactcaaaaaaaaaaaaaaaaaaaaaaaaaaaaaaccagactgggggaaaaaaggtttggccttatcacagaatttttactgtgctgtataaatgtttgcaaatgcgaaaagtgtgcatttatagtgtgtttccacattaattaatgccgccttcaagagcaatattgtgcaggtaaaacgctgtttgtggctttctgttgcacagttaaagctgacccaccctatgcacaagacaatcaaatataaatctgtcctcctcaggatgcagataatactcatgtaaattatggagcacaatgtaagacaaaaggagacactttacatatgtattgttgatacagaaattatcagggcatgaatgagctgatgtgacattatgccacttctttcttttggttctcccttattaacttggcatttttaatttgaccatagagccaaattagttctccatgctttcttcgtagaaaatccttttttttcccataatgttttcatgccctgagaatcagaaaaatactacagaatagaaaaagatttacagtcattggaagatttgtgttttgcaaacagtgttaagtgatattgctagatggtgatatttttttcagcctaaaactctgttgaaatctgtgatcaaaatgttttaaactatccaaaaaaaatttgtatatttgggaaaaatggatttttacatagcttttgtatgcagatataaaactgtaattatgaatatagtgggcgtagataaactcataagcttaaattctaaaaaagaaaaagcttataacagatat

SEQ ID NO: 3523 - protein, 461 aa, Homo sapiens; identical to SEQ ID NO: 335

SEQ ID NO: 3524 - DNA, 6210 bp, Homo sapiens
cggcggggattaactttgcatgaataatgtgagtgcgcttggaaaagagacctcctgctccgcgggctcggggcaagagcccgcaggctaccttccccgggcaggggcgctcaacccaaccggctccagggcactggtaatttggctagaggaccgcgcggaggcagcgggagaaaatggccttacagcctgggacaaaccgaagcactgtccagaccgagaacacgactggaagctagtaggaatgtctgaagcctgcctacataggaagagccattcagagaggcgcagcacgttgaaaaatgaacagtcgtcgccacatctcatccagaccacttggactagctcaatattccatctggaccatgatgatgtgaacgaccagagtgtctcaagtgcccagaccttccaaacggaggagaagaaatgtaaagggtacatccccagttacttagacaaggacgagctctgtgtagtgtgtggtgacaaagccaccgggtatcactaccgctgtatcacgtgtgaaggctgcaagggtttctttagaagaaccattcagaaaaatctccatccatcctattcctgtaaatatgaaggaaaatgtgtcatagacaaagtcacgcgaaatcagtgccaggaatgtcgctttaagaaatgcatctatgttggcatggcaacagatttggtgctggatgacagcaagaggctggccaagaggaagctgatagaggagaaccgggagaaaagacggcgggaagagctgcagaagtccatcgggcacaagccagagcccacagacgaggaatgggagctcatcaaaactgtcaccgaagcccatgtggcgaccaacgcccaaggcagccactggaagcaaaaacggaaattcctgccagaagacattggacaagcaccaatagtcaatgccccagaaggtggaaaggttgacttggaagccttcagccattttacaaaaatcatcacaccagcaattaccagagtggtggattttgccaaaaagttgcctatgttttgtgagctgccatgtgaagaccagatcatcctcctcaaaggctgctgcatggagatcatgtcccttcgcgctgctgtgcgctatgacccagaaagtgagactttaaccttgaatggggaaatggcagtgacacggggccagctgaaaaatgggggtcttggggtggtgtcagacgccatctttgacctgggcatgtctctgtcttctttcaacctggatgacactgaagtagccctccttcaggccgtcctgctgatgtcttcagatcgcccggggcttgcctgtgttgagagaatagaaaagtaccaagatagtttcctgctggcctttgaacactatatcaattaccgaaaacaccacgtgacacacttttggccaaaactcctgatgaaggtgacagatctgcggatgataggagcctgccatgccagccgcttcctgcacatgaaggtggaatgccccacagaactcttcccccctttgttcttggaagtgttcgaggattagactgactggattcattctcataattcctacagcactactgggtgtcatttcattccattgcctagctcttttttgtttgtttctttgtgttgggagggattatttgggagggaaaagggaagtagtccttggcatagacatggatgaaattgccccttgaatgcgggtacttgaaactattgcatttcgttctccggtcctgtgatgtgaatgctctgaaggttttatggttgtggaggtggggtgggggacaatcattaactcaccagcaccaagcatcaccagctcccacccgtccctggtccaagacttgagtcagcaaaatggcgccacaggacactaaagaagccttaaaaccaagataatacgaccacctccacccaatcctgatgttcgcagggctgaagttaacagagcacagaccacctttagttagatgtggctttcagccttttagggaaagactcgaacaaattttcatctattcaagagcatgctgtttgcagcactctttatggtctcctaggagcataacttggaatgtacaggaatatttgtgtcctaaaaaaatcagctgcccttccaatatcatttttataacgttatggtttaattcaagttatacaaaggtgtgactcaaggatgtgcaggtattgactgatggaggccaacaaggaaaatattttttttcagtgagcccagagaaattagaaatcttcaccaatgtcagtgactgcatggtttccaaaaattcacatagtattacctcacagtaggaaggcttctttcccatttaggctcagagaacacttttacagaaatcaaacctatttacagggtggcaccccttttctgtggcatctgatctgtcatctcccaagctcctgaagttctttatccaggttgtatctttgctgagctgacaacagatttctctatggatcaaatattctaatcaaggaaagatacggtgaaacttcagtcttcttctggagaaatgctgaggcgagattagtgcagctacattctgagttgaaggaaatgcagtgttctgagggcccctttgtgtcctgatggctggaggacgcttcctcctggttagatcctcaagctccttgcctcattgacaaatgtctcctagtcccctttttccctctgactctgaggaactaaatagcttgactatctctaaacagagactggccctgccactgaccctcctgtccctctcatagcataccctgacagatactcaatagaaaacacctgcagaccatgtgcacacttaactttcctgcccaacctgcctccccaacggcccatgctagaatagcttgtgcccagaaaacaaacagtgacacttcatctcttcagcgtcagaaaatgggcatagaatgtacccatgcaattgaatgtatctcattctccactggcatagtagatataaactattcctttgcctaccttttactgccttatcctggaaatattggggaaaataagccatatcagtgagatttacctaaaaacaaaggaaggaaagtcactatggaaaccaagtagatgctttttgtaagtttggtggagcataactggcccagaagtctgggtgcctgagttctagttcgtgctctgtcaactggtagatttgtaattctaggtcttggttttcttacctggtgaataagtcatgatctctaaaacccttcctgcccttaatattgtctgaatttcaaggggaaaaaaaaaatctggttcctttaattatttttttttaacacttaaattcctaactttattagacaagaagtatggcccacttaacagttaaggaacgtaaatttgttattggctcgaaataataatttgacacaatactagtcaaccatttagaggccttggaaaaagaagaggaacagcactgaaaattccaagtatgattggaaattatctgggagcggggaattaaatattcaatgcatgaaagcaattgtactggcttctgggaaaaaggaaacaagaacattgctatggaacttgttacccagagaaaggaagtgaaaagatttacaattataagcacgaaattcattggcagattacctgctttatctacagacagattgttttggggtttggttttgtctaggcagcctctggccaggctccttaattgcttgctctgctaatatttcagcttcctctcttgactccttgaggaaccaaccgctctttggaagacaaacacttagccacctctgtgctccagggtaaccctgagaagctctgctgtctggggcaagctttctttccaaagggaatgagaggaaggcaagcaggcagggtcctgcagcgtcaggccttctggggaaagtttcctcattttgtttgacagggtcctcagtacatcagacacccagatttgaatataagttcagagcctgatctcaagctaaatcagaatgctttggggactaaccatgatcgagaattggccaaatagtatggcatataaacagccatccagccagccgcaagtaaaggaacgtttgatccttggcaccttaaatgattgattgccttcaataggcaaactgctggtctggaaatctcgttgaaggctgaatacttcatgcggagtaggacaagccttagcccaccttcaggttgaaaggaaaggccataggactcaaaagataatgactctgaaactaaactccttccttctgaagctgacagaggtacttagtgcatctcaagactccatctcataaaactcatttgtgagggatttgctctagatttttctaaacattttttcatctattgtccagacttgcaaatccagtgtggacctgatggagatacccttcacacctgcgctcccaccccctcggcagggagacgtctcagtagaggagaacacacccattatgctgggatttgtatttataaatcacttcccttttagggatgagcggtgtggggcgtgtgtgcgtgtgagtgtatgcgcgtgcgtgtgtgaccctcaagtgtactttgctcaatttagacgtgcagtatttccagaaacaatgaaaaaagtaagatgttttcttctttatgattctgctcaaaacaccacgtgccgcctcagagctttttctagagcctcggtcctcaatgacgcgcttgacctgttgatgcctcagcccagcgaagcccctcacctgtgccccgggcgacagctcttcagtgtgcagtgcaggcctggggtggactgccaggccttcgctctgtgccagcaacgccgttcttgttgctcctccatgaacaggggtacaagccctggcccctcctcgacactaagccccccacagactcagcctccaaggaaccgctgagcacccttgaagcatgtcattgtcagtgatacctttttattctatggaactctaacctattcgtgtcatattgaccttttgctgcatgagtcataaattatgaaatcagtcttacagtttttgaaatgtagccagcatttgtaaggctaaacctttttcatgaactgaatttaagtgaataaccaagccacagttcctcctcaaatggagagtgatgatcgacatttgaatctctttgccctttccaacggctatggcatcaggttctaaaataagctcgtaatttttcctgttattttaataatatggaaatattagcatagtgtttcttttgatagtgatagactataatccatatttaaattttatagagaagaaattttattgtactgtgatgtagatatttattatccaggtaaggatttgcccggtgtgtattttttacaattgagacattttactttaatctttaaaaaaaatgcattaaaaacacactcaaaaaaaaaaaaaaaaaaaaaaaaaaaaaaccagactgggggaaaaaaggtttggccttatcacagaatttttactgtgctgtataaatgtttgcaaatgcgaaaagtgtgcatttatagtgtgtttccacattaattaatgccgccttcaagagcaatattgtgcaggtaaaacgctgtttgtggctttctgttgcacagttaaagctgacccaccctatgcacaagacaatcaaatataaatctgtcctcctcaggatgcagataatactcatgtaaattatggagcacaatgtaagacaaaaggagacactttacatatgtattgttgatacagaaattatcagggcatgaatgagctgatgtgacattatgccacttctttcttttggttctcccttattaacttggcatttttaatttgaccatagagccaaattagttctccatgctttcttcgtagaaaatccttttttttcccataatgttttcatgccctgagaatcagaaaaatactacagaatagaaaaagatttacagtcattggaagatttgtgttttgcaaacagtgttaagtgatattgctagatggtgatatttttttcagcctaaaactctgttgaaatctgtgatcaaaatgttttaaactatccaaaaaaaatttgtatatttgggaaaaatggatttttacatagcttttgtatgcagatataaaactgtaattatgaatatagtgggcgtagataaactcataagcttaaattctaaaaaagaaaaagcttataacagatat

SEQ ID NO: 3525 - protein, 505 aa, Homo sapiens; identical to SEQ ID NO: 3519

SEQ ID NO: 3526 - DNA, 6344 bp, Homo sapiens
cggcggggattaactttgcatgaataatgtgagtgcgcttggaaaagagacctcctgctccgcgggctcggggcaagagcccgcaggctaccttccccgggcaggggcgctcaacccaaccggctccagggcactggtaatttggctagaggaccgcgcggaggcagcgggatctgcgatttccttctggttggctgtcctgcgtgggtgccaagttccacacatgatttaatgaataagaaggagatgtcagtgaaaaaagggatccagaatgattactaacctatgactcccaacagtatgacagaaaatggccttacagcctgggacaaaccgaagcactgtccagaccgagaacacgactggaagctagtaggaatgtctgaagcctgcctacataggaagagccattcagagaggcgcagcacgttgaaaaatgaacagtcgtcgccacatctcatccagaccacttggactagctcaatattccatctggaccatgatgatgtgaacgaccagagtgtctcaagtgcccagaccttccaaacggaggagaagaaatgtaaagggtacatccccagttacttagacaaggacgagctctgtgtagtgtgtggtgacaaagccaccgggtatcactaccgctgtatcacgtgtgaaggctgcaagggtttctttagaagaaccattcagaaaaatctccatccatcctattcctgtaaatatgaaggaaaatgtgtcatagacaaagtcacgcgaaatcagtgccaggaatgtcgctttaagaaatgcatctatgttggcatggcaacagatttggtgctggatgacagcaagaggctggccaagaggaagctgatagaggagaaccgggagaaaagacggcgggaagagctgcagaagtccatcgggcacaagccagagcccacagacgaggaatgggagctcatcaaaactgtcaccgaagcccatgtggcgaccaacgcccaaggcagccactggaagcaaaaacggaaattcctgccagaagacattggacaagcaccaatagtcaatgccccagaaggtggaaaggttgacttggaagccttcagccattttacaaaaatcatcacaccagcaattaccagagtggtggattttgccaaaaagttgcctatgttttgtgagctgccatgtgaagaccagatcatcctcctcaaaggctgctgcatggagatcatgtcccttcgcgctgctgtgcgctatgacccagaaagtgagactttaaccttgaatggggaaatggcagtgacacggggccagctgaaaaatgggggtcttggggtggtgtcagacgccatctttgacctgggcatgtctctgtcttctttcaacctggatgacactgaagtagccctccttcaggccgtcctgctgatgtcttcagatcgcccggggcttgcctgtgttgagagaatagaaaagtaccaagatagtttcctgctggcctttgaacactatatcaattaccgaaaacaccacgtgacacacttttggccaaaactcctgatgaaggtgacagatctgcggatgataggagcctgccatgccagccgcttcctgcacatgaaggtggaatgccccacagaactcttcccccctttgttcttggaagtgttcgaggattagactgactggattcattctcataattcctacagcactactgggtgtcatttcattccattgcctagctcttttttgtttgtttctttgtgttgggagggattatttgggagggaaaagggaagtagtccttggcatagacatggatgaaattgccccttgaatgcgggtacttgaaactattgcatttcgttctccggtcctgtgatgtgaatgctctgaaggttttatggttgtggaggtggggtgggggacaatcattaactcaccagcaccaagcatcaccagctcccacccgtccctggtccaagacttgagtcagcaaaatggcgccacaggacactaaagaagccttaaaaccaagataatacgaccacctccacccaatcctgatgttcgcagggctgaagttaacagagcacagaccacctttagttagatgtggctttcagccttttagggaaagactcgaacaaattttcatctattcaagagcatgctgtttgcagcactctttatggtctcctaggagcataacttggaatgtacaggaatatttgtgtcctaaaaaaatcagctgcccttccaatatcatttttataacgttatggtttaattcaagttatacaaaggtgtgactcaaggatgtgcaggtattgactgatggaggccaacaaggaaaatattttttttcagtgagcccagagaaattagaaatcttcaccaatgtcagtgactgcatggtttccaaaaattcacatagtattacctcacagtaggaaggcttctttcccatttaggctcagagaacacttttacagaaatcaaacctatttacagggtggcaccccttttctgtggcatctgatctgtcatctcccaagctcctgaagttctttatccaggttgtatctttgctgagctgacaacagatttctctatggatcaaatattctaatcaaggaaagatacggtgaaacttcagtcttcttctggagaaatgctgaggcgagattagtgcagctacattctgagttgaaggaaatgcagtgttctgagggcccctttgtgtcctgatggctggaggacgcttcctcctggttagatcctcaagctccttgcctcattgacaaatgtctcctagtcccctttttccctctgactctgaggaactaaatagcttgactatctctaaacagagactggccctgccactgaccctcctgtccctctcatagcataccctgacagatactcaatagaaaacacctgcagaccatgtgcacacttaactttcctgcccaacctgcctccccaacggcccatgctagaatagcttgtgcccagaaaacaaacagtgacacttcatctcttcagcgtcagaaaatgggcatagaatgtacccatgcaattgaatgtatctcattctccactggcatagtagatataaactattcctttgcctaccttttactgccttatcctggaaatattggggaaaataagccatatcagtgagatttacctaaaaacaaaggaaggaaagtcactatggaaaccaagtagatgctttttgtaagtttggtggagcataactggcccagaagtctgggtgcctgagttctagttcgtgctctgtcaactggtagatttgtaattctaggtcttggttttcttacctggtgaataagtcatgatctctaaaacccttcctgcccttaatattgtctgaatttcaaggggaaaaaaaaaatctggttcctttaattatttttttttaacacttaaattcctaactttattagacaagaagtatggcccacttaacagttaaggaacgtaaatttgttattggctcgaaataataatttgacacaatactagtcaaccatttagaggccttggaaaaagaagaggaacagcactgaaaattccaagtatgattggaaattatctgggagcggggaattaaatattcaatgcatgaaagcaattgtactggcttctgggaaaaaggaaacaagaacattgctatggaacttgttacccagagaaaggaagtgaaaagatttacaattataagcacgaaattcattggcagattacctgctttatctacagacagattgttttggggtttggttttgtctaggcagcctctggccaggctccttaattgcttgctctgctaatatttcagcttcctctcttgactccttgaggaaccaaccgctctttggaagacaaacacttagccacctctgtgctccagggtaaccctgagaagctctgctgtctggggcaagctttctttccaaagggaatgagaggaaggcaagcaggcagggtcctgcagcgtcaggccttctggggaaagtttcctcattttgtttgacagggtcctcagtacatcagacacccagatttgaatataagttcagagcctgatctcaagctaaatcagaatgctttggggactaaccatgatcgagaattggccaaatagtatggcatataaacagccatccagccagccgcaagtaaaggaacgtttgatccttggcaccttaaatgattgattgccttcaataggcaaactgctggtctggaaatctcgttgaaggctgaatacttcatgcggagtaggacaagccttagcccaccttcaggttgaaaggaaaggccataggactcaaaagataatgactctgaaactaaactccttccttctgaagctgacagaggtacttagtgcatctcaagactccatctcataaaactcatttgtgagggatttgctctagatttttctaaacattttttcatctattgtccagacttgcaaatccagtgtggacctgatggagatacccttcacacctgcgctcccaccccctcggcagggagacgtctcagtagaggagaacacacccattatgctgggatttgtatttataaatcacttcccttttagggatgagcggtgtggggcgtgtgtgcgtgtgagtgtatgcgcgtgcgtgtgtgaccctcaagtgtactttgctcaatttagacgtgcagtatttccagaaacaatgaaaaaagtaagatgttttcttctttatgattctgctcaaaacaccacgtgccgcctcagagctttttctagagcctcggtcctcaatgacgcgcttgacctgttgatgcctcagcccagcgaagcccctcacctgtgccccgggcgacagctcttcagtgtgcagtgcaggcctggggtggactgccaggccttcgctctgtgccagcaacgccgttcttgttgctcctccatgaacaggggtacaagccctggcccctcctcgacactaagccccccacagactcagcctccaaggaaccgctgagcacccttgaagcatgtcattgtcagtgatacctttttattctatggaactctaacctattcgtgtcatattgaccttttgctgcatgagtcataaattatgaaatcagtcttacagtttttgaaatgtagccagcatttgtaaggctaaacctttttcatgaactgaatttaagtgaataaccaagccacagttcctcctcaaatggagagtgatgatcgacatttgaatctctttgccctttccaacggctatggcatcaggttctaaaataagctcgtaatttttcctgttattttaataatatggaaatattagcatagtgtttcttttgatagtgatagactataatccatatttaaattttatagagaagaaattttattgtactgtgatgtagatatttattatccaggtaaggatttgcccggtgtgtattttttacaattgagacattttactttaatctttaaaaaaaatgcattaaaaacacactcaaaaaaaaaaaaaaaaaaaaaaaaaaaaaaccagactgggggaaaaaaggtttggccttatcacagaatttttactgtgctgtataaatgtttgcaaatgcgaaaagtgtgcatttatagtgtgtttccacattaattaatgccgccttcaagagcaatattgtgcaggtaaaacgctgtttgtggctttctgttgcacagttaaagctgacccaccctatgcacaagacaatcaaatataaatctgtcctcctcaggatgcagataatactcatgtaaattatggagcacaatgtaagacaaaaggagacactttacatatgtattgttgatacagaaattatcagggcatgaatgagctgatgtgacattatgccacttctttcttttggttctcccttattaacttggcatttttaatttgaccatagagccaaattagttctccatgctttcttcgtagaaaatccttttttttcccataatgttttcatgccctgagaatcagaaaaatactacagaatagaaaaagatttacagtcattggaagatttgtgttttgcaaacagtgttaagtgatattgctagatggtgatatttttttcagcctaaaactctgttgaaatctgtgatcaaaatgttttaaactatccaaaaaaaatttgtatatttgggaaaaatggatttttacatagcttttgtatgcagatataaaactgtaattatgaatatagtgggcgtagataaactcataagcttaaattctaaaaaagaaaaagcttataacagatat

SEQ ID NO: 3527 - protein, 461 aa, Homo sapiens; identical to SEQ ID NO: 335

SEQ ID NO: 3528 - DNA, 894 bp, Homo sapiens
cggcgcggccctggctgcggccgcctctcttcgcccaaggagttgacattttgcaggactcgcgcgacgcccagtcgccggcgctccccgggaccccgccgccgggaggagggggcggaggagggtggagactgcggggcttggccaaggaaggcgcacatcctcgggcgggcggccgtgacgcggcggggattaactttgcatgaataatatctgcgatttccttctggttggctgtcctgcgtgggtgccaagttccacacatgatttaatgaataagaagctcgccagagaggcaaactccagcattttatatttcatctgcccccagtgacttcactgtaggaagaggaaatgcagaaaaacaaacgtcttgaagactgaaagcctgttattcaaagaggttagcagtagactgttggaagtaagaaaatggccttacagcctgggacaaaccgaagcactgtccagaccgagaacacgactggaagctagtaggaatgtctgaagcctgcctacataggaagagccattcagagaggcgcagcacgttgaaaaatgaacagtcgtcgccacatctcatccagaccacttggactagctcaatattccatctggaccatgatgatgtgaacgaccagagtgtctcaagtgcccagaccttccaaacggaggagaagaaatgtaaagggtacatccccagttacttagacaaggacgagctctgtgtagtgtgtggtgacaaagccaccgggtatcactaccgctgtatcacgtgtgaaggctgcaagggtttctttagaagaaccattcagaaaaatctccatccatcctattcctgtaaatatgaaggaaaatgtgtcatagacaaagtcacgcgaaatcagtgccagg

SEQ ID NO: 3529 - protein, 130 aa, Homo sapiens
MSEACLHRKSHSERRSTLKNEQSSPHLIQTTWTSSIFHLDHDDVNDQSVSSAQTFQTEEKKCKGYIPSYLDKDELCVVCGDKATGYHYRCITCEGCKGFFRRTIQKNLHPSYSCKYEGKCVIDKVTRNQC

SEQ ID NO: 3530 - DNA, 754 bp, Homo sapiens
ggcaagagcccgcaggctaccttccccgggcaggggcgctcaacccaaccggctccagggcactggtcagccagttcctgaggatcatcctgataaactccacaatgggtcactaacagggccacttcttgctcatgatctgcgatttccttctggttggctgtcctgcgtgggtgccaagttccacacatgatttaatgaataagaagggggcttggaggctcatagcaaaggtccttgaagagagcaagaaaaagtcttcccaggaaaagtggacacctgagtgagtgttacaacgagaaggggggcatcccaggcaaggcagctaccaagcacaggtgtgaaggagatgtcagtgaaaaaagggatccagaatgattactaacctatgactcccaacagtatgacagaaaatggccttacagcctgggacaaaccgaagcactgtccagaccgagaacacgactggaagctagtaggaatgtctgaagcctgcctacataggaagagccattcagagaggcgcagcacgttgaaaaatgaacagtcgtcgccacatctcatccagaccacttggactagctcaatattccatctggaccatgatgatgtgaacgaccagagtgtctcaagtgcccagaccttccaaacggaggagaagaaatgtaaagggtacatccccagttacttagacaaggacgagctctgtgtagtgtgtggtgacaaagccaccgggtatcactaccgctgtatc

SEQ ID NO: 3531 - protein, 121 aa, Homo sapiens
MTPNSMTENGLTAWDKPKHCPDREHDWKLVGMSEACLHRKSHSERRSTLKNEQSSPHLIQTTWTSSIFHLDHDDVNDQSVSSAQTFQTEEKKCKGYIPSYLDKDELCVVCGDKATGYHYRC

SEQ ID NO: 3532 - DNA, 571 bp, Homo sapiens
ggttggctgtcctgcgtgggtgccaagttccacacatgatttaatgaataagaaggagatgtcagtgaaaaaagggatccagaatgattactaacctatgactcccaacagtatgacagaaaatggccttacagcctgggacaaaccgaagcactgtccagaccgagaacacgactggaagctagtaggaatgtctgaagcctgcctacataggaagagccattcagagaggcgcagcacgttgaaaaatgaacagtcgtcgccacatctcatccagaccacttggactagctcaatattccatctggaccatgatgatgtgaacgaccagagtgtctcaagtgcccagaccttccaaacggaggagaagaaatgtaaaggtaaccagatttttattagcccattatcatgtgtttcaacaagaaaaaaaatatccctgttgtagctgtgtacttcatctacatttctcttccaatgtatggtgtcccatgttttctccaactgttcttttactaggcgtccttttcttcaaatattcttttaaacataaataaataagtggaatccaaag

SEQ ID NO: 3533 - protein, 115 aa, Homo sapiens
MTPNSMTENGLTAWDKPKHCPDREHDWKLVGMSEACLHRKSHSERRSTLKNEQSSPHLIQTTWTSSIFHLDHDDVNDQSVSSAQTFQTEEKKCKGNQIFISPLSCVSTRKKISLL

SEQ ID NO: 3534 - DNA, 539 bp, Homo sapiens
ctcctgctccgcgggctcggggcaagagcccgcaggctaccttccccgggcaggggcgctcaacccaaccggctccagggcactgatctgcgatttccttctggttggctgtcctgcgtgggtgccaagttccacacatgatttaatgaataagaagggggcttggaggctcatagcaaaggtccttgaagagagcaagaaaaagtcttcccaggaaaagtggacacctgagtgagtgttacaacgagaaggggggcatcccaggcaaggcagctaccaagcacaggtgtgaaggagatgtcagtgaaaaaagggatccagaatgattactaacctatgactcccaacagtatgacagaaaatggccttacagcctgggacaaaccgaagcactgtccagaccgagaacacgactggaagctagtaggaatgtctgaagcctgcctacataggaagagccattcagagaggcgcagcacgttgaaaaatgaacagtcgtcgccacatctcatccagaccacttggactagctcaatatt

SEQ ID NO: 3535 - protein, 66 aa, Homo sapiens
MTPNSMTENGLTAWDKPKHCPDREHDWKLVGMSEACLHRKSHSERRSTLKNEQSSPHLIQTTWTSS

SEQ ID NO: 3536 - DNA, 592 bp, Homo sapiens
atgaataatgtgagtgcgcttggaaaagagacctcctgctccgcgggctcggggcaagagcccgcaggctaccttccccgggcaggggcgctcaacccaaccggctccagggcactggtaatttggctagaggaccgcgcggaggcagcgggatctgcgatttccttctggttggctgtcctgcgtgggtgccaagttccacacatgatttaatgaataagaagggggcttggaggctcatagcaaaggtccttgaagagagcaagaaaaagtcttcccaggaaaagtggacacctgagtgagtgttacaacgagaaggggggcatcccaggcaaggcagctaccaagcacaggtgtgaaggagatgtcagtgaaaaaagggatccagaatgattactaacctatgactcccaacagtatgacagaaaatggccttacagcctgggacaaaccgaagcactgtccagaccgagaacacgactggaagctagtaggaatgtctgaagcctgcctacataggaagagccattcagagaggcgcagcacgttgaaaaatgaacagtcgtcgccacatctcatccagaccacttgg

SEQ ID NO: 3537 - protein, 70 aa, Homo sapiens [sequence omitted]

SEQ ID NO: 3538 - DNA, 1172 bp, Homo sapiens
ggcctccaccgccttccccggctgcccggcagcctcccctcgctcgctctcctcttcctctagggccccagcgcagctcgggagcccgcgcaccgaggcgctaggggcaccgcgcactagagggacacccgccgcgcctggacagcccccggcgggcgcccccctcgcacctcctgccccgcgcgggccgcgctcccctcccccgcgcctgtgtccccagggcgcagggccgcgcgtccagccccagacccgccggggtccctggggacgcgccagcccggcagtggctcgacgatggaggagccgcagcgcgcccgctcgcacacagtcaccaccaccgccagctccttcgcagagaacttctccaccagcagcagcagcttcgcctacgaccgggagttcctccgcaccctgcccggcttcctcatcgtggccgagatcgttctggggctgctggtatggacgcttattgctggaactgagtacttccgggtccccgcatttggctgggtcatgtttgtagctgtattttactgggtcctcaccgtcttcttcctcattatctacataacaatgacctacaccaggattccccaggtgccctggacaacagtgggcctgtgctttaacggcagtgccttcgtcttgtacctctctgccgctgttgtagatgcatcttccgtctcccctgagagggacagtcacaacttcaacagctgggcggcctcatcgttctttgccttcctggtcaccatctgctacgctggaaatacatatttcagttttatagcatggagatccaggaccatacagtgatttaccattttgataattaaaaggaaaaaaaaaggaagactctcactgtaaaaacagctgtaggtataatgtatattcccagagaattgtatttaactaattaatgttttttatattcttaaatttgctcacaaattgtggtttgttacaattaaactggatacttatttgcaaagtgttgtagcttataatgaactcttaagtatcttattaatgtattaatgtcttcatagatcatattttcttagacaatgtttaaatagataaattgctaatattgagaatgtgtcaagtttgtaaacctaacttttaagatgccagattcttttttgattaaatgttgcaaaatcccaagt

SEQ ID NO: 3539 - protein, 173 aa, Homo sapiens; identical to SEQ ID NO: 337

SEQ ID NO: 3540 - DNA, 990 bp, Homo sapiens
ccgccttccccggctgcccggcagcctcccctcgctcgctctcctcttcctctagggccccagcgcagctcgggagcccgcgcaccgaggcgctaggggcaccgcgcactagagggacacccgccgcgcctggacagcccccggcgggcgcccccctcgcacctcctgccccgcgcgggccgcgctcccctcccccgcgcctgtgtccccagggcgcagggccgcgcgtccagccccagacccgccggggtccctggggacgcgccagcccggcagtggctcgacgatggaggagccgcagcgcgcccgctcgcacacagtcaccaccaccgccagctccttcgcagagaacttctccaccagcagcagcagcttcgcctacgaccgggagttcctccgcaccctgcccggcttcctcatcgtggccgagatcggcctgtgctttaacggcagtgccttcgtcttgtacctctctgccgctgttgtagatgcatcttccgtctcccctgagagggacagtcacaacttcaacagctgggcggcctcatcgttctttgccttcctggtcaccatctgctacgctggaaatacatatttcagttttatagcatggagatccaggaccatacagtgatttaccattttgataattaaaaggaaaaaaaaaggaagactctcactgtaaaaacagctgtaggtataatgtatattcccagagaattgtatttaactaattaatgttttttatattcttaaatttgctcacaaattgtggtttgttacaattaaactggatacttatttgcaaagtgttgtagcttataatgaactcttaagtatcttattaatgtattaatgtcttcatagatcatattttcttagacaatgtttaaatagataaattgctaatattgagaatgtgtcaagtttgtaaacctaacttttaagatgccagattcttttttgattaaatgttgcaaaatcccaagt

SEQ ID NO: 3541 - protein, 115 aa, Homo sapiens
MEEPQRARSHTVTTTASSFAENFSTSSSSFAYDREFLRTLPGFLIVAEIGLCFNGSAFVLYLSAAVVDASSVSPERDSHNFNSWAASSFFAFLVTICYAGNTYFSFIAWRSRTIQ

SEQ ID NO: 3542 - DNA, 1016 bp, Homo sapiens
cccctgccttctactcacgtctctaccaaccctcttccccttccccatttctttccaagggaaatagcagtttcttgtttctttagagttcagaaaaaatgggccatacttactgagagatgggatcattgcatgttcacaggtcgtagactcagagagtctttctttccccatctcctctctggccccctcgtccacatgggctcgtgcacaaggcccaggacgtcagggcagttctggccaggctgagctttccctgaattctctttcattcattctcattcattctttccttgtataaagaactagacatgcatgagagccctgaaacccatcctcaaagatgttcgttgcagtagcatttgtaatccttgaaaaattagcaacattgaaatgcccatcaataggggaaaagttaaattatgaagtattagtggcaagacaagactaaatggcttgggcctgtgctttaacggcagtgccttcgtcttgtacctctctgccgctgttgtagatgcatcttccgtctcccctgagagggacagtcacaacttcaacagctgggcggcctcatcgttctttgccttcctggtcaccatctgctacgctggaaatacatatttcagttttatagcatggagatccaggaccatacagtgatttaccattttgataattaaaaggaaaaaaaaaggaagactctcactgtaaaaacagctgtaggtataatgtatattcccagagaattgtatttaactaattaatgttttttatattcttaaatttgctcacaaattgtggtttgttacaattaaactggatacttatttgcaaagtgttgtagcttataatgaactcttaagtatcttattaatgtattaatgtcttcatagatcatattttcttagacaatgtttaaatagataaattgctaatattgagaatgtgtcaagtttgtaaacctaacttttaagatgccagattcttttttgattaaatgttgcaaaatcccaagt

SEQ ID NO: 3543 - protein, 39 aa, Homo sapiens
MHLPSPLRGTVTTSTAGRPHRSLPSWSPSATLEIHISVL

SEQ ID NO: 3544 - DNA, 2505 bp, Homo sapiens
acagttgggtgagggagataactcgtgctcacaggaagccacgcacccttgaaaggcaccgggtccttcttagcatcgtgcttcctgagcaagcctggcattgcctcacagaccttcctcagagccgctttcagaaaagcaagctgcttctggttgggcccagacctgccttgaggagcctgtagagttaaaaaatgaaccccacggatatagcagacaccaccctcgatgaaagcatatacagcaattactatctgtatgaaagtatccccaagccttgcaccaaagaaggcatcaaggcatttggggagctcttcctgcccccactgtattccttggtttttgtatttggtctgcttggaaattctgtggtggttctggtcctgttcaaatacaagcggctcaggtccatgactgatgtgtacctgctcaaccttgccatctcggatctgctcttcgtgttttccctccctttttggggctactatgcagcagaccagtgggtttttgggctaggtctgtgcaagatgatttcctggatgtacttggtgggcttttacagtggcatattctttgtcatgctcatgagcattgatagatacctggcaattgtgcacgcggtgttttccttgagggcaaggaccttgacttatggggtcatcaccagtttggctacatggtcagtggctgtgttcgcctcccttcctggctttctgttcagcacttgttatactgagcgcaaccatacctactgcaaaaccaagtactctctcaactccacgacgtggaaggttctcagctccctggaaatcaacattctcggattggtgatccccttagggatcatgctgttttgctactccatgatcatcaggaccttgcagcattgtaaaaatgagaagaagaacaaggcggtgaagatgatctttgccgtggtggtcctcttccttgggttctggacaccttacaacatagtgctcttcctagagaccctggtggagctagaagtccttcaggactgcacctttgaaagatacttggactatgccatccaggccacagaaactctggcttttgttcactgctgccttaatcccatcatctacttttttctgggggagaaatttcgcaagtacatcctacagctcttcaaaacctgcaggggcctttttgtgctctgccaatactgtgggctcctccaaatttactctgctgacacccccagctcatcttacacgcagtccaccatggatcatgatctccatgatgctctgtagaaaaatgaaatggtgaaatgcagagtcaatgaactttccacattcagagcttacttaaaattgtattttagtaagagattcctgagccagtgtcaggaggaaggcttacacccacagtggaaagacagcttctcatcctgcaggcagctttttctctcccactagacaagtccagcctggcaagggttcacctgggctgaggcatccttcctcacaccaggcttgcctgcaggcatgagtcagtctgatgagaactctgagcagtgcttgaatgaagttgtaggtaatattgcaaggcaaagactattcccttctaacctgaactgatgggtttctccagagggaattgcagagtactggctgatggagtaaatcgctaccttttgctgtggcaaatgggccctctaattaatttcttgcttttgcggaacaatatagataactgtttttctaataacatatctcaggcaaagtatattccattgagccagatgtatgaagaaacaattagcgaagtgatgaaaccagatctcaattatttattgtaaaggattatctgttaattgaaaccaaactttttatactgatataagggtaaggatatgaagacattagccaaggtctgctttccaaacgtgaactacaaggcattcaaaatccaaacatatttatgaaaattcaaacacagtttctcacttgtttgtggacatgttttgttctaattttaacagaggaatattaaaaaattttaaatagtgctgggattacaggtgtgagccatcacgcccggccacttgtttattttttattttattttattttatttttgagatggagtctcactctgtcacccaagctggagtgcagtggcactcggttcactgcaaagtctgcctcccaggttcaagcgattctcctgcctcagcttctcaagcagctgggattagaggtgtgcaccactacgccaggctaatttttgtatttttagtagagatggggtttcaccatattggccaggctagtcttgaactcctgacctcaggtgatctgcctgcttcagcctcccaaagtgctgggattacaggcgtgagccacctcgcccagccaaggtcttttacttgtttataaacagtctcttcataattaaaattaaggattaataaagtatgacaatacctccttaatcattttgaagtgcctgctatcaattgaaataaaaacaatcaac

SEQ ID NO: 3545 - protein, 360 aa, Homo sapiens
MNPTDIADTTLDESIYSNYYLYESIPKPCTKEGIKAFGELFLPPLYSLVFVFGLLGNSVVVLVLFKYKRLRSMTDVYLLNLAISDLLFVFSLPFWGYYAADQWVFGLGLCKMISWMYLVGFYSGIFFVMLMSIDRYLAIVHAVFSLRARTLTYGVITSLATWSVAVFASLPGFLFSTCYTERNHTYCKTKYSLNSTTWKVLSSLEINILGLVIPLGIMLFCYSMIIRTLQHCKNEKKNKAVKMIFAVVVLFLGFWTPYNIVLFLETLVELEVLQDCTFERYLDYAIQATETLAFVHCCLNPIIYFFLGEKFRKYILQLFKTCRGLFVLCQYCGLLQIYSADTPSSSYTQSTMDHDLHDAL

SEQ ID NO: 3546 - DNA, 661 bp, Homo sapiens
agggtctcaagatggccaggttttggacttacaccataggctctactggtccttaggcctttggactgaggctggaaccacatcctcagctctcctggatctccagcttggcaactgcagaccttgggacatttcagattccataatcatgacgaaggcgatggcagcagttttccaggctagctgtcttcacaacccgatggctctcttcttttctgctgccacagagactgactgtctgcctcctgcaaatttgaaatttggcaaacctgcctcctctgcttctcagaaccaaactggggccaggagaacttctgacccaagtgttgatcacctctcttcctgcacctcactgtgcaccctctgctcaggaaatgcctttggcgtgttgctgacgtctgtccctgctccatctcttaccaccctgcacttcaccctttcccacacaggtttcacctgatctcagctgctttgggcagaccatccaggtattttggagtctgaaaaggatctctgtctctaagtctggtgcaaatggagtttgggggttttaaaattcattcttcttgctgctgtttcacaatttctcagaaaaggtgaaaatgcagactttggcagttatgttcaatatgaaaagtcttaataaagtaatttttgacct

SEQ ID NO: 3547 - protein, 103 aa, Homo sapiens
MTKAMAAVFQASCLHNPMALFFSAATETDCLPPANLKFGKPASSASQNQTGARRTSDPSVDHLSSCTSLCTLCSGNAFGVLLTSVPAPSLTTLHFTLSHTGFT

SEQ ID NO: 3548 - DNA, 2176 bp, Homo sapiens
ggctgctgggccgacgaggggcggtgccaggccgtgggtccttagtcaagtgacgcgaagcggccggcctgggcgccgactgcagagccgggaggctggtggtcatgccggggttcctggttcgcatcctccctctgttgctggttctgctgcttctgggccctacgcgcggcttgcgcaatgccacccagaggatgtttgaaattgactatagccgggactccttcctcaaggatggccagccatttcgctacatctcaggaagcattcactactcccgtgtgccccgcttctactggaaggaccggctgctgaagatgaagatggctgggctgaacgccatccagacattacctggcagctgtggacaagtggttgggagtccttctgcccaagatgaagcctctcctctatcagaatggagggccagttataacagtgcaggcagcaacatcacagatgctttcctaagccagaggaagtgtgagcccaaaggacccttgatcaattctgaattctatactggctggctagatcactggggccaacctcactccacaatcaagaccgaagcagtggcttcctccctctatgatatacttgcccgtggggcgagtgtgaacttgtacatgtttataggtgggaccaattttgcctattggaatggggccaactcaccctatgcagcacagcccaccagctacgactatgatgccccactgagtgaggctggggacctcactgagaagtattttgctctgcgaaacatcatccagaagtttgaaaaagtaccagaaggtcctatccctccatctacaccaaagtttgcatatggaaaggtcactttggaaaagttaaagacagtgggagcagctctggacattctgtgtccctctgggcccatcaaaagcctttatcccttgacatttatccaggtgaaacagcattatgggtttgtgctgtaccggacaacacttcctcaagattgcagcaacccagcacctctctcttcacccctcaatggagtccacgatcgagcatatgttgctgtggatgggatcccccagggagtccttgagcgaaacaatgtgatcactctgaacataacagggaaagctggagccactctggaccttctggtagagaacatgggacgtgtgaactatggtgcatatatcaacgattttaagggtttggtttctaacctgactctcagttccaatatcctcacggactggacgatctttccactggacactgaggatgcagtgtgcagccacctggggggctggggacaccgtgacagtggccaccatgatgaagcctgggcccacaactcatccaactacacgctcccggccttttatatggggaacttctccattcccagtgggatcccagacttgccccaggacacctttatccagtttcctggatggaccaagggccaggtctggattaatggctttaaccttggccgctattggccagcccggggccctcagttgaccttgtttgtgccccagcacatcctgatgacctcggccccaaacaccatcaccgtgctggaactggagtgggcaccctgcagcagtgatgatccagaactatgtgctgtgacgttcgtggacaggccagttattggctcatctgtgacctacgatcatccctccaaacctgttgaaaaaagactcatgcccccacccccgcaaaaaaacaaagattcatggctggaccatgtatgatgatgaaagcctgtgtctttgagggattctaccctgaacatacctcacagatcctccctgtcatgccacatttcactgattggaatgtggaaatggaaaaggaatttaggatgtgcattttcacctgaggtttccctgcatccctgcagtgccaaagccccaccttcagggaccacctggaatgtgtgaggggctgacagcacagtaacgtgcatacatatctgcagggctggaatggaagctttaaaggtggtagtgatttttattttggaagaatcatgttacctttttgttaaataaaatttgtactcaaatgatgatgtcactgtttttaatgtgcaggtattgaattatatggtctgacttaaatcataactagacttgagtgggctgaataaaccacttcactaacttgaagttcaaaaggatgg

SEQ ID NO: 3549 - protein, 546 aa, Homo sapiens
MPGFLVRILPLLLVLLLLGPTRGLRNATQRMFEIDYSRDSFLKDGQPFRYISGSIHYSRVPRFYWKDRLLKMKMAGLNAIQTLPGSCGQVVGSPSAQDEASPLSEWRASYNSAGSNITDAFLSQRKCEPKGPLINSEFYTGWLDHWGQPHSTIKTEAVASSLYDILARGASVNLYMFIGGTNFAYWNGANSPYAAQPTSYDYDAPLSEAGDLTEKYFALRNIIQKFEKVPEGPIPPSTPKFAYGKVTLEKLKTVGAALDILCPSGPIKSLYPLTFIQVKQHYGFVLYRTTLPQDCSNPAPLSSPLNGVHDRAYVAVDGIPQGVLERNNVITLNITGKAGATLDLLVENMGRVNYGAYINDFKGLVSNLTLSSNILTDWTIFPLDTEDAVCSHLGGWGHRDSGHHDEAWAHNSSNYTLPAFYMGNFSIPSGIPDLPQDTFIQFPGWTKGQVWINGFNLGRYWPARGPQLTLFVPQHILMTSAPNTITVLELEWAPCSSDDPELCAVTFVDRPVIGSSVTYDHPSKPVEKRLMPPPPQKNKDSWLDHV

SEQ ID NO: 3550 - DNA, 2609 bp, Homo sapiens
acagcggggcggggcgcggggctgagcaggcgcgagggctggctgctgggccgacgaggggcggtgccaggccgtgggtccttagtcaagtgacgcgaagcggccggcctgggcgccgactgcagagccgggaggctggtggtcatgccggggttcctggttcgcatcctccctctgttgctggttctgctgcttctgggccctacgcgcggcttgcgcaatgccacccagaggatgtttgaaattgactatagccgggactccttcctcaaggatggccagccatttcgctacatctcaggaagcattcactactcccgtgtgccccgcttctactggaaggaccggctgctgaagatgaagatggctgggctgaacgccatccagacgtatgtgccctggaactttcatgagccctggccaggacagtaccagttttctgaggaccatgatgtggaatattttcttcggctggctcatgagctgggactgctggttatcctgaggcccgggccctacatctgtgcagagtgggaaatgggaggattacctgcttggctgctagagaaagagtctattcttctccgctcctccgacccagattacctggcagctgtggacaagtggttgggagtccttctgcccaagatgaagcctctcctctatcagaatggagggccagttataacagtgcaggttgaaaatgaatatggcagctactttgcctgtgattttgactacctgcgcttcctgcagaagcgctttcgccaccatctgggggatgatgtggttctgtttaccactgatggagcacataaaacattcctgaaatgtggggccctgcagggcctctacaccacggtggactttggaacaggcagcaacatcacagatgctttcctaagccagaggaagtgtgagcccaaaggacccttgatcaattctgaattctatactggctggctagatcactggggccaacctcactccacaatcaagaccgaagcagtggcttcctccctctatgatatacttgcccgtggggcgagtgtgaacttgtacatgtttataggtgggaccaattttgcctattggaatggggccaactcaccctatgcagcacagcccaccagctacgactatgatgccccactgagtgaggctggggacctcactgagaagtattttgctctgcgaaacatcatccagaagtttgaaaaagtaccagaaggtcctatccctccatctacaccaaagtttgcatatggaaaggtcactttggaaaagttaaagacagtgggagcagctctggacattctgtgtccctctgggcccatcaaaagcctttatcccttgacatttatccaggtgaaacagcattatgggtttgtgctgtaccggacaacacttcctcaagattgcagcaacccagcacctctctcttcacccctcaatggagtccacgatcgagcatatgttgctgtggatgggatcccccagggagtccttgagcgaaacaatgtgatcactctgaacataacagggaaagctggagccactctggaccttctggtagagaacatgggacgtgtgaactatggtgcatatatcaacgattttaagggtttggtttctaacctgactctcagttccaatatcctcacggactggacgatctttccactggacactgaggatgcagtgtgcagccacctggggggctggggacaccgtgacagtggccaccatgatgaagcctgggcccacaactcatccaactacacgctcccggccttttatatggggaacttctccattcccagtgggatcccagacttgccccaggacacctttatccagtttcctggatggaccaagggccaggtctggattaatggctttaaccttggccgctattggccagcccggggccctcagttgaccttgtttgtgccccagcacatcctgatgacctcggccccaaacaccatcaccgtgctggaactggagtgggcaccctgcagcagtgatgatccagaactatgtgctgtgacgttcgtggacaggccagttattggctcatctgtgacctacgatcatccctccaaacctgttgaaaaaagactcatgcccccacccccgcaaaaaaacaaagattcatggctggaccatgtatgatgatgaaagcctgtgtctttgagggattctaccctgaacatacctcacagatcctccctgtcatgccacatttcactgattggaatgtggaaatggaaaaggaatttaggatgtgcattttcacctgaggtttccctgcatccctgcagtgccaaagccccaccttcagggaccacctggaatgtgtgaggggctgacagcacagtaacgtgcatacatatctgcagggctggaatggaagctttaaaggtggtagtgatttttattttggaagaatcatgttacctttttgttaaataaaatttgtactcaaatgatgatgtcactgtttttaatgtgcaggtattgaattatatggtctgacttaaatcataactagacttgagtgggctgaataaaccacttcactaacttgaagttcaaaaggatgg

SEQ ID NO: 3551 - protein, 677 aa, Homo sapiens
MPGFLVRILPLLLVLLLLGPTRGLRNATQRMFEIDYSRDSFLKDGQPFRYISGSIHYSRVPRFYWKDRLLKMKMAGLNAIQTYVPWNFHEPWPGQYQFSEDHDVEYFLRLAHELGLLVILRPGPYICAEWEMGGLPAWLLEKESILLRSSDPDYLAAVDKWLGVLLPKMKPLLYQNGGPVITVQVENEYGSYFACDFDYLRFLQKRFRHHLGDDVVLFTTDGAHKTFLKCGALQGLYTTVDFGTGSNITDAFLSQRKCEPKGPLINSEFYTGWLDHWGQPHSTIKTEAVASSLYDILARGASVNLYMFIGGTNFAYWNGANSPYAAQPTSYDYDAPLSEAGDLTEKYFALRNIIQKFEKVPEGPIPPSTPKFAYGKVTLEKLKTVGAALDILCPSGPIKSLYPLTFIQVKQHYGFVLYRTTLPQDCSNPAPLSSPLNGVHDRAYVAVDGIPQGVLERNNVITLNITGKAGATLDLLVENMGRVNYGAYINDFKGLVSNLTLSSNILTDWTIFPLDTEDAVCSHLGGWGHRDSGHHDEAWAHNSSNYTLPAFYMGNFSIPSGIPDLPQDTFIQFPGWTKGQVWINGFNLGRYWPARGPQLTLFVPQHILMTSAPNTITVLELEWAPCSSDDPELCAVTFVDRPVIGSSVTYDHPSKPVEKRLMPPPPQKNKDSWLDHV

SEQ ID NO: 3552 - DNA, 663 bp, Homo sapiens
taatggctttaaccttggccgctattggccagcccggggccaccatcaccgtgctggaactggagtgggcaccctgcagcagtgatgatccagaactatgtgctgtgacgttcgtggacaggccagttattggctcatctgtgacctacgatcatccctccaaacctgttgaaaaaagactcatgcccccacccccgcaaaaaaacaaagattcatggctggaccatgtatgatgatgaaagcctgtgtctttgagggattctaccctgaacatacctcacagatcctccctgtcatgccacatttcactgattggaatgtggaaatggaaaaggaatttaggatgtgcattttcacctgaggtttccctgcatccctgcagtgccaaagccccaccttcagggaccacctggaatgtgtgaggggctgacagcacagtaacgtgcatacatatctgcagggctggaatggaagctttaaaggtggtagtgatttttattttggaagaatcatgttacctttttgttaaataaaatttgtactcaaatgatgatgtcactgtttttaatgtgcaggtattgaattatatggtctgacttaaatcataactagacttgagtgggctgaataaaccacttcactaacttgaagttcaaaaggatg

SEQ ID NO: 3553 - protein, 76 aa, Homo sapiens
MALTLAAIGQPGATITVLELEWAPCSSDDPELCAVTFVDRPVIGSSVTYDHPSKPVEKRLMPPPPQKNKDSWLDHV

SEQ ID NO: 3554 - DNA, 2063 bp, Homo sapiens
ggctgctgggccgacgaggggcggtgccaggccgtgggtccttagtcaagtgacgcgaagcggccggcctgggcgccgactgcagagccgggaggctggtggtcatgccggggttcctggttcgcatcctccctctgttgctggttctgctgcttctgggccctacgcgcggcttgcgcaatgccacccagaggatgtttgaaattgactatagccgggactccttcctcaaggatggccagccatttcgctacatctcaggaagcattcactactcccgtgtgccccgcttctactggaaggaccggctgctgaagatgaagatggctgggctgaacgccatccagacattacctggcagctgtggacaagtggttgggagtccttctgcccaagatgaagcctctcctctatcagaatggagggccagttataacagtgcaggcagcaacatcacagatgctttcctaagccagaggaagtgtgagcccaaaggacccttgatcaattctgaattctatactggctggctagatcactggggccaacctcactccacaatcaagaccgaagcagtggcttcctccctctatgatatacttgcccgtggggcgagtgtgaacttgtacatgtttataggtgggaccaattttgcctattggaatggggccaactcaccctatgcagcacagcccaccagctacgactatgatgccccactgagtgaggctggggacctcactgagaagtattttgctctgcgaaacatcatccagaagtttgaaaaagtaccagaaggtcctatccctccatctacaccaaagtttgcatatggaaaggtcactttggaaaagttaaagacagtgggagcagctctggacattctgtgtccctctgggcccatcaaaagcctttatcccttgacatttatccaggtgaaacagcattatgggtttgtgctgtaccggacaacacttcctcaagattgcagcaacccagcacctctctcttcacccctcaatggagtccacgatcgagcatatgttgctgtggatgggatcccccagggagtccttgagcgaaacaatgtgatcactctgaacataacagggaaagctggagccactctggaccttctggtagagaacatgggacgtgtgaactatggtgcatatatcaacgattttaagggtttggtttctaacctgactctcagttccaatatcctcacggactggacgatctttccactggacactgaggatgcagtgtgcagccacctggggggctggggacaccgtgacagtggccaccatgatgaagcctgggcccacaactcatccaactacacgctcccggccttttatatggggaacttctccattcccagtgggatcccagacttgccccaggacacctttatccagtttcctggatggaccaagggccaggtctggattaatggctttaaccttggccgctattggccagcccggggccctcagttgaccttgtttgtgccccagcacatcctgatgacctcggccccaaacaccatcaccgtgctggaactggagtgggcaccctgcagcagtgatgatccagaactatgtgctgtgacgttcgtggacaggccagttattggctcatctgtgacctacgatcatccctccaaacctgttgaaaaaagactcatgcccccacccccgcaaaaaaacaaagattcatggctggaccatgtatgatgatgaaagcctgtgtctttgagggattctaccctgaacatacctcacagatcctccctgtcatgccacatttcactgattggaatgtggaaatggaaaaggaatttaggatgtgcattttcacctgaggtttccctgcatccctgcagtgccaaagccccaccttcagggaccacctggaatgtgtgaggggctgacagcacagtaacgtgcatacatatctgcagggctggaatggaagctttaaaggtggtagtgatttttattttggaagaatcatgttacctttttgttaaataaaatttgtactcaaatgat

SEQ ID NO: 3555 - protein, 546 aa, Homo sapiens; identical to SEQ ID NO: 3549

SEQ ID NO: 3556 - DNA, 2496 bp, Homo sapiens
acagcggggcggggcgcggggctgagcaggcgcgagggctggctgctgggccgacgaggggcggtgccaggccgtgggtccttagtcaagtgacgcgaagcggccggcctgggcgccgactgcagagccgggaggctggtggtcatgccggggttcctggttcgcatcctccctctgttgctggttctgctgcttctgggccctacgcgcggcttgcgcaatgccacccagaggatgtttgaaattgactatagccgggactccttcctcaaggatggccagccatttcgctacatctcaggaagcattcactactcccgtgtgccccgcttctactggaaggaccggctgctgaagatgaagatggctgggctgaacgccatccagacgtatgtgccctggaactttcatgagccctggccaggacagtaccagttttctgaggaccatgatgtggaatattttcttcggctggctcatgagctgggactgctggttatcctgaggcccgggccctacatctgtgcagagtgggaaatgggaggattacctgcttggctgctagagaaagagtctattcttctccgctcctccgacccagattacctggcagctgtggacaagtggttgggagtccttctgcccaagatgaagcctctcctctatcagaatggagggccagttataacagtgcaggttgaaaatgaatatggcagctactttgcctgtgattttgactacctgcgcttcctgcagaagcgctttcgccaccatctgggggatgatgtggttctgtttaccactgatggagcacataaaacattcctgaaatgtggggccctgcagggcctctacaccacggtggactttggaacaggcagcaacatcacagatgctttcctaagccagaggaagtgtgagcccaaaggacccttgatcaattctgaattctatactggctggctagatcactggggccaacctcactccacaatcaagaccgaagcagtggcttcctccctctatgatatacttgcccgtggggcgagtgtgaacttgtacatgtttataggtgggaccaattttgcctattggaatggggccaactcaccctatgcagcacagcccaccagctacgactatgatgccccactgagtgaggctggggacctcactgagaagtattttgctctgcgaaacatcatccagaagtttgaaaaagtaccagaaggtcctatccctccatctacaccaaagtttgcatatggaaaggtcactttggaaaagttaaagacagtgggagcagctctggacattctgtgtccctctgggcccatcaaaagcctttatcccttgacatttatccaggtgaaacagcattatgggtttgtgctgtaccggacaacacttcctcaagattgcagcaacccagcacctctctcttcacccctcaatggagtccacgatcgagcatatgttgctgtggatgggatcccccagggagtccttgagcgaaacaatgtgatcactctgaacataacagggaaagctggagccactctggaccttctggtagagaacatgggacgtgtgaactatggtgcatatatcaacgattttaagggtttggtttctaacctgactctcagttccaatatcctcacggactggacgatctttccactggacactgaggatgcagtgtgcagccacctggggggctggggacaccgtgacagtggccaccatgatgaagcctgggcccacaactcatccaactacacgctcccggccttttatatggggaacttctccattcccagtgggatcccagacttgccccaggacacctttatccagtttcctggatggaccaagggccaggtctggattaatggctttaaccttggccgctattggccagcccggggccctcagttgaccttgtttgtgccccagcacatcctgatgacctcggccccaaacaccatcaccgtgctggaactggagtgggcaccctgcagcagtgatgatccagaactatgtgctgtgacgttcgtggacaggccagttattggctcatctgtgacctacgatcatccctccaaacctgttgaaaaaagactcatgcccccacccccgcaaaaaaacaaagattcatggctggaccatgtatgatgatgaaagcctgtgtctttgagggattctaccctgaacatacctcacagatcctccctgtcatgccacatttcactgattggaatgtggaaatggaaaaggaatttaggatgtgcattttcacctgaggtttccctgcatccctgcagtgccaaagccccaccttcagggaccacctggaatgtgtgaggggctgacagcacagtaacgtgcatacatatctgcagggctggaatggaagctttaaaggtggtagtgatttttattttggaagaatcatgttacctttttgttaaataaaatttgtactcaaatgat

SEQ ID NO: 3557 - protein, 677 aa, Homo sapiens; identical to SEQ ID NO: 3551

SEQ ID NO: 3558 - DNA, 549 bp, Homo sapiens
taatggctttaaccttggccgctattggccagcccggggccaccatcaccgtgctggaactggagtgggcaccctgcagcagtgatgatccagaactatgtgctgtgacgttcgtggacaggccagttattggctcatctgtgacctacgatcatccctccaaacctgttgaaaaaagactcatgcccccacccccgcaaaaaaacaaagattcatggctggaccatgtatgatgatgaaagcctgtgtctttgagggattctaccctgaacatacctcacagatcctccctgtcatgccacatttcactgattggaatgtggaaatggaaaaggaatttaggatgtgcattttcacctgaggtttccctgcatccctgcagtgccaaagccccaccttcagggaccacctggaatgtgtgaggggctgacagcacagtaacgtgcatacatatctgcagggctggaatggaagctttaaaggtggtagtgatttttattttggaagaatcatgttacctttttgttaaataaaatttgtactcaaatg

SEQ ID NO: 3559 - protein, 76 aa, Homo sapiens; identical to SEQ ID NO: 3553

SEQ ID NO: 3560 - DNA, 1249 bp, Homo sapiens
gttggggtgaggaatgagggagttgttgcaagtggctctttctggctatatcattcacagattttctattctttggggtttgggtctgaattttcagcatcctctctgaagaatcacccccacccagtgccggcgtgcgcccagccttcccccagccctttccagggcgctgccccctgcctgccctcactactccaggcgctggccgcgcagccccgccctggagctgcctccccgcctccttcctcctcctgcgggcgagcagaagcccgctcgcccgctgccgagtggcagtcacgactgtgaggtcgccggcgaggtggccgcgggcgcggcggggcggggcagggcgcactctcctccacgcccgcggaagtgccggggaggtgggcagggcggggagggagagggagcgaggctggaggagggcacgtcggcgcctcggcgaggatgggagtccccaggacccggagctgagcagcctggcgcgcggcgggcagggcgcgcaggacagaagcctcgctgttcctccgggagcccaacaccgttcccgcgcggccacgatgatccctccgagcagcccccgcgaggacggcgtggacgggctgcccaaggaggcggtgggcgccgagcaaccgccctctcctgcatccaccagcagccaggaatccaagctccagaaactaaaacgatcactttctttcaagaccaagagtttacggagcaaaagtgctgacaacttcttccagcgaaccaacagcgaagacatgaaactgcaagcacacatggtggctgagatcagccccagctccagcccactccctgctccaggaagcctgacgtccacacccgccagggctggtctgcatccaggtggcaaggctcatgcctttcaggaatacatcttcaagaagcccactttctgtgatgtctgcaaccacatgatagtggatgcttcatatatacagattatcctggtaaataattggggatacacataaaaacacctgaaccaaagcatatacaaagtactagggaaagccacaagtggaaacaatagttctacctcaggaggaagaggtcaatgaaagttccatgaagaatgtagtatttgagttgggtattgaaggatgaataggagttaatgactctctaccaaactatctacagttcttagcagcaatatcctgttgtgtaccaagaatcaaaacatcccatattttctttaaaataaaagcatgacagaatc

SEQ ID NO: 3561 - protein, 145 aa, Homo sapiens
MIPPSSPREDGVDGLPKEAVGAEQPPSPASTSSQESKLQKLKRSLSFKTKSLRSKSADNFFQRTNSEDMKLQAHMVAEISPSSSPLPAPGSLTSTPARAGLHPGGKAHAFQEYIFKKPTFCDVCNHMIVDASYIQIILVNNWGYT

SEQ ID NO: 3562 - DNA, 3123 bp, Homo sapiens
gttggggtgaggaatgagggagttgttgcaagtggctctttctggctatatcattcacagattttctattctttggggtttgggtctgaattttcagcatcctctctgaagaatcacccccacccagtgccggcgtgcgcccagccttcccccagccctttccagggcgctgccccctgcctgccctcactactccaggcgctggccgcgcagccccgccctggagctgcctccccgcctccttcctcctcctgcgggcgagcagaagcccgctcgcccgctgccgagtggcagtcacgactgtgaggtcgccggcgaggtggccgcgggcgcggcggggcggggcagggcgcactctcctccacgcccgcggaagtgccggggaggtgggcagggcggggagggagagggagcgaggctggaggagggcacgtcggcgcctcggcgaggatgggagtccccaggacccggagctgagcagcctggcgcgcggcgggcagggcgcgcaggacagaagcctcgctgttcctccgggagcccaacaccgttcccgcgcggccacgatgatccctccgagcagcccccgcgaggacggcgtggacgggctgcccaaggaggcggtgggcgccgagcaaccgccctctcctgcatccaccagcagccaggaatccaagctccagaaactaaaacgatcactttctttcaagaccaagagtttacggagcaaaagtgctgacaacttcttccagcgaaccaacagcgaagacatgaaactgcaagcacacatggtggctgagatcagccccagctccagcccactccctgctccaggaagcctgacgtccacacccgccagggctggtctgcatccaggtggcaaggctcatgcctttcaggaatacatcttcaagaagcccactttctgtgatgtctgcaaccacatgatagtgggaacaaatgctaagcatggactgcgctgcaaagcctgtaagatgagcatccaccacaagtgcacagatggcctggcaccccagcggtgcatgggcaagctgccaaaggggtttcggcgttactacagctcccccttgctcattcatgaacagtttggctgcattaaagaagttatgcccattgcctgtggcaataaggtggaccctgtctacgagaccctccgcttcggcacctccctggcccagaggacaaagaagggcagctccggcagtggctctgactcacctcacagaacctctacttcagatcttgtggaggttcctgaggaagccaatgggccaggaggcgggtatgacctaaggaaacgcagcaacagcgtgtttacatatccagaaaatggcactgatgatttcagagatccagcgaagaacataaaccaccagggatctctttccaaagacccattacagatgaacacctatgttgccttgtacaaatttgtaccacaggagaatgaagatttggaaatgaggccaggagacataattactcttttagaggattccaatgaagactggtggaaagggaaaattcaagacagaattggcttctttccagccaactttgttcagagactacaacaaaatgagaagatttttagatgtgttagaaccttcattgggtgtaaggaacaggggcagataacactgaaagagaatcagatctgcgtgagttctgaagaagaacaagatggttttatcagagtcctcagtggaaaaaagaaaggcctcatcccccttgatgtactagaaaacatctgattgctggctcctcctccgtttgcagtaggcaagctctgctgcgatgcctctgcctcatctcacactgcgtcaacccaaaggagctgccgcactgacccagccccccaggaaacagtgagacaagaatcaagtatctgagactgtggagtaatagccacaaaacagagggcccactgcacagcatatccaggctgccacaggtggggacgaggctgagagagtcagcaggcagagccagatgccatgcttggcagcagcagtaggactataaaccacagctgtcccccaggatcccactcctttcctgtctgtgtggtgtaagttaacacactggagtgtgctccagtttgcagggtagcccagtgcaaggttcagatccatgtagctaagtattatcctgcttccagacctatgtcaccagtaccaatcagtcagtgtcatcacatttcaggccccaagcaatctctgtgcaaagcatcagaaagacctgcttcccagcccccagcattccagtgctctccaggcttcctctctttgtgattgtgctgtccagagtgtccagcttgttctttctttctcttcagtcctctgagtacatctggtggtgtgcattagatgtgagggctatgttgacatggcatcacctccaaagacctgacctgcctaaagactgatgacaggccatccttcctgctgttctaggtactggcctgggtgacagagcaggacatgagacatagatacagtggggaggagaagtggggaaaggtggagcagagagttcttacttattgaagattatacagccctttcggttatgaagtccctgcttgaaggcaatggacctggggaagagactatcacaaaaagtctccattttcattttacatcctctctattggaggcagcacttttccctcatgctgtcctataggactccactttgaaggttgtgcctacgttgcagggaactaggaacatggaggggaaccaacaacagcatcttagaagaaatgtagccaaattggagtccattcttctttagggcagtatatgaaatcctagcagatgtaaaatggaaaagaatcctaatgcttcttccttcagaaagtagaggaactaggggcccaattagcatcatctaggggaatctctattactctgtacttatactaatgtttacaagaatgcaatatactgtgatgccttcctactcaagcctcctagcattcaaacttccatcctattagtcattaacatggttaaacttcaattcacaatcaccttggaatcaatgtcagtttgatttattttgttacagagcaataaaatcattagaacaatggttttt

SEQ ID NO: 3563 - protein, 402 aa, Homo sapiens; identical to SEQ ID NO: 341

SEQ ID NO: 3564 - DNA, 3489 bp, Homo sapiens
gttggggtgaggaatgagggagttgttgcaagtggctctttctggctatatcattcacagattttctattctttggggtttgggtctgaattttcagcatcctctctgaagaatcacccccacccagtgccggcgtgcgcccagccttcccccagccctttccagggcgctgccccctgcctgccctcactactccaggcgctggccgcgcagccccgccctggagctgcctccccgcctccttcctcctcctgcgggcgagcagaagcccgctcgcccgctgccgagtggcagtcacgactgtgaggtcgccggcgaggtggccgcgggcgcggcggggcggggcagggcgcactctcctccacgcccgcggaagtgccggggaggtgggcagggcggggagggagagggagcgaggctggaggagggcacgtcggcgcctcggcgaggatgggagtccccaggacccggagctgagcagcctggcgcgcggcgggcagggcgcgcaggacagaagcctcgctgttcctccgggagcccaacaccgttcccgcgcggccacgatgatccctccgagcagcccccgcgaggacggcgtggacgggctgcccaaggaggcggtgggcgccgagcaaccgccctctcctgcatccaccagcagccaggaatccaagctccagaaactaaaacgatcactttctttcaagaccaagagtttacggagcaaaagtgctgacaacttcttccagcgaaccaacagcgaagacatgaaactgcaagcacacatggtggctgagatcagccccagctccagcccactccctgctccaggaagcctgacgtccacacccgccagggctggtctgcatccaggtggcaaggctcatgcctttcaggaatacatcttcaagaagcccactttctgtgatgtctgcaaccacatgatagtgggaacaaatgctaagcatggactgcgctgcaaagcctgtaagatgagcatccaccacaagtgcacagatggcctggcaccccagcggtgcatgggcaagctgccaaaggggtttcggcgttactacagctcccccttgctcattcatgaacagtttggctgcattaaagaagttatgcccattgcctgtggcaataaggtggaccctgtctacgagaccctccgcttcggcacctccctggcccagaggacaaagaagggcagctccggcagtggctctgactcacctcacagaacctctacttcagatcttgtggaggttcctgaggaagccaatgggccaggaggcgggtatgacctaaggaaacgcagcaacagcgtgtttacatatccagaaaatggcactgatgatttcagagatccagcgaagaacataaaccaccagggatctctttccaaagacccattacagatgaacacctatgttgccttgtacaaatttgtaccacaggagaatgaagatttggaaatgaggccaggagacataattactcttttagaggattccaatgaagactggtggaaagggaaaattcaagacagaattggcttctttccagccaactttgttcagagactacaacaaaatgagaagatttttagatgtgttagaaccttcattgggtgtaaggaacaggggcagataacactgaaagagaatcagatctgcgtgagttctgaagaagaacaagatggttttatcagagtcctcagtggaaaaaagaaaggcctcatcccccttgatgtactagaaaacatctgattgctggctcctcctccgtttgcagtaggcaagctctgctgcgatgcctctgcctcatctcacactgcgtcaacccaaaggagctgccgcactgacccagccccccaggaaacagtgagacaagaatcaagtatctgagactgtggagtaatagccacaaaacagagggcccactgcacagcatatccaggctgccacaggtggggacgaggctgagagagtcagcaggcagagccagatgccatgcttggcagcagcagtaggactataaaccacagctgtcccccaggatcccactcctttcctgtctgtgtggtgtaagttaacacactggagtgtgctccagtttgcagggtagcccagtgcaaggttcagatccatgtagctaagtattatcctgcttccagacctatgtcaccagtaccaatcagtcagtgtcatcacatttcaggccccaagcaatctctgtgcaaagcatcagaaagacctgcttcccagcccccagcattccagtgctctccaggcttcctctctttgtgattgtgctgtccagagtgtccagcttgttctttctttctcttcagtcctctgagtacatctggtggtgtgcattagatgtgagggctatgttgacatggcatcacctccaaagacctgacctgcctaaagactgatgacaggccatccttcctgctgttctaggtactggcctgggtgacagagcaggacatgagacatagatacagtggggaggagaagtggggaaaggtggagcagagagttcttacttattgaagattatacagccctttcggttatgaagtccctgcttgaaggcaatggacctggggaagagactatcacaaaaagtctccattttcattttacatcctctctattggaggcagcacttttccctcatgctgtcctataggactccactttgaaggttgtgcctacgttgcagggaactaggaacatggaggggaaccaacaacagcatcttagaagaaatgtagccaaattggagtccattcttctttagggcagtatatgaaatcctagcagatgtaaaatggaaaagaatcctaatgcttcttccttcagaaagtagaggaactaggggcccaattagcatcatctaggggaatctctattactctgtacttatactaatgtttacaagaatgcaatatactgtgatgccttcctactcaagcctcctagcattcaaacttccatcctattagtcattaacatggttaaacttcaattcacaatcaccttggaatcaatgtcagtttgatttattttgttacagagcaataaaatcattagaacaatggtttttaaaagacttaagtggatgcatcctatgcatgtaagcattatttcccaaaccaaagcatcattcatctccatttatttcttttgttcccgctcagtgtgaagttgggaactgagaggggatggctgctggtttcacagaagtttggatgccttactcttatcttaaagccagcatccagaatttcctccctctctgatgccacatgcaaaaccaggtgtacgatgtcaagatggattctttgagagccagggtagatcatatgactgcctttctgtaaaattggatgcctagtacaaatgctctttgcctctaattcagtattccatttaataaaaacaatacagtggctggaaaggagcatcagaa

SEQ ID NO: 3565 - protein, 402 aa, Homo sapiens; identical to SEQ ID NO: 341

SEQ ID NO: 3566 - DNA, 413 bp, Homo sapiens
tccaatgaagactggtggaaagggaaaattcaagacagaattggcttctttccagccaactttgttcagagactacaacaaaatgagaagatttttagatgtgttagaaccttcattgggtgtaaggaacaggggcagataacactgaaagagaatcaggtgagtaaaccacacaaacacattccagatatgagccaaatagggtgtcattttaataaacttaataatatgtataaatctgaatgagtggggtcacattcaaagtattcactttgagaaaagatatacttactccaatgatgtcagtgttgtaggagctaaacatgcaaactaaaattttaggaatctcacttggtgatacctgttcataaacgaaacgtgatagtggcaggcgacgacatctcgtcccccat

SEQ ID NO: 3567 - protein, 45 aa, Homo sapiens
MKTGGKGKFKTELASFQPTLFRDYNKMRRFLDVLEPSLGVRNRGR

SEQ ID NO: 3568 - DNA, 5819 bp, Homo sapiens
aggcagaagcagcatcatacttctttggtatcttcagcaatcagcacagacctgaaacacaatctttacacaataaatatgatgagtgaatgaacagttgcttaacaaattaaagaatggatgaaggtaggtagttaggtacaaggttttgcagataggcctggctgtgtcaattaaacctttcttcatgggtcctcacacttagtaagctcacttttaaaaggacaatgctgaagacacaaatgtttacaatgaccacagcgatgacgggatccgagagaaaggcaaggcggaaggggtgaggccggaagccgaagtgccgcagggagttagcggcgtctcggttgccatggagaccaggagctccaaaacgcggaggtctttagcgtcccggaccaacgagtgccaggggacaatgtgggcgccaacttcgccaccagccgggtccagcagccccagccagcccacctggaagtcctccttgtattcctccctcgcctactctgaggccttccactacagcttcgcagcccggccccgccgcctcacgcagcttgcgctggcgcagcgtcccgagcctcagctgcttcgtctgcgcccctcctcgctgcgcacccaagatatctcgcacttgctcaccggcgtcttccgcaacttgtactcagccgaggtcatcggcgacgaagtgagcgcaagcttgatcaaggcccgcggcagcgagaatgagcgccacgaggagttcgtggaccagctgcagcagattcgggagctctataagcagcggctggatgagtttgaaatgttggagagacatatcactcaggcccaagcacgggctattgcggaaaatgagcgggtcatgagccaggctggagtacaggacctcgagagccttgtcaggttgcctccagtgaagagtgtctccagatggtgtatagacagcgagttgctacggaaacatcatttgatctccccagaagattactacaccgatacagtgccgtttcactctgcacctaaaggcatctccctacctggatgttcaaaactgacatttagctgtgagaagcgttccgtccagaagaaagagctgaacaagaagcttgaagattcatgcaggaagaagcttgctgagttcgaagatgagttagaccacactgtggacagcctgacatggaatttaactcctaaggccaaagaaaggaccagagaacctctcaagaaagcaagtcaaccaaggaataaaaactggatgaaccacttacgtgtgccacagagagagctagacagacttctgcttgccagaatggagagtcggaaccacttcctaaaaaatccccgtttttttcctcctaacactcgatatggaggcaagtctcttgtttttcctccaaagaagccagcaccgataggagaattccagagtacagagccagaacagagttgtgctgatactccagtgtttctagctaagccaccaattgggtttttcacagattatgaaattggtccagtttatgagatggtaattgcgctgcagaacaccaccacgaccagccgctacctgcgagtcctcccgccttccacgccatacttcgctctgggactggggatgttcccaggaaaaggtggaatggtggctcctggaatgacctgccagtacattgtccagttttttcccgactgccttggggattttgatgattttattttagtggagacccagtcagcccacacacttctgatccccctgcaggcccggaggccgccccccgtgctgacattgtcaccggtgttggactgtggttactgcctcattgggggagtcaagatgaccagattcatctgcaaaaatgtgggtttcagtgttggcaggttctgcattatgcccaaaacaagctggccaccactaagtttcaaggccattgcaaccgtcggctttgttgaacaacctccttttggaatcctgccttcggtgtttgagctggccccgggacatgctatattagtggaggtcttgttttccccaaagagcctaggaaaggcagagcagaccttcatcatcatgtgcgacaactgccagataaaggagctggtgaccataggaattgggcagctgattgctttggatctgatctatatttctggtgaaaaaagccagccagaccctggagagctcacagacttaacagcccagcacttcatacgatttgagcctgaaaaccttcggtccacggctaggaagcagctgattattagaaatgctacgcacgtggagctggccttctactggcagatcatgaagcccaacctgcagcccctcatgcctggagaaaccttcagcatggacagcatcaagtgctaccccgacaaggagactgccttctccatcatgcccagaaagggggttctaagcccccacacagaccacgagttcatcctgagcttttctcctcatgagctgagggattttcacagtgtgctccagatggtgctagaggaagtcccagagcctgtaagttcagaagcggagagcctggggcactcctcctactctgtggatgatgtgattgtcctggaaatcgaggtgaaaggctcagtagaacctttccaggttctcttagagccatatgccctcatcatcccaggggagaactacattgggataaatgtgaagaaggcttttaagatgtggaacaacagcaagtcacccatcagatacctgtgggggaagatcagcgactgccacatcattgaagtggagcccggcacaggggtcatagagcccagtgaggtcggggattttgagttgaactttactgggggtgtccctggccccacaagccaggacctgctgtgtgaaatcgaagactcgccctcgccagtggtgttacacattgaggctgtctttaaggggcctgccctcatcatcaacgtctcagcccttcagtttggtctgctccgcctggggcagaaagccacaaactccatccagatccggaacgtcagccagctcccagccacatggcgcatgaaggagagcccagtctccctccaggaaaggcctgaggatgtgtctcccttcgacattgagccttcgagtggccagcttcactctctgggggagtgcagggtggacatcaccttggaggccctgcactgccagcatctggagaccgtcctggagctggaggtggaaaatggtgcctggagctaccttcctgtgtatgctgaggtacagaagccccatgtgtacctacagagcagccaggtggaggttagaaatctctacctgggtgtgcccacgaagacaaccatcacacttatcaatggcacgctcctgcctacccagttccactggggcaagctcctcggacaccaagcagaattctgcatggtgacagtctcccccaaacatggcctgctgggcccaagtgaggagtgccagctcaagttggagttgactgctcatacccaggaagagctgacccatctggccctcccttgtcacgtgtcaggcatgaagaagccactggttctaggcatttctgggaagccccagggactgcaagtggccattaccatctctaaggagagctctgattgcagcacagagcagtggccaggccacccaaaggagctccgcctggactttggctcagcggtgccactgaggacccgtgtgactcgccagctcattctcaccaatcgctccccaatacggacccgtttctccctcaagtttgagtatttcgggagcccccaaaacagcctgagcaaaaagaccagccttcccaacatgcctcctgccctgctaaagacagtgcggatgcaagagcacctggccaagcgagagcagctggattttatggagagcatgctatcccacgggaaaggagctgctttcttccctcacttttcccagggcatgctggggccctaccagcagctgtgcattgacatcacaggctgtgccaacatgtggggcgagtactgggacaacctcatctgcacggtgggagacctgctgccggaagtcatcccagtgcacatggcagcggtgggctgccccatcagctccctgaggaccacctcctacactattgaccaggcccagaaggaaccagccatgaggttcggcacccaggtctccggaggagacacagttacccgaacccttcgcctgaataactccagcccctgtgacatccgcctggattgggagacctatgttccagaagacaaggaagaccggctggtggagctgctggtgttttatgggccacctttcccgctgcgggaccaagccgggaatgagcttgtgtgccctgatacccctgagggtggctgcctcctctggtccccaggcccctccagttcatcggaattcagccatgaaactgactcatcagttgagggcagctccagtgccagcaatagggtggcacagaagctcatctcagtcatcctgcaggcacatgagggggtgccctccggccacctgtactgtatcagccccaagcaggtggtggtccctgctgggggcagcagtaccatctacatctccttcacccctatggtgctcagccctgagatcctgcacaaggtggagtgtactggctacgccctgggtttcatgagcttggacagcaaggtggaaagggagattccagggaagaggcatcgcctgcaggactttgcggtgggacccctgaaactggacctgcatagctacgtgaggcctgcacagctaagtgtggagctggactacggcggcagtatggaattccagtgccaggccagtgacctcattcccgagcagccctgctctggggtgctgagtgagctggtgaccacccaccacctgaagctgaccaacactacagagatcccacactacttccggcttatggtctccaggcccttctccgtttctcaagatggggcgagccaggaccacagagctcctggccctggccagaagcaggagtgtgaggaggagacagcctcagcggacaagcagctggtgctccaagcacaggagaacatgctggtgaacgtgtccttctcactctccctggagctgctctcctatcagaagctcccagctgaccagacactgcctggggtggacattcagcagagtgcgagtggagagagagagatggtgtttactcagaacctgctcctggagtacaccaaccagaccactcaggtggtgcccctgcgggctgtggtggccgtgcctgagctgcagctctccaccagctgggtggactttgggacctgctttgtgagccagcagcgagtccgggaggtctacctgatgaacctgagcgggtgccgaagctactggactatgctgatgggagtagtgagctgtacgagtccacgatggtggtggaaggtgtgctcggtgagaagtcctgcaccctgcggctccggggccaaggctcctatgatgagagatacatgttgcctcaccagccctgaggctccgccccagccctcagccccaggccccagctggagaaaaaacattgcccagggattaggagcagctcttcagcacaaagacacagacttggggacctggggacctctgggcagctcctggaatggaagaacccccttccacaatggtctcagcctaggccctcatgatatgtcctcagagctaacataaaggacaggccacaccacagcagagaccaccacattgagatcactactcagtgcatagcgaagaccagtatggcaaaattagtcttggaaaaaaaccacagccactaagataaattcatgcacttttactatgc

SEQ ID NO: 3569 - protein, 1778 aa, Homo sapiens; identical to SEQ ID NO: 345

SEQ ID NO: 3570 - DNA, 5943 bp, Homo sapiens
aggcagaagcagcatcatacttctttggtatcttcagcaatcagcacagacctgaaacacaatctttacacaataaatatgatgagtgaatgaacagttgcttaacaaattaaagaatggatgaaggtaggtagttaggtacaaggttttgcagataggcctggctgtgtcaattaaacctttcttcatgggtcctcacacttagtaagctcacttttaaaaggacaatgctgaagacacaaatgtttacaatgaccacagcgatgacgggatccgagagaaaggcaaggcggaaggggtgaggccggaagccgaagtgccgcagggagttagcggcgtctcggttgccatggagaccaggagctccaaaacgcggaggtctttagcgtcccggaccaacgagtgccaggggacaatgtgggcgccaacttcgccaccagccgggtccagcagccccagccagcccacctggaagtcctccttgtattcctccctcgcctactctgaggccttccactacagcttcgcagcccggccccgccgcctcacgcagcttgcgctggcgcagcgtcccgagcctcagctgcttcgtctgcgcccctcctcgctgcgcacccaagatatctcgcacttgctcaccggcgtcttccgcaacttgtactcagccgaggtcatcggcgacgaagtgagcgcaagcttgatcaaggcccgcggcagcgagaatgagcgccacgaggagttcgtggaccagctgcagcagattcgggagctctataagcagcggctggatgagtttgaaatgttggagagacatatcactcaggcccaagcacgggctattgcggaaaatgagcgggtcatgagccaggctggagtacaggacctcgagagccttgtcaggttgcctccagtgaagagtgtctccagatggtgtatagacagcgagttgctacggaaacatcatttgatctccccagaagattactacaccgatacagtgccgtttcactctgcacctaaaggcatctccctacctggatgttcaaaactgacatttagctgtgagaagcgttccgtccagaagaaagagctgaacaagaagcttgaagattcatgcaggaagaagcttgctgagttcgaagatgagttagaccacactgtggacagcctgacatggaatttaactcctaaggccaaagaaaggaccagagaacctctcaagaaagcaagtcaaccaaggaataaaaactggatgaaccacttacgtgtgccacagagagagctagacagacttctgcttgccagaatggagagtcggaaccacttcctaaaaaatccccgtttttttcctcctaacactcgatatggaggcaagtctcttgtttttcctccaaagaagccagcaccgataggagaattccagagtacagagccagaacagagttgtgctgatactccagtgtttctagctaagccaccaattgggtttttcacagattatgaaattggtccagtttatgagatggtaattgcgctgcagaacaccaccacgaccagccgctacctgcgagtcctcccgccttccacgccatacttcgctctgggactggggatgttcccaggaaaaggtggaatggtggctcctggaatgacctgccagtacattgtccagttttttcccgactgccttggggattttgatgattttattttagtggagacccagtcagcccacacacttctgatccccctgcaggcccggaggccgccccccgtgctgacattgtcaccggtgttggactgtggttactgcctcattgggggagtcaagatgaccagattcatctgcaaaaatgtgggtttcagtgttggcaggttctgcattatgcccaaaacaagctggccaccactaagtttcaaggccattgcaaccgtcggctttgttgaacaacctccttttggaatcctgccttcggtgtttgagctggccccgggacatgctatattagtggaggtcttgttttccccaaagagcctaggaaaggcagagcagaccttcatcatcatgtgcgacaactgccagataaaggagctggtgaccataggaattgggcagctgattgctttggatctgatctatatttctggtgaaaaaagccagccagaccctggagagctcacagacttaacagcccagcacttcatacgatttgagcctgaaaaccttcggtccacggctaggaagcagctgattattagaaatgctacgcacgtggagctggccttctactggcagatcatgaagcccaacctgcagcccctcatgcctggagaaaccttcagcatggacagcatcaagtgctaccccgacaaggagactgccttctccatcatgcccagaaagggggttctaagcccccacacagaccacgagttcatcctgagcttttctcctcatgagctgagggattttcacagtgtgctccagatggtgctagaggaagtcccagagcctgtaagttcagaagcggagagcctggggcactcctcctactctgtggatgatgtgattgtcctggaaatcgaggtgaaaggctcagtagaacctttccaggttctcttagagccatatgccctcatcatcccaggggagaactacattgggataaatgtgaagaaggcttttaagatgtggaacaacagcaagtcacccatcagatacctgtgggggaagatcagcgactgccacatcattgaagtggagcccggcacaggggtcatagagcccagtgaggtcggggattttgagttgaactttactgggggtgtccctggccccacaagccaggacctgctgtgtgaaatcgaagactcgccctcgccagtggtgttacacattgaggctgtctttaaggggcctgccctcatcatcaacgtctcagcccttcagtttggtctgctccgcctggggcagaaagccacaaactccatccagatccggaacgtcagccagctcccagccacatggcgcatgaaggagagcccagtctccctccaggaaaggcctgaggatgtgtctcccttcgacattgagccttcgagtggccagcttcactctctgggggagtgcagggtggacatcaccttggaggccctgcactgccagcatctggagaccgtcctggagctggaggtggaaaatggtgcctggagctaccttcctgtgtatgctgaggtacagaagccccatgtgtacctacagagcagccaggtggaggttagaaatctctacctgggtgtgcccacgaagacaaccatcacacttatcaatggcacgctcctgcctacccagttccactggggcaagctcctcggacaccaagcagaattctgcatggtgacagtctcccccaaacatggcctgctgggcccaagtgaggagtgccagctcaagttggagttgactgctcatacccaggaagagctgacccatctggccctcccttgtcacgtgtcaggcatgaagaagccactggttctaggcatttctgggaagccccagggactgcaagtggccattaccatctctaaggagagctctgattgcagcacagagcagtggccaggccacccaaaggagctccgcctggactttggctcagcggtgccactgaggacccgtgtgactcgccagctcattctcaccaatcgctccccaatacggacccgtttctccctcaagtttgagtatttcgggagcccccaaaacagcctgagcaaaaagaccagccttcccaacatgcctcctgccctgctaaagacagtgcggatgcaagagcacctggccaagcgagagcagctggattttatggagagcatgctatcccacgggaaaggagctgctttcttccctcacttttcccagggcatgctggggccctaccagcagctgtgcattgacatcacaggctgtgccaacatgtggggcgagtactgggacaacctcatctgcacggtgggagacctgctgccggaagtcatcccagtgcacatggcagcggtgggctgccccatcagctccctgaggaccacctcctacactattgaccaggcccagaaggaaccagccatgaggttcggcacccaggtctccggaggagacacagttacccgaacccttcgcctgaataactccagcccctgtgacatccgcctggattgggagacctatgttccagaagacaaggaagaccggctggtggagctgctggtgttttatgggccacctttcccgctgcgggaccaagccgggaatgagcttgtgtgccctgatacccctgagggtggctgcctcctctggtccccaggcccctccagttcatcggaattcagccatgaaactgactcatcagttgagggcagctccagtgccagcaatagggtggcacagaagctcatctcagtcatcctgcaggcacatgagggggtgccctccggccacctgtactgtatcagccccaagcaggtggtggtccctgctgggggcagcagtaccatctacatctccttcacccctatggtgctcagccctgagatcctgcacaaggtggagtgtactggctacgccctgggtttcatgagcttggacagcaaggtggaaagggagattccagggaagaggcatcgcctgcaggactttgcggtgggacccctgaaactggacctgcatagctacgtgaggcctgcacagctaagtgtggagctggactacggcggcagtatggaattccagtgccaggccagtgacctcattcccgagcagccctgctctggggtgctgagtgagctggtgaccacccaccacctgaagctgaccaacactacagagatcccacactacttccggcttatggtctccaggcccttctccgtttctcaagatggggcgagccaggaccacagagctcctggccctggccagaagcaggagtgtgaggaggagacagcctcagcggacaagcagctggtgctccaagcacaggagaacatgctggtgaacgtgtccttctcactctccctggagctgctctcctatcagaagctcccagctgaccagacactgcctggggtggacattcagcagagtgcgagtggagagagagagatggtgtttactcagaacctgctcctggagtacaccaaccagaccactcaggtggtgcccctgcgggctgtggtggccgtgcctgagctgcagctctccaccagctgggtggactttgggacctgctttgtgagccagcagcgagtccgggaggtctacctgatgaacctgagcgggtgccgaagctactggactatgctgatgggccagcaggagccagccaaggccgctgtggccttcagggtctccccaaacagtgggctgctagaagcacgatccgccaatgcacccccaacctccatcgccttgcaggttttcttcactgccaggagtagtgagctgtacgagtccacgatggtggtggaaggtgtgctcggtgagaagtcctgcaccctgcggctccggggccaaggctcctatgatgagagatacatgttgcctcaccagccctgaggctccgccccagccctcagccccaggccccagctggagaaaaaacattgcccagggattaggagcagctcttcagcacaaagacacagacttggggacctggggacctctgggcagctcctggaatggaagaacccccttccacaatggtctcagcctaggccctcatgatatgtcctcagagctaacataaaggacaggccacaccacagcagagaccaccacattgagatcactactcagtgcatagcgaagaccagtatggcaaaattagtcttggaaaaaaaccacagccactaagataaattcatgcacttttactatgc

SEQ ID NO: 3571 - protein, 1755 aa, Homo sapiens; identical to SEQ ID NO: 343

SEQ ID NO: 3572 - DNA, 6759 bp, Homo sapiens
aggcagaagcagcatcatacttctttggtatcttcagcaatcagcacagacctgaaacacaatctttacacaataaatatgatgagtgaatgaacagttgcttaacaaattaaagaatggatgaaggtaggtagttaggtacaaggttttgcagataggcctggctgtgtcaattaaacctttcttcatgggtcctcacacttagtaagctcacttttaaaaggacaatgctgaagacacaaatgtttacaatgaccacagcgatgacgggatccgagagaaaggcaaggcggaaggggtgaggccggaagccgaagtgccgcagggagttagcggcgtctcggttgccatggagaccaggagctccaaaacgcggaggtctttagcgtcccggaccaacgagtgccaggggacaatgtgggcgccaacttcgccaccagccgggtccagcagccccagccagcccacctggaagtcctccttgtattcctccctcgcctactctgaggccttccactacagcttcgcagcccggccccgccgcctcacgcagcttgcgctggcgcagcgtcccgagcctcagctgcttcgtctgcgcccctcctcgctgcgcacccaagatatctcgcacttgctcaccggcgtcttccgcaacttgtactcagccgaggtcatcggcgacgaagtgagcgcaagcttgatcaaggcccgcggcagcgagaatgagcgccacgaggagttcgtggaccagctgcagcagattcgggagctctataagcagcggctggatgagtttgaaatgttggagagacatatcactcaggcccaagcacgggctattgcggaaaatgagcgggtcatgagccaggctggagtacaggacctcgagagccttgtcaggttgcctccagtgaagagtgtctccagatggtgtatagacagcgagttgctacggaaacatcatttgatctccccagaagattactacaccgatacagtgccgtttcactctgcacctaaaggcatctccctacctggatgttcaaaactgacatttagctgtgagaagcgttccgtccagaagaaagagctgaacaagaagcttgaagattcatgcaggaagaagcttgctgagttcgaagatgagttagaccacactgtggacagcctgacatggaatttaactcctaaggccaaagaaaggaccagagaacctctcaagaaagcaagtcaaccaaggaataaaaactggatgaaccacttacgtgtgccacagagagagctagacagacttctgcttgccagaatggagagtcggaaccacttcctaaaaaatccccgtttttttcctcctaacactcgatatggaggcaagtctcttgtttttcctccaaagaagccagcaccgataggagaattccagagtacagagccagaacagagttgtgctgatactccagtgtttctagctaagccaccaattgggtttttcacagattatgaaattggtccagtttatgagatggtaattgcgctgcagaacaccaccacgaccagccgctacctgcgagtcctcccgccttccacgccatacttcgctctgggactggggatgttcccaggaaaaggtggaatggtggctcctggaatgacctgccagtacattgtccagttttttcccgactgccttggggattttgatgattttattttagtggagacccagtcagcccacacacttctgatccccctgcaggcccggaggccgccccccgtgctgacattgtcaccggtgttggactgtggttactgcctcattgggggagtcaagatgaccagattcatctgcaaaaatgtgggtttcagtgttggcaggttctgcattatgcccaaaacaagctggccaccactaagtttcaaggccattgcaaccgtcggctttgttgaacaacctccttttggaatcctgccttcggtgtttgagctggccccgggacatgctatattagtggaggtcttgttttccccaaagagcctaggaaaggcagagcagaccttcatcatcatgtgcgacaactgccagataaaggagctggtgaccataggaattgggcagctgattgctttggatctgatctatatttctggtgaaaaaagccagccagaccctggagagctcacagacttaacagcccagcacttcatacgatttgagcctgaaaaccttcggtccacggctaggaagcagctgattattagaaatgctacgcacgtggagctggccttctactggcagatcatgaagcccaacctgcagcccctcatgcctggagaaaccttcagcatggacagcatcaagtgctaccccgacaaggagactgccttctccatcatgcccagaaagggggttctaagcccccacacagaccacgagttcatcctgagcttttctcctcatgaggttcagatggtgtcatctcagtagccacacatggttggatcatgtatttagaccccccacctgtgttcctcaatcacactgaagccacagctgggcccaccgaggtgctatcctgcccaggccagcacttggctgagttgggttggagtacacacctggtgtgcagggtgaagcagctcattttgtctggtcctgatcccagactcaccccatctgcagcaagacccttggctggcttcctccgctctgggtgtctcccacatgtctactatggcaaaaaacattaccatccccacccataccacagcatcccctagagagagtgaggtgcagggacccgagggccaggttagcacagcgctggccccagcatggagggaagccctgtgggccacggtaggctagaagggaattcgagctgggcatgaaaaggatgctccggggccattgttagtgggtttggggctgagatgagtgatcctgcctctggtcccagcatccagctgcctcgttgtctatcctgggagggtgtggtgcttcggacacgttgaggggctttgtcagcatcaggaaggcctttgcttcttgcacccaggcccagctgagacaggcccctgagtcctggctcatgttctggcagcaacttcacttttcctaaggaggggaggaggcagcagggaagcaaccctgggttttcagaaggtccttctgatggctaggctaaggggaggaagaattcctgccatgccccagccttctccaggacaacctgctggaacgcagtggtgttttcagggcactgtgtttgccttgcagctgagggattttcacagtgtgctccagatggtgctagaggaagtcccagagcctgtaagttcagaagcggagagcctggggcactcctcctactctgtggatgatgtgattgtcctggaaatcgaggtgaaaggctcagtagaacctttccaggttctcttagagccatatgccctcatcatcccaggggagaactacattgggataaatgtgaagaaggcttttaagatgtggaacaacagcaagtcacccatcagatacctgtgggggaagatcagcgactgccacatcattgaagtggagcccggcacaggggtcatagagcccagtgaggtcggggattttgagttgaactttactgggggtgtccctggccccacaagccaggacctgctgtgtgaaatcgaagactcgccctcgccagtggtgttacacattgaggctgtctttaaggggcctgccctcatcatcaacgtctcagcccttcagtttggtctgctccgcctggggcagaaagccacaaactccatccagatccggaacgtcagccagctcccagccacatggcgcatgaaggagagcccagtctccctccaggaaaggcctgaggatgtgtctcccttcgacattgagccttcgagtggccagcttcactctctgggggagtgcagggtggacatcaccttggaggccctgcactgccagcatctggagaccgtcctggagctggaggtggaaaatggtgcctggagctaccttcctgtgtatgctgaggtacagaagccccatgtgtacctacagagcagccaggtggaggttagaaatctctacctgggtgtgcccacgaagacaaccatcacacttatcaatggcacgctcctgcctacccagttccactggggcaagctcctcggacaccaagcagaattctgcatggtgacagtctcccccaaacatggcctgctgggcccaagtgaggagtgccagctcaagttggagttgactgctcatacccaggaagagctgacccatctggccctcccttgtcacgtgtcaggcatgaagaagccactggttctaggcatttctgggaagccccagggactgcaagtggccattaccatctctaaggagagctctgattgcagcacagagcagtggccaggccacccaaaggagctccgcctggactttggctcagcggtgccactgaggacccgtgtgactcgccagctcattctcaccaatcgctccccaatacggacccgtttctccctcaagtttgagtatttcgggagcccccaaaacagcctgagcaaaaagaccagccttcccaacatgcctcctgccctgctaaagacagtgcggatgcaagagcacctggccaagcgagagcagctggattttatggagagcatgctatcccacgggaaaggagctgctttcttccctcacttttcccagggcatgctggggccctaccagcagctgtgcattgacatcacaggctgtgccaacatgtggggcgagtactgggacaacctcatctgcacggtgggagacctgctgccggaagtcatcccagtgcacatggcagcggtgggctgccccatcagctccctgaggaccacctcctacactattgaccaggcccagaaggaaccagccatgaggttcggcacccaggtctccggaggagacacagttacccgaacccttcgcctgaataactccagcccctgtgacatccgcctggattgggagacctatgttccagaagacaaggaagaccggctggtggagctgctggtgttttatgggccacctttcccgctgcgggaccaagccgggaatgagcttgtgtgccctgatacccctgagggtggctgcctcctctggtccccaggcccctccagttcatcggaattcagccatgaaactgactcatcagttgagggcagctccagtgccagcaatagggtggcacagaagctcatctcagtcatcctgcaggcacatgagggggtgccctccggccacctgtactgtatcagccccaagcaggtggtggtccctgctgggggcagcagtaccatctacatctccttcacccctatggtgctcagccctgagatcctgcacaaggtggagtgtactggctacgccctgggtttcatgagcttggacagcaaggtggaaagggagattccagggaagaggcatcgcctgcaggactttgcggtgggacccctgaaactggacctgcatagctacgtgaggcctgcacagctaagtgtggagctggactacggcggcagtatggaattccagtgccaggccagtgacctcattcccgagcagccctgctctggggtgctgagtgagctggtgaccacccaccacctgaagctgaccaacactacagagatcccacactacttccggcttatggtctccaggcccttctccgtttctcaagatggggcgagccaggaccacagagctcctggccctggccagaagcaggagtgtgaggaggagacagcctcagcggacaagcagctggtgctccaagcacaggagaacatgctggtgaacgtgtccttctcactctccctggagctgctctcctatcagaagctcccagctgaccagacactgcctggggtggacattcagcagagtgcgagtggagagagagagatggtgtttactcagaacctgctcctggagtacaccaaccagaccactcaggtggtgcccctgcgggctgtggtggccgtgcctgagctgcagctctccaccagctgggtggactttgggacctgctttgtgagccagcagcgagtccgggaggtctacctgatgaacctgagcgggtgccgaagctactggactatgctgatgggccagcaggagccagccaaggccgctgtggccttcagggtctccccaaacagtgggctgctagaagcacgatccgccaatgcacccccaacctccatcgccttgcaggttttcttcactgccaggagtagtgagctgtacgagtccacgatggtggtggaaggtgtgctcggtgagaagtcctgcaccctgcggctccggggccaaggctcctatgatgagagatacatgttgcctcaccagccctgaggctccgccccagccctcagccccaggccccagctggagaaaaaacattgcccagggattaggagcagctcttcagcacaaagacacagacttggggacctggggacctctgggcagctcctggaatggaagaacccccttccacaatggtctcagcctaggccctcatgatatgtcctcagagctaacataaaggacaggccacaccacagcagagaccaccacattgagatcactactcagtgcatagcgaagaccagtatggcaaaattagtcttggaaaaaaaccacagccactaagataaattcatgcacttttactatgc

SEQ ID NO: 3573 - protein, 1086 aa, Homo sapiens
MARLRGGRIPAMPQPSPGQPAGTQWCFQGTVFALQLRDFHSVLQMVLEEVPEPVSSEAESLGHSSYSVDDVIVLEIEVKGSVEPFQVLLEPYALIIPGENYIGINVKKAFKMWNNSKSPIRYLWGKISDCHIIEVEPGTGVIEPSEVGDFELNFTGGVPGPTSQDLLCEIEDSPSPVVLHIEAVFKGPALIINVSALQFGLLRLGQKATNSIQIRNVSQLPATWRMKESPVSLQERPEDVSPFDIEPSSGQLHSLGECRVDITLEALHCQHLETVLELEVENGAWSYLPVYAEVQKPHVYLQSSQVEVRNLYLGVPTKTTITLINGTLLPTQFHWGKLLGHQAEFCMVTVSPKHGLLGPSEECQLKLELTAHTQEELTHLALPCHVSGMKKPLVLGISGKPQGLQVAITISKESSDCSTEQWPGHPKELRLDFGSAVPLRTRVTRQLILTNRSPIRTRFSLKFEYFGSPQNSLSKKTSLPNMPPALLKTVRMQEHLAKREQLDFMESMLSHGKGAAFFPHFSQGMLGPYQQLCIDITGCANMWGEYWDNLICTVGDLLPEVIPVHMAAVGCPISSLRTTSYTIDQAQKEPAMRFGTQVSGGDTVTRTLRLNNSSPCDIRLDWETYVPEDKEDRLVELLVFYGPPFPLRDQAGNELVCPDTPEGGCLLWSPGPSSSSEFSHETDSSVEGSSSASNRVAQKLISVILQAHEGVPSGHLYCISPKQVVVPAGGSSTIYISFTPMVLSPEILHKVECTGYALGFMSLDSKVEREIPGKRHRLQDFAVGPLKLDLHSYVRPAQLSVELDYGGSMEFQCQASDLIPEQPCSGVLSELVTTHHLKLTNTTEIPHYFRLMVSRPFSVSQDGASQDHRAPGPGQKQECEEETASADKQLVLQAQENMLVNVSFSLSLELLSYQKLPADQTLPGVDIQQSASGEREMVFTQNLLLEYTNQTTQVVPLRAVVAVPELQLSTSWVDFGTCFVSQQRVREVYLMNLSGCRSYWTMLMGQQEPAKAAVAFRVSPNSGLLEARSANAPPTSIALQVFFTARSSELYESTMVVEGVLGEKSCTLRLRGQGSYDERYMLPHQP

SEQ ID NO: 3574 - DNA, 5852 bp, Homo sapiens
aggcagaagcagcatcatacttctttggtatcttcagcaatcagcacagacctgaaacacaatctttacacaataaatatgatgagtgaatgaacagttgcttaacaaattaaagaatggatgaaggtaggtagttaggtacaaggttttgcagataggcctggctgtgtcaattaaacctttcttcatgggtcctcacacttagtaagctcacttttaaaaggacaatgctgaagacacaaatgtttacaatgaccacagcgatgacgggatccgagagaaaggcaaggcggaaggggtgaggccggaagccgaagtgccgcagggagttagcggcgtctcggttgccatggagaccaggagctccaaaacgcggaggtctttagcgtcccggaccaacgagtgccaggggacaatgtgggcgccaacttcgccaccagccgggtccagcagccccagccagcccacctggaagtcctccttgtattcctccctcgcctactctgaggccttccactacagcttcgcagcccggccccgccgcctcacgcagcttgcgctggcgcagcgtcccgagcctcagctgcttcgtctgcgcccctcctcgctgcgcacccaagatatctcgcacttgctcaccggcgtcttccgcaacttgtactcagccgaggtcatcggcgacgaagtgagcgcaagcttgatcaaggcccgcggcagcgagaatgagcgccacgaggagttcgtggaccagctgcagcagattcgggagctctataagcagcggctggatgagtttgaaatgttggagagacatatcactcaggcccaagcacgggctattgcggaaaatgagcgggtcatgagccaggctggagtacaggacctcgagagccttgtcaggttgcctccagtgaagagtgtctccagatggtgtatagacagcgagttgctacggaaacatcatttgatctccccagaagattactacaccgatacagtgccgtttcactctgcacctaaaggcatctccctacctggatgttcaaaactgacatttagctgtgagaagcgttccgtccagaagaaagagctgaacaagaagcttgaagattcatgcaggaagaagcttgctgagttcgaagatgagttagaccacactgtggacagcctgacatggaatttaactcctaaggccaaagaaaggaccagagaacctctcaagaaagcaagtcaaccaaggaataaaaactggatgaaccacttacgtgtgccacagagagagctagacagacttctgcttgccagaatggagagtcggaaccacttcctaaaaaatccccgtttttttcctcctaacactcgatatggaggcaagtctcttgtttttcctccaaagaagccagcaccgataggagaattccagagtacagagccagaacagagttgtgctgatactccagtgtttctagctaagccaccaattgggtttttcacagattatgaaattggtccagtttatgagatggtaattgcgctgcagaacaccaccacgaccagccgctacctgcgagtcctcccgccttccacgccatacttcgctctgggactggggatgttcccaggaaaaggtggaatggtggctcctggaatgacctgccagtacattgtccagttttttcccgactgccttggggattttgatgattttattttagtggagacccagtcagcccacacacttctgatccccctgcaggcccggaggccgccccccgtgctgacattgtcaccggtgttggactgtggttactgcctcattgggggagtcaagatgaccagattcatctgcaaaaatgtgggtttcagtgttggcaggttctgcattatgcccaaaacaagctggccaccactaagtttcaaggccattgcaaccgtcggctttgttgaacaacctccttttggaatcctgccttcggtgtttgagctggccccgggacatgctatattagtggaggaattgggcagctgattgctttggatctgatctatatttctggtgaaaaaagccagccagaccctggagagctcacagacttaacagcccagcacttcatacgatttgagcctgaaaaccttcggtccacggctaggaagcagctgattattagaaatgctacgcacgtggagctggccttctactggcagatcatgaagcccaacctgcagcccctcatgcctggagaaaccttcagcatggacagcatcaagtgctaccccgacaaggagactgccttctccatcatgcccagaaagggggttctaagcccccacacagaccacgagttcatcctgagcttttctcctcatgagctgagggattttcacagtgtgctccagatggtgctagaggaagtcccagagcctgtaagttcagaagcggagagcctggggcactcctcctactctgtggatgatgtgattgtcctggaaatcgaggtgaaaggctcagtagaacctttccaggttctcttagagccatatgccctcatcatcccaggggagaactacattgggataaatgtgaagaaggcttttaagatgtggaacaacagcaagtcacccatcagatacctgtgggggaagatcagcgactgccacatcattgaagtggagcccggcacaggggtcatagagcccagtgaggtcggggattttgagttgaactttactgggggtgtccctggccccacaagccaggacctgctgtgtgaaatcgaagactcgccctcgccagtggtgttacacattgaggctgtctttaaggggcctgccctcatcatcaacgtctcagcccttcagtttggtctgctccgcctggggcagaaagccacaaactccatccagatccggaacgtcagccagctcccagccacatggcgcatgaaggagagcccagtctccctccaggaaaggcctgaggatgtgtctcccttcgacattgagccttcgagtggccagcttcactctctgggggagtgcagggtggacatcaccttggaggccctgcactgccagcatctggagaccgtcctggagctggaggtggaaaatggtgcctggagctaccttcctgtgtatgctgaggtacagaagccccatgtgtacctacagagcagccaggtggaggttagaaatctctacctgggtgtgcccacgaagacaaccatcacacttatcaatggcacgctcctgcctacccagttccactggggcaagctcctcggacaccaagcagaattctgcatggtgacagtctcccccaaacatggcctgctgggcccaagtgaggagtgccagctcaagttggagttgactgctcatacccaggaagagctgacccatctggccctcccttgtcacgtgtcaggcatgaagaagccactggttctaggcatttctgggaagccccagggactgcaagtggccattaccatctctaaggagagctctgattgcagcacagagcagtggccaggccacccaaaggagctccgcctggactttggctcagcggtgccactgaggacccgtgtgactcgccagctcattctcaccaatcgctccccaatacggacccgtttctccctcaagtttgagtatttcgggagcccccaaaacagcctgagcaaaaagaccagccttcccaacatgcctcctgccctgctaaagacagtgcggatgcaagagcacctggccaagcgagagcagctggattttatggagagcatgctatcccacgggaaaggagctgctttcttccctcacttttcccagggcatgctggggccctaccagcagctgtgcattgacatcacaggctgtgccaacatgtggggcgagtactgggacaacctcatctgcacggtgggagacctgctgccggaagtcatcccagtgcacatggcagcggtgggctgccccatcagctccctgaggaccacctcctacactattgaccaggcccagaaggaaccagccatgaggttcggcacccaggtctccggaggagacacagttacccgaacccttcgcctgaataactccagcccctgtgacatccgcctggattgggagacctatgttccagaagacaaggaagaccggctggtggagctgctggtgttttatgggccacctttcccgctgcgggaccaagccgggaatgagcttgtgtgccctgatacccctgagggtggctgcctcctctggtccccaggcccctccagttcatcggaattcagccatgaaactgactcatcagttgagggcagctccagtgccagcaatagggtggcacagaagctcatctcagtcatcctgcaggcacatgagggggtgccctccggccacctgtactgtatcagccccaagcaggtggtggtccctgctgggggcagcagtaccatctacatctccttcacccctatggtgctcagccctgagatcctgcacaaggtggagtgtactggctacgccctgggtttcatgagcttggacagcaaggtggaaagggagattccagggaagaggcatcgcctgcaggactttgcggtgggacccctgaaactggacctgcatagctacgtgaggcctgcacagctaagtgtggagctggactacggcggcagtatggaattccagtgccaggccagtgacctcattcccgagcagccctgctctggggtgctgagtgagctggtgaccacccaccacctgaagctgaccaacactacagagatcccacactacttccggcttatggtctccaggcccttctccgtttctcaagatggggcgagccaggaccacagagctcctggccctggccagaagcaggagtgtgaggaggagacagcctcagcggacaagcagctggtgctccaagcacaggagaacatgctggtgaacgtgtccttctcactctccctggagctgctctcctatcagaagctcccagctgaccagacactgcctggggtggacattcagcagagtgcgagtggagagagagagatggtgtttactcagaacctgctcctggagtacaccaaccagaccactcaggtggtgcccctgcgggctgtggtggccgtgcctgagctgcagctctccaccagctgggtggactttgggacctgctttgtgagccagcagcgagtccgggaggtctacctgatgaacctgagcgggtgccgaagctactggactatgctgatgggccagcaggagccagccaaggccgctgtggccttcagggtctccccaaacagtgggctgctagaagcacgatccgccaatgcacccccaacctccatcgccttgcaggttttcttcactgccaggagtagtgagctgtacgagtccacgatggtggtggaaggtgtgctcggtgagaagtcctgcaccctgcggctccggggccaaggctcctatgatgagagatacatgttgcctcaccagccctgaggctccgccccagccctcagccccaggccccagctggagaaaaaacattgcccagggattaggagcagctcttcagcacaaagacacagacttggggacctggggacctctgggcagctcctggaatggaagaacccccttccacaatggtctcagcctaggccctcatgatatgtcctcagagctaacataaaggacaggccacaccacagcagagaccaccacattgagatcactactcagtgcatagcgaagaccagtatggcaaaattagtcttggaaaaaaaccacagccactaagataaattcatgcacttttactatgc

SEQ ID NO: 3575 - protein, 1105 aa, Homo sapiens
MKPNLQPLMPGETFSMDSIKCYPDKETAFSIMPRKGVLSPHTDHEFILSFSPHELRDFHSVLQMVLEEVPEPVSSEAESLGHSSYSVDDVIVLEIEVKGSVEPFQVLLEPYALIIPGENYIGINVKKAFKMWNNSKSPIRYLWGKISDCHIIEVEPGTGVIEPSEVGDFELNFTGGVPGPTSQDLLCEIEDSPSPVVLHIEAVFKGPALIINVSALQFGLLRLGQKATNSIQIRNVSQLPATWRMKESPVSLQERPEDVSPFDIEPSSGQLHSLGECRVDITLEALHCQHLETVLELEVENGAWSYLPVYAEVQKPHVYLQSSQVEVRNLYLGVPTKTTITLINGTLLPTQFHWGKLLGHQAEFCMVTVSPKHGLLGPSEECQLKLELTAHTQEELTHLALPCHVSGMKKPLVLGISGKPQGLQVAITISKESSDCSTEQWPGHPKELRLDFGSAVPLRTRVTRQLILTNRSPIRTRFSLKFEYFGSPQNSLSKKTSLPNMPPALLKTVRMQEHLAKREQLDFMESMLSHGKGAAFFPHFSQGMLGPYQQLCIDITGCANMWGEYWDNLICTVGDLLPEVIPVHMAAVGCPISSLRTTSYTIDQAQKEPAMRFGTQVSGGDTVTRTLRLNNSSPCDIRLDWETYVPEDKEDRLVELLVFYGPPFPLRDQAGNELVCPDTPEGGCLLWSPGPSSSSEFSHETDSSVEGSSSASNRVAQKLISVILQAHEGVPSGHLYCISPKQVVVPAGGSSTIYISFTPMVLSPEILHKVECTGYALGFMSLDSKVEREIPGKRHRLQDFAVGPLKLDLHSYVRPAQLSVELDYGGSMEFQCQASDLIPEQPCSGVLSELVTTHHLKLTNTTEIPHYFRLMVSRPFSVSQDGASQDHRAPGPGQKQECEEETASADKQLVLQAQENMLVNVSFSLSLELLSYQKLPADQTLPGVDIQQSASGEREMVFTQNLLLEYTNQTTQVVPLRAVVAVPELQLSTSWVDFGTCFVSQQRVREVYLMNLSGCRSYWTMLMGQQEPAKAAVAFRVSPNSGLLEARSANAPPTSIALQVFFTARSSELYESTMVVEGVLGEKSCTLRLRGQGSYDERYMLPHQP

SEQ ID NO: 3576 - DNA, 5750 bp, Homo sapiens
aggcagaagcagcatcatacttctttggtatcttcagcaatcagcacagacctgaaacacaatctttacacaataaatatgatgagtgaatgaacagttgcttaacaaattaaagaatggatgaaggtaggtagttaggtacaaggttttgcagataggcctggctgtgtcaattaaacctttcttcatgggtcctcacacttagtaagctcacttttaaaaggacaatgctgaagacacaaatgtttacaatgaccacagcgatgacgggatccgagagaaaggcaaggcggaaggggtgaggccggaagccgaagtgccgcagggagttagcggcgtctcggttgccatggagaccaggagctccaaaacgcggaggtctttagcgtcccggaccaacgagtgccaggggacaatgtgggcgccaacttcgccaccagccgggtccagcagccccagccagcccacctggaagtcctccttgtattcctccctcgcctactctgaggccttccactacagcttcgcagcccggccccgccgcctcacgcagcttgcgctggcgcagcgtcccgagcctcagctgcttcgtctgcgcccctcctcgctgcgcacccaagatatctcgcacttgctcaccggcgtcttccgcaacttgtactcagccgaggtcatcggcgacgaagtgagcgcaagcttgatcaaggcccgcggcagcgagaatgagcgccacgaggagttcgtggaccagctgcagcagattcgggagctctataagcagcggctggatgagtttgaaatgttggagagacatatcactcaggcccaagcacgggctattgcggaaaatgagcgggtcatgagccaggctggagtacaggacctcgagagccttgtcaggttgcctccagtgaagagtgtctccagatggtgtatagacagcgagttgctacggaaacatcatttgatctccccagaagattactacaccgatacagtgccgtttcactctgcacctaaaggcatctccctacctggatgttcaaaactgacatttagctgtgagaagcgttccgtccagaagaaagagctgaacaagaagcttgaagattcatgcaggaagaagcttgctgagttcgaagatgagttagaccacactgtggacagcctgacatggaatttaactcctaaggccaaagaaaggaccagagaacctctcaagaaagcaagtcaaccaaggaataaaaactggatgaaccacttacgtgtgccacagagagagctagacagacttctgcttgccagaatggagagtcggaaccacttcctaaaaaatccccgtttttttcctcctaacactcgatatggaggcaagtctcttgtttttcctccaaagaagccagcaccgataggagaattccagagtacagagccagaacagagttgtgctgatactccagtgtttctagctaagccaccaattgggtttttcacagattatgaaattggtccagtttatgagatggtaattgcgctgcagaacaccaccacgaccagccgctacctgcgagtcctcccgccttccacgccatacttcgctctgggactggggatgttcccaggaaaaggtggaatggtggctcctggaatgacctgccagtacattgtccagttttttcccgactgccttggggattttgatgattttattttagtggagacccagtcagcccacacacttctgatccccctgcaggcccggaggccgccccccgtgctgacattgtcaccggtgttggactgtggttactgcctcattgggggagtcaagatgaccagattcatctgcaaaaatgtgggtttcagtgttggcaggttctgcattatgcccaaaacaagctggccaccactaagtttcaaggccattgcaaccgtcggctttgttgaacaacctccttttggaatcctgccttcggtgtttgagctggccccgggacatgctatattagtggaggtcttgttttccccaaagagcctaggaaaggcagagcagaccttcatcatcatgtgcgacaactgccagataaaggagctggtgaccataggaattgggcagctgattgctttggatctgatctatatttctggtgaaaaaagccagccagaccctggagagctcacagacttaacagcccagcacttcatacgatttgagcctgaaaaccttcggtccacggctaggaagcagctgattattagaaatgctacctgagggattttcacagtgtgctccagatggtgctagaggaagtcccagagcctgtaagttcagaagcggagagcctggggcactcctcctactctgtggatgatgtgattgtcctggaaatcgaggtgaaaggctcagtagaacctttccaggttctcttagagccatatgccctcatcatcccaggggagaactacattgggataaatgtgaagaaggcttttaagatgtggaacaacagcaagtcacccatcagatacctgtgggggaagatcagcgactgccacatcattgaagtggagcccggcacaggggtcatagagcccagtgaggtcggggattttgagttgaactttactgggggtgtccctggccccacaagccaggacctgctgtgtgaaatcgaagactcgccctcgccagtggtgttacacattgaggctgtctttaaggggcctgccctcatcatcaacgtctcagcccttcagtttggtctgctccgcctggggcagaaagccacaaactccatccagatccggaacgtcagccagctcccagccacatggcgcatgaaggagagcccagtctccctccaggaaaggcctgaggatgtgtctcccttcgacattgagccttcgagtggccagcttcactctctgggggagtgcagggtggacatcaccttggaggccctgcactgccagcatctggagaccgtcctggagctggaggtggaaaatggtgcctggagctaccttcctgtgtatgctgaggtacagaagccccatgtgtacctacagagcagccaggtggaggttagaaatctctacctgggtgtgcccacgaagacaaccatcacacttatcaatggcacgctcctgcctacccagttccactggggcaagctcctcggacaccaagcagaattctgcatggtgacagtctcccccaaacatggcctgctgggcccaagtgaggagtgccagctcaagttggagttgactgctcatacccaggaagagctgacccatctggccctcccttgtcacgtgtcaggcatgaagaagccactggttctaggcatttctgggaagccccagggactgcaagtggccattaccatctctaaggagagctctgattgcagcacagagcagtggccaggccacccaaaggagctccgcctggactttggctcagcggtgccactgaggacccgtgtgactcgccagctcattctcaccaatcgctccccaatacggacccgtttctccctcaagtttgagtatttcgggagcccccaaaacagcctgagcaaaaagaccagccttcccaacatgcctcctgccctgctaaagacagtgcggatgcaagagcacctggccaagcgagagcagctggattttatggagagcatgctatcccacgggaaaggagctgctttcttccctcacttttcccagggcatgctggggccctaccagcagctgtgcattgacatcacaggctgtgccaacatgtggggcgagtactgggacaacctcatctgcacggtgggagacctgctgccggaagtcatcccagtgcacatggcagcggtgggctgccccatcagctccctgaggaccacctcctacactattgaccaggcccagaaggaaccagccatgaggttcggcacccaggtctccggaggagacacagttacccgaacccttcgcctgaataactccagcccctgtgacatccgcctggattgggagacctatgttccagaagacaaggaagaccggctggtggagctgctggtgttttatgggccacctttcccgctgcgggaccaagccgggaatgagcttgtgtgccctgatacccctgagggtggctgcctcctctggtccccaggcccctccagttcatcggaattcagccatgaaactgactcatcagttgagggcagctccagtgccagcaatagggtggcacagaagctcatctcagtcatcctgcaggcacatgagggggtgccctccggccacctgtactgtatcagccccaagcaggtggtggtccctgctgggggcagcagtaccatctacatctccttcacccctatggtgctcagccctgagatcctgcacaaggtggagtgtactggctacgccctgggtttcatgagcttggacagcaaggtggaaagggagattccagggaagaggcatcgcctgcaggactttgcggtgggacccctgaaactggacctgcatagctacgtgaggcctgcacagctaagtgtggagctggactacggcggcagtatggaattccagtgccaggccagtgacctcattcccgagcagccctgctctggggtgctgagtgagctggtgaccacccaccacctgaagctgaccaacactacagagatcccacactacttccggcttatggtctccaggcccttctccgtttctcaagatggggcgagccaggaccacagagctcctggccctggccagaagcaggagtgtgaggaggagacagcctcagcggacaagcagctggtgctccaagcacaggagaacatgctggtgaacgtgtccttctcactctccctggagctgctctcctatcagaagctcccagctgaccagacactgcctggggtggacattcagcagagtgcgagtggagagagagagatggtgtttactcagaacctgctcctggagtacaccaaccagaccactcaggtggtgcccctgcgggctgtggtggccgtgcctgagctgcagctctccaccagctgggtggactttgggacctgctttgtgagccagcagcgagtccgggaggtctacctgatgaacctgagcgggtgccgaagctactggactatgctgatgggccagcaggagccagccaaggccgctgtggccttcagggtctccccaaacagtgggctgctagaagcacgatccgccaatgcacccccaacctccatcgccttgcaggttttcttcactgccaggagtagtgagctgtacgagtccacgatggtggtggaaggtgtgctcggtgagaagtcctgcaccctgcggctccggggccaaggctcctatgatgagagatacatgttgcctcaccagccctgaggctccgccccagccctcagccccaggccccagctggagaaaaaacattgcccagggattaggagcagctcttcagcacaaagacacagacttggggacctggggacctctgggcagctcctggaatggaagaacccccttccacaatggtctcagcctaggccctcatgatatgtcctcagagctaacataaaggacaggccacaccacagcagagaccaccacattgagatcactactcagtgcatagcgaagaccagtatggcaaaattagtcttggaaaaaaaccacagccactaagataaattcatgcacttttactatgc

SEQ ID NO: 3577 - protein, 1042 aa, Homo sapiens
MVLEEVPEPVSSEAESLGHSSYSVDDVIVLEIEVKGSVEPFQVLLEPYALIIPGENYIGINVKKAFKMWNNSKSPIRYLWGKISDCHIIEVEPGTGVIEPSEVGDFELNFTGGVPGPTSQDLLCEIEDSPSPVVLHIEAVFKGPALIINVSALQFGLLRLGQKATNSIQIRNVSQLPATWRMKESPVSLQERPEDVSPFDIEPSSGQLHSLGECRVDITLEALHCQHLETVLELEVENGAWSYLPVYAEVQKPHVYLQSSQVEVRNLYLGVPTKTTITLINGTLLPTQFHWGKLLGHQAEFCMVTVSPKHGLLGPSEECQLKLELTAHTQEELTHLALPCHVSGMKKPLVLGISGKPQGLQVAITISKESSDCSTEQWPGHPKELRLDFGSAVPLRTRVTRQLILTNRSPIRTRFSLKFEYFGSPQNSLSKKTSLPNMPPALLKTVRMQEHLAKREQLDFMESMLSHGKGAAFFPHFSQGMLGPYQQLCIDITGCANMWGEYWDNLICTVGDLLPEVIPVHMAAVGCPISSLRTTSYTIDQAQKEPAMRFGTQVSGGDTVTRTLRLNNSSPCDIRLDWETYVPEDKEDRLVELLVFYGPPFPLRDQAGNELVCPDTPEGGCLLWSPGPSSSSEFSHETDSSVEGSSSASNRVAQKLISVILQAHEGVPSGHLYCISPKQVVVPAGGSSTIYISFTPMVLSPEILHKVECTGYALGFMSLDSKVEREIPGKRHRLQDFAVGPLKLDLHSYVRPAQLSVELDYGGSMEFQCQASDLIPEQPCSGVLSELVTTHHLKLTNTTEIPHYFRLMVSRPFSVSQDGASQDHRAPGPGQKQECEEETASADKQLVLQAQENMLVNVSFSLSLELLSYQKLPADQTLPGVDIQQSASGEREMVFTQNLLLEYTNQTTQVVPLRAVVAVPELQLSTSWVDFGTCFVSQQRVREVYLMNLSGCRSYWTMLMGQQEPAKAAVAFRVSPNSGLLEARSANAPPTSIALQVFFTARSSELYESTMVVEGVLGEKSCTLRLRGQGSYDERYMLPHQP

SEQ ID NO: 3578 - DNA, 6666 bp, Homo sapiens
aggcagaagcagcatcatacttctttggtatcttcagcaatcagcacagacctgaaacacaatctttacacaataaatatgatgagtgaatgaacagttgcttaacaaattaaagaatggatgaaggtaggtagttaggtacaaggttttgcagataggcctggctgtgtcaattaaacctttcttcatgggtcctcacacttagtaagctcacttttaaaaggacaatgctgaagacacaaatgtttacaatgaccacagcgatgacgggatccgagagaaaggcaaggcggaaggggtgaggccggaagccgaagtgccgcagggagttagcggcgtctcggttgccatggagaccaggagctccaaaacgcggaggtctttagcgtcccggaccaacgagtgccaggggacaatgtgggcgccaacttcgccaccagccgggtccagcagccccagccagcccacctggaagtcctccttgtattcctccctcgcctactctgaggccttccactacagcttcgcagcccggccccgccgcctcacgcagcttgcgctggcgcagcgtcccgagcctcagctgcttcgtctgcgcccctcctcgctgcgcacccaagatatctcgcacttgctcaccggcgtcttccgcaacttgtactcagccgaggtcatcggcgacgaagtgagcgcaagcttgatcaaggcccgcggcagcgagaatgagcgccacgaggagttcgtggaccagctgcagcagattcgggagctctataagcagcggctggatgagtttgaaatgttggagagacatatcactcaggcccaagcacgggctattgcggaaaatgagcgggtcatgagccaggctggagtacaggacctcgagagccttgtcaggttgcctccagtgaagagtgtctccagatggtgtatagacagcgagttgctacggaaacatcatttgatctccccagaagattactacaccgatacagtgccgtttcactctgcacctaaaggcatctccctacctggatgttcaaaactgacatttagctgtgagaagcgttccgtccagaagaaagagctgaacaagaagcttgaagattcatgcaggaagaagcttgctgagttcgaagatgagttagaccacactgtggacagcctgacatggaatttaactcctaaggccaaagaaaggaccagagaacctctcaagaaagcaagtcaaccaaggaataaaaactggatgaaccacttacgtgtgccacagagagagctagacagacttctgcttgccagaatggagagtcggaaccacttcctaaaaaatccccgtttttttcctcctaacactcgatatggaggcaagtctcttgtttttcctccaaagaagccagcaccgataggagaattccagagtacagagccagaacagagttgtgctgatactccagtgtttctagctaagccaccaattgggtttttcacagattatgaaattggtccagtttatgagatggtaattgcgctgcagaacaccaccacgaccagccgctacctgcgagtcctcccgccttccacgccatacttcgctctgggactggggatgttcccaggaaaaggtggaatggtggctcctggaatgacctgccagtacattgtccagttttttcccgactgccttggggattttgatgattttattttagtggagacccagtcagcccacacacttctgatccccctgcaggcccggaggccgccccccgtgctgacattgtcaccggtgttggactgtggttactgcctcattgggggagtcaagatgaccagattcatctgcaaaaatgtgggtttcagtgttggcaggttctgcattatgcccaaaacaagctggccaccactaagtttcaaggccattgcaaccgtcggctttgttgaacaacctccttttggaatcctgccttcggtgtttgagctggccccgggacatgctatattagtggaggtcttgttttccccaaagagcctaggaaaggcagagcagaccttcatcatcatgtgcgacaactgccagataaaggagctggtgaccataggaattgggcagctgattgctttggatctgatctatatttctggtgaaaaaagccagccagaccctggagagctcacagacttaacagcccagcacttcatacgatttgagcctgaaaaccttcggtccacggctaggaagcagctgattattagaaatgctacctgagggattttcacagtgtgctccagatggtgctagaggaagtcccagagcctgtaagttcagaagcggagagcctggggcactcctcctactctgtggatgatgtgattgtcctggaaatcgaggtgaaaggctcagtagaacctttccaggttctcttagagccatatgccctcatcatcccaggggagaactacattgggataaatgtgaagaaggcttttaagatgtggaacaacagcaagtcacccatcagatacctgtgggggaagatcagcgactgccacatcattgaagtggagcccggcacaggggtcatagagcccagtgaggtcggggattttgagttgaactttactgggggtgtccctggccccacaagccaggacctgctgtgtgaaatcgaagactcgccctcgccagtggtgttacacattgaggctgtctttaaggggcctgccctcatcatcaacgtctcagcccttcagtttggtctgctccgcctggggcagaaagccacaaactccatccagatccggaacgtcagccagctcccagccacatggcgcatgaaggagagcccagtctccctccaggaaaggcctgaggatgtgtctcccttcgacattgagccttcgagtggccagcttcactctctgggggagtgcagggtggacatcaccttggaggccctgcactgccagcatctggagaccgtcctggagctggaggtggaaaatggtgcctggagctaccttcctgtgtatgctgaggtacagaagccccatgtgtacctacagagcagccaggtggaggttagaaatctctacctgggtgtgcccacgaagacaaccatcacacttatcaatggcacgctcctgcctacccagttccactggggcaagctcctcggacaccaagcagaattctgcatggtgacagtctcccccaaacatggcctgctgggcccaagtgaggagtgccagctcaagttggagttgactgctcatacccaggaagagctgacccatctggccctcccttgtcacgtgtcaggcatgaagaagccactggttctaggcatttctgggaagccccagggactgcaagtggccattaccatctctaaggagagctctgattgcagcacagagcagtggccaggccacccaaaggagctccgcctggactttggctcagcggtgccactgaggacccgtgtgactcgccagctcattctcaccaatcgctccccaatacggacccgtttctccctcaagtttgagtatttcgggagcccccaaaacagcctgagcaaaaagaccagccttcccaacatgcctcctgccctgctaaagacagtgcggatgcaagagcacctggccaagcgagagcagctggattttatggagagcatgctatcccacgggaaaggagctgctttcttccctcacttttcccagggcatgctggggccctaccagcagctgtgcattgacatcacaggctgtgccaacatgtggggcgagtactgggacaacctcatctgcacggtgggagacctgctgccggaagtcatcccagtgcacatggcagcggtgggctgccccatcagctccctgaggaccacctcctacactattgaccaggcccagaaggaaccagccatgaggttcggcacccaggtctccggaggagacacagttacccgaacccttcgcctgaataactccagcccctgtgacatccgcctggattgggagacctatgttccagaagacaaggaagaccggctggtggagctgctggtgttttatgggccacctttcccgctgcgggaccaagccgggaatgagcttgtgtgccctgatacccctgagggtggctgcctcctctggtccccaggcccctccagttcatcggaattcagccatgaaactgactcatcagttgagggcagctccagtgccagcaatagggtggcacagaagctcatctcagtcatcctgcaggcacatgagggggtgccctccggccacctgtactgtatcagccccaagcaggtggtggtccctgctgggggcagcagtaccatctacatctccttcacccctatggtgctcagccctgagatcctgcacaaggtggagtgtactggctacgccctgggtttcatgagcttggacagcaaggtggaaagggagattccagggaagaggcatcgcctgcaggactttgcggtgggacccctgaaactggacctgcatagctacgtgaggcctgcacagctaagtgtggagctggactacggcggcagtatggaattccagtgccaggccagtgacctcattcccgagcagccctgctctggggtgctgagtgagctggtgaccacccaccacctgaagctgaccaacactacagagatcccacactacttccggcttatggtctccaggcccttctccgtttctcaagatggggcgagccaggaccacagagctcctggccctggccagaagcaggagtgtgaggaggagacagcctcagcggacaagcagctggtgctccaagcacaggagaacatgctggtgaacgtgtccttctcactctccctggagctgctctcctatcagaagctcccagctgaccagacactgcctggggtggacattcagcagagtgcgagtggagagagagagatggtgtttactcagaacctgctcctggagtacaccaaccagaccactcaggtggtgcccctgcgggctgtggtggccgtgcctgagctgcagctctccaccagctgggtggactttgggacctgctttgtgagccagcagcgagtccgggaggtctacctgatgaacctgagcgggtgccgaagctactggactatgctgatgggccagcaggagccagccaaggccgctgtggccttcagggtctccccaaacagtgggctgctagaagcacgatccgccaatgcacccccaacctccatcgccttgcaggttttcttcactgccaggagtagtgagctgtacgagtccacgatggtggtggaaggtgtgctcggtgagaagtcctgcaccctgcggctccggggccaaggctcctatgatgagagatacatgttgcctcaccagccctgaggctccgccccagccctcagccccaggccccagctggagaaaaaacattgcccagggattaggagcagctcttcagcacaaagacacagacttggggacctggggacctctgggcagctcctggaatggaagaacccccttccacaatggtctcagcctaggccctcatgatatgtcctcagagctaacataaaggacaggccacaccacagcagagaccaccacattgagatcactactcagtgcatagcgaagaccagtatggcaaaattagtcttggaaaaaaaccacagccactaagataaattcatgcacttttactatgcccattgcacttctcatccatggatttgccttgccttaagaattaaccatggccttgtggcctgggtgacccaggctgcttttatcttgcacagctaaagagggtctgatgggtggctcaacaccccacccactcctataccatgtcatcagtgttcacattttccaaatgagttgaagtgccttgatctgtccactgccaccaccaccagtgctgagttttcccatgtggttttgcttttgtggtgttactgccttgctgctagagcagcaggactgtctgcgtagcgcctccagcctgggacctcactcagttcccagggtattcaaagacggcagcggctcccattccagtcccgatgcacatggacaccactccgtatgccctgtgaaaacaaaacttaattggctgggcaaaggcacccaccaaattacctccagaccaggctgacccagaaggacgtcatggacaagtaggatgcaaaaccatcagaccagatctgtgggcaagcggtaccctggcctcccacttgggcacacacacggtgacagatgcccactgcaggctagtatccctttcaaggctggcccttaaggaaaacagggatcatgcccctacatcctaagttcagggtgtttctgtgtgcatgttcccctccccagggatcgatcataatcccaaaagacacaatcccaaacacaatcatcccaaatgttgaaatcctggaagaacaaaatccctaaagtctaaaatcctgaaaatcacaatcctaaaagatcaaaatcctgaaaatataattctggaaaaaataatttggaagcctggcctggtggcatctacttgtagtcccagctattcagcaggctgaggcaagaggatcacttgtgcctaggagttcaagaccagcctaggcaata

SEQ ID NO: 3579 - protein, 1042 aa, Homo sapiens; identical to SEQ ID NO: 3577

SEQ ID NO: 3580 - DNA, 6859 bp, Homo sapiens
aggcagaagcagcatcatacttctttggtatcttcagcaatcagcacagacctgaaacacaatctttacacaataaatatgatgagtgaatgaacagttgcttaacaaattaaagaatggatgaaggtaggtagttaggtacaaggttttgcagataggcctggctgtgtcaattaaacctttcttcatgggtcctcacacttagtaagctcacttttaaaaggacaatgctgaagacacaaatgtttacaatgaccacagcgatgacgggatccgagagaaaggcaaggcggaaggggtgaggccggaagccgaagtgccgcagggagttagcggcgtctcggttgccatggagaccaggagctccaaaacgcggaggtctttagcgtcccggaccaacgagtgccaggggacaatgtgggcgccaacttcgccaccagccgggtccagcagccccagccagcccacctggaagtcctccttgtattcctccctcgcctactctgaggccttccactacagcttcgcagcccggccccgccgcctcacgcagcttgcgctggcgcagcgtcccgagcctcagctgcttcgtctgcgcccctcctcgctgcgcacccaagatatctcgcacttgctcaccggcgtcttccgcaacttgtactcagccgaggtcatcggcgacgaagtgagcgcaagcttgatcaaggcccgcggcagcgagaatgagcgccacgaggagttcgtggaccagctgcagcagattcgggagctctataagcagcggctggatgagtttgaaatgttggagagacatatcactcaggcccaagcacgggctattgcggaaaatgagcgggtcatgagccaggctggagtacaggacctcgagagccttgtcaggttgcctccagtgaagagtgtctccagatggtgtatagacagcgagttgctacggaaacatcatttgatctccccagaagattactacaccgatacagtgccgtttcactctgcacctaaaggcatctccctacctggatgttcaaaactgacatttagctgtgagaagcgttccgtccagaagaaagagctgaacaagaagcttgaagattcatgcaggaagaagcttgctgagttcgaagatgagttagaccacactgtggacagcctgacatggaatttaactcctaaggccaaagaaaggaccagagaacctctcaagaaagcaagtcaaccaaggaataaaaactggatgaaccacttacgtgtgccacagagagagctagacagacttctgcttgccagaatggagagtcggaaccacttcctaaaaaatccccgtttttttcctcctaacactcgatatggaggcaagtctcttgtttttcctccaaagaagccagcaccgataggagaattccagagtacagagccagaacagagttgtgctgatactccagtgtttctagctaagccaccaattgggtttttcacagattatgaaattggtccagtttatgagatggtaattgcgctgcagaacaccaccacgaccagccgctacctgcgagtcctcccgccttccacgccatacttcgctctgggactggggatgttcccaggaaaaggtggaatggtggctcctggaatgacctgccagtacattgtccagttttttcccgactgccttggggattttgatgattttattttagtggagacccagtcagcccacacacttctgatccccctgcaggcccggaggccgccccccgtgctgacattgtcaccggtgttggactgtggttactgcctcattgggggagtcaagatgaccagattcatctgcaaaaatgtgggtttcagtgttggcaggttctgcattatgcccaaaacaagctggccaccactaagtttcaaggccattgcaaccgtcggctttgttgaacaacctccttttggaatcctgccttcggtgtttgagctggccccgggacatgctatattagtggaggtcttgttttccccaaagagcctaggaaaggcagagcagaccttcatcatcatgtgcgacaactgccagataaaggagctggtgaccataggaattgggcagctgattgctttggatctgatctatatttctggtgaaaaaagccagccagaccctggagagctcacagacttaacagcccagcacttcatacgatttgagcctgaaaaccttcggtccacggctaggaagcagctgattattagaaatgctacgcacgtggagctggccttctactggcagatcatgaagcccaacctgcagcccctcatgcctggagaaaccttcagcatggacagcatcaagtgctaccccgacaaggagactgccttctccatcatgcccagaaagggggttctaagcccccacacagaccacgagttcatcctgagcttttctcctcatgagctgagggattttcacagtgtgctccagatggtgctagaggaagtcccagagcctgtaagttcagaagcggagagcctggggcactcctcctactctgtggatgatgtgattgtcctggaaatcgaggtgaaaggctcagtagaacctttccaggttctcttagagccatatgccctcatcatcccaggggagaactacattgggataaatgtgaagaaggcttttaagatgtggaacaacagcaagtcacccatcagatacctgtgggggaagatcagcgactgccacatcattgaagtggagcccggcacaggggtcatagagcccagtgaggtcggggattttgagttgaactttactgggggtgtccctggccccacaagccaggacctgctgtgtgaaatcgaagactcgccctcgccagtggtgttacacattgaggctgtctttaaggggcctgccctcatcatcaacgtctcagcccttcagtttggtctgctccgcctggggcagaaagccacaaactccatccagatccggaacgtcagccagctcccagccacatggcgcatgaaggagagcccagtctccctccaggaaaggcctgaggatgtgtctcccttcgacattgagccttcgagtggccagcttcactctctgggggagtgcagggtggacatcaccttggaggccctgcactgccagcatctggagaccgtcctggagctggaggtggaaaatggtgcctggagctaccttcctgtgtatgctgaggtacagaagccccatgtgtacctacagagcagccaggtggaggttagaaatctctacctgggtgtgcccacgaagacaaccatcacacttatcaatggcacgctcctgcctacccagttccactggggcaagctcctcggacaccaagcagaattctgcatggtgacagtctcccccaaacatggcctgctgggcccaagtgaggagtgccagctcaagttggagttgactgctcatacccaggaagagctgacccatctggccctcccttgtcacgtgtcaggcatgaagaagccactggttctaggcatttctgggaagccccagggactgcaagtggccattaccatctctaaggagagctctgattgcagcacagagcagtggccaggccacccaaaggagctccgcctggactttggctcagcggtgccactgaggacccgtgtgactcgccagctcattctcaccaatcgctccccaatacggacccgtttctccctcaagtttgagtatttcgggagcccccaaaacagcctgagcaaaaagaccagccttcccaacatgcctcctgccctgctaaagacagtgcggatgcaagagcacctggccaagcgagagcagctggattttatggagagcatgctatcccacgggaaaggagctgctttcttccctcacttttcccagggcatgctggggccctaccagcagctgtgcattgacatcacaggctgtgccaacatgtggggcgagtactgggacaacctcatctgcacggtgggagacctgctgccggaagtcatcccagtgcacatggcagcggtgggctgccccatcagctccctgaggaccacctcctacactattgaccaggcccagaaggaaccagccatgaggttcggcacccaggtctccggaggagacacagttacccgaacccttcgcctgaataactccagcccctgtgacatccgcctggattgggagacctatgttccagaagacaaggaagaccggctggtggagctgctggtgttttatgggccacctttcccgctgcgggaccaagccgggaatgagcttgtgtgccctgatacccctgagggtggctgcctcctctggtccccaggcccctccagttcatcggaattcagccatgaaactgactcatcagttgagggcagctccagtgccagcaatagggtggcacagaagctcatctcagtcatcctgcaggcacatgagggggtgccctccggccacctgtactgtatcagccccaagcaggtggtggtccctgctgggggcagcagtaccatctacatctccttcacccctatggtgctcagccctgagatcctgcacaaggtggagtgtactggctacgccctgggtttcatgagcttggacagcaaggtggaaagggagattccagggaagaggcatcgcctgcaggactttgcggtgggacccctgaaactggacctgcatagctacgtgaggcctgcacagctaagtgtggagctggactacggcggcagtatggaattccagtgccaggccagtgacctcattcccgagcagccctgctctggggtgctgagtgagctggtgaccacccaccacctgaagctgaccaacactacagagatcccacactacttccggcttatggtctccaggcccttctccgtttctcaagatggggcgagccaggaccacagagctcctggccctggccagaagcaggagtgtgaggaggagacagcctcagcggacaagcagctggtgctccaagcacaggagaacatgctggtgaacgtgtccttctcactctccctggagctgctctcctatcagaagctcccagctgaccagacactgcctggggtggacattcagcagagtgcgagtggagagagagagatggtgtttactcagaacctgctcctggagtacaccaaccagaccactcaggtggtgcccctgcgggctgtggtggccgtgcctgagctgcagctctccaccagctgggtggactttgggacctgctttgtgagccagcagcgagtccgggaggtctacctgatgaacctgagcgggtgccgaagctactggactatgctgatgggccagcaggagccagccaaggccgctgtggccttcagggtctccccaaacagtgggctgctagaagcacgatccgccaatgcacccccaacctccatcgccttgcaggttttcttcactgccaggagtagtgagctgtacgagtccacgatggtggtggaaggtgtgctcggtgagaagtcctgcaccctgcggctccggggccaaggctcctatgatgagagatacatgttgcctcaccagccctgaggctccgccccagccctcagccccaggccccagctggagaaaaaacattgcccagggattaggagcagctcttcagcacaaagacacagacttggggacctggggacctctgggcagctcctggaatggaagaacccccttccacaatggtctcagcctaggccctcatgatatgtcctcagagctaacataaaggacaggccacaccacagcagagaccaccacattgagatcactactcagtgcatagcgaagaccagtatggcaaaattagtcttggaaaaaaaccacagccactaagataaattcatgcacttttactatgcccattgcacttctcatccatggatttgccttgccttaagaattaaccatggccttgtggcctgggtgacccaggctgcttttatcttgcacagctaaagagggtctgatgggtggctcaacaccccacccactcctataccatgtcatcagtgttcacattttccaaatgagttgaagtgccttgatctgtccactgccaccaccaccagtgctgagttttcccatgtggttttgcttttgtggtgttactgccttgctgctagagcagcaggactgtctgcgtagcgcctccagcctgggacctcactcagttcccagggtattcaaagacggcagcggctcccattccagtcccgatgcacatggacaccactccgtatgccctgtgaaaacaaaacttaattggctgggcaaaggcacccaccaaattacctccagaccaggctgacccagaaggacgtcatggacaagtaggatgcaaaaccatcagaccagatctgtgggcaagcggtaccctggcctcccacttgggcacacacacggtgacagatgcccactgcaggctagtatccctttcaaggctggcccttaaggaaaacagggatcatgcccctacatcctaagttcagggtgtttctgtgtgcatgttcccctccccagggatcgatcataatcccaaaagacacaatcccaaacacaatcatcccaaatgttgaaatcctggaagaacaaaatccctaaagtctaaaatcctgaaaatcacaatcctaaaagatcaaaatcctgaaaatataattctggaaaaaataatttggaagcctggcctggtggcatctacttgtagtcccagctattcagcaggctgaggcaagaggatcacttgtgcctaggagttcaagaccagcctaggcaata

SEQ ID NO: 3581 - protein, 1755 aa, Homo sapiens; identical to SEQ ID NO: 343

SEQ ID NO: 3582 - DNA, 7675 bp, Homo sapiens
aggcagaagcagcatcatacttctttggtatcttcagcaatcagcacagacctgaaacacaatctttacacaataaatatgatgagtgaatgaacagttgcttaacaaattaaagaatggatgaaggtaggtagttaggtacaaggttttgcagataggcctggctgtgtcaattaaacctttcttcatgggtcctcacacttagtaagctcacttttaaaaggacaatgctgaagacacaaatgtttacaatgaccacagcgatgacgggatccgagagaaaggcaaggcggaaggggtgaggccggaagccgaagtgccgcagggagttagcggcgtctcggttgccatggagaccaggagctccaaaacgcggaggtctttagcgtcccggaccaacgagtgccaggggacaatgtgggcgccaacttcgccaccagccgggtccagcagccccagccagcccacctggaagtcctccttgtattcctccctcgcctactctgaggccttccactacagcttcgcagcccggccccgccgcctcacgcagcttgcgctggcgcagcgtcccgagcctcagctgcttcgtctgcgcccctcctcgctgcgcacccaagatatctcgcacttgctcaccggcgtcttccgcaacttgtactcagccgaggtcatcggcgacgaagtgagcgcaagcttgatcaaggcccgcggcagcgagaatgagcgccacgaggagttcgtggaccagctgcagcagattcgggagctctataagcagcggctggatgagtttgaaatgttggagagacatatcactcaggcccaagcacgggctattgcggaaaatgagcgggtcatgagccaggctggagtacaggacctcgagagccttgtcaggttgcctccagtgaagagtgtctccagatggtgtatagacagcgagttgctacggaaacatcatttgatctccccagaagattactacaccgatacagtgccgtttcactctgcacctaaaggcatctccctacctggatgttcaaaactgacatttagctgtgagaagcgttccgtccagaagaaagagctgaacaagaagcttgaagattcatgcaggaagaagcttgctgagttcgaagatgagttagaccacactgtggacagcctgacatggaatttaactcctaaggccaaagaaaggaccagagaacctctcaagaaagcaagtcaaccaaggaataaaaactggatgaaccacttacgtgtgccacagagagagctagacagacttctgcttgccagaatggagagtcggaaccacttcctaaaaaatccccgtttttttcctcctaacactcgatatggaggcaagtctcttgtttttcctccaaagaagccagcaccgataggagaattccagagtacagagccagaacagagttgtgctgatactccagtgtttctagctaagccaccaattgggtttttcacagattatgaaattggtccagtttatgagatggtaattgcgctgcagaacaccaccacgaccagccgctacctgcgagtcctcccgccttccacgccatacttcgctctgggactggggatgttcccaggaaaaggtggaatggtggctcctggaatgacctgccagtacattgtccagttttttcccgactgccttggggattttgatgattttattttagtggagacccagtcagcccacacacttctgatccccctgcaggcccggaggccgccccccgtgctgacattgtcaccggtgttggactgtggttactgcctcattgggggagtcaagatgaccagattcatctgcaaaaatgtgggtttcagtgttggcaggttctgcattatgcccaaaacaagctggccaccactaagtttcaaggccattgcaaccgtcggctttgttgaacaacctccttttggaatcctgccttcggtgtttgagctggccccgggacatgctatattagtggaggtcttgttttccccaaagagcctaggaaaggcagagcagaccttcatcatcatgtgcgacaactgccagataaaggagctggtgaccataggaattgggcagctgattgctttggatctgatctatatttctggtgaaaaaagccagccagaccctggagagctcacagacttaacagcccagcacttcatacgatttgagcctgaaaaccttcggtccacggctaggaagcagctgattattagaaatgctacgcacgtggagctggccttctactggcagatcatgaagcccaacctgcagcccctcatgcctggagaaaccttcagcatggacagcatcaagtgctaccccgacaaggagactgccttctccatcatgcccagaaagggggttctaagcccccacacagaccacgagttcatcctgagcttttctcctcatgaggttcagatggtgtcatctcagtagccacacatggttggatcatgtatttagaccccccacctgtgttcctcaatcacactgaagccacagctgggcccaccgaggtgctatcctgcccaggccagcacttggctgagttgggttggagtacacacctggtgtgcagggtgaagcagctcattttgtctggtcctgatcccagactcaccccatctgcagcaagacccttggctggcttcctccgctctgggtgtctcccacatgtctactatggcaaaaaacattaccatccccacccataccacagcatcccctagagagagtgaggtgcagggacccgagggccaggttagcacagcgctggccccagcatggagggaagccctgtgggccacggtaggctagaagggaattcgagctgggcatgaaaaggatgctccggggccattgttagtgggtttggggctgagatgagtgatcctgcctctggtcccagcatccagctgcctcgttgtctatcctgggagggtgtggtgcttcggacacgttgaggggctttgtcagcatcaggaaggcctttgcttcttgcacccaggcccagctgagacaggcccctgagtcctggctcatgttctggcagcaacttcacttttcctaaggaggggaggaggcagcagggaagcaaccctgggttttcagaaggtccttctgatggctaggctaaggggaggaagaattcctgccatgccccagccttctccaggacaacctgctggaacgcagtggtgttttcagggcactgtgtttgccttgcagctgagggattttcacagtgtgctccagatggtgctagaggaagtcccagagcctgtaagttcagaagcggagagcctggggcactcctcctactctgtggatgatgtgattgtcctggaaatcgaggtgaaaggctcagtagaacctttccaggttctcttagagccatatgccctcatcatcccaggggagaactacattgggataaatgtgaagaaggcttttaagatgtggaacaacagcaagtcacccatcagatacctgtgggggaagatcagcgactgccacatcattgaagtggagcccggcacaggggtcatagagcccagtgaggtcggggattttgagttgaactttactgggggtgtccctggccccacaagccaggacctgctgtgtgaaatcgaagactcgccctcgccagtggtgttacacattgaggctgtctttaaggggcctgccctcatcatcaacgtctcagcccttcagtttggtctgctccgcctggggcagaaagccacaaactccatccagatccggaacgtcagccagctcccagccacatggcgcatgaaggagagcccagtctccctccaggaaaggcctgaggatgtgtctcccttcgacattgagccttcgagtggccagcttcactctctgggggagtgcagggtggacatcaccttggaggccctgcactgccagcatctggagaccgtcctggagctggaggtggaaaatggtgcctggagctaccttcctgtgtatgctgaggtacagaagccccatgtgtacctacagagcagccaggtggaggttagaaatctctacctgggtgtgcccacgaagacaaccatcacacttatcaatggcacgctcctgcctacccagttccactggggcaagctcctcggacaccaagcagaattctgcatggtgacagtctcccccaaacatggcctgctgggcccaagtgaggagtgccagctcaagttggagttgactgctcatacccaggaagagctgacccatctggccctcccttgtcacgtgtcaggcatgaagaagccactggttctaggcatttctgggaagccccagggactgcaagtggccattaccatctctaaggagagctctgattgcagcacagagcagtggccaggccacccaaaggagctccgcctggactttggctcagcggtgccactgaggacccgtgtgactcgccagctcattctcaccaatcgctccccaatacggacccgtttctccctcaagtttgagtatttcgggagcccccaaaacagcctgagcaaaaagaccagccttcccaacatgcctcctgccctgctaaagacagtgcggatgcaagagcacctggccaagcgagagcagctggattttatggagagcatgctatcccacgggaaaggagctgctttcttccctcacttttcccagggcatgctggggccctaccagcagctgtgcattgacatcacaggctgtgccaacatgtggggcgagtactgggacaacctcatctgcacggtgggagacctgctgccggaagtcatcccagtgcacatggcagcggtgggctgccccatcagctccctgaggaccacctcctacactattgaccaggcccagaaggaaccagccatgaggttcggcacccaggtctccggaggagacacagttacccgaacccttcgcctgaataactccagcccctgtgacatccgcctggattgggagacctatgttccagaagacaaggaagaccggctggtggagctgctggtgttttatgggccacctttcccgctgcgggaccaagccgggaatgagcttgtgtgccctgatacccctgagggtggctgcctcctctggtccccaggcccctccagttcatcggaattcagccatgaaactgactcatcagttgagggcagctccagtgccagcaatagggtggcacagaagctcatctcagtcatcctgcaggcacatgagggggtgccctccggccacctgtactgtatcagccccaagcaggtggtggtccctgctgggggcagcagtaccatctacatctccttcacccctatggtgctcagccctgagatcctgcacaaggtggagtgtactggctacgccctgggtttcatgagcttggacagcaaggtggaaagggagattccagggaagaggcatcgcctgcaggactttgcggtgggacccctgaaactggacctgcatagctacgtgaggcctgcacagctaagtgtggagctggactacggcggcagtatggaattccagtgccaggccagtgacctcattcccgagcagccctgctctggggtgctgagtgagctggtgaccacccaccacctgaagctgaccaacactacagagatcccacactacttccggcttatggtctccaggcccttctccgtttctcaagatggggcgagccaggaccacagagctcctggccctggccagaagcaggagtgtgaggaggagacagcctcagcggacaagcagctggtgctccaagcacaggagaacatgctggtgaacgtgtccttctcactctccctggagctgctctcctatcagaagctcccagctgaccagacactgcctggggtggacattcagcagagtgcgagtggagagagagagatggtgtttactcagaacctgctcctggagtacaccaaccagaccactcaggtggtgcccctgcgggctgtggtggccgtgcctgagctgcagctctccaccagctgggtggactttgggacctgctttgtgagccagcagcgagtccgggaggtctacctgatgaacctgagcgggtgccgaagctactggactatgctgatgggccagcaggagccagccaaggccgctgtggccttcagggtctccccaaacagtgggctgctagaagcacgatccgccaatgcacccccaacctccatcgccttgcaggttttcttcactgccaggagtagtgagctgtacgagtccacgatggtggtggaaggtgtgctcggtgagaagtcctgcaccctgcggctccggggccaaggctcctatgatgagagatacatgttgcctcaccagccctgaggctccgccccagccctcagccccaggccccagctggagaaaaaacattgcccagggattaggagcagctcttcagcacaaagacacagacttggggacctggggacctctgggcagctcctggaatggaagaacccccttccacaatggtctcagcctaggccctcatgatatgtcctcagagctaacataaaggacaggccacaccacagcagagaccaccacattgagatcactactcagtgcatagcgaagaccagtatggcaaaattagtcttggaaaaaaaccacagccactaagataaattcatgcacttttactatgcccattgcacttctcatccatggatttgccttgccttaagaattaaccatggccttgtggcctgggtgacccaggctgcttttatcttgcacagctaaagagggtctgatgggtggctcaacaccccacccactcctataccatgtcatcagtgttcacattttccaaatgagttgaagtgccttgatctgtccactgccaccaccaccagtgctgagttttcccatgtggttttgcttttgtggtgttactgccttgctgctagagcagcaggactgtctgcgtagcgcctccagcctgggacctcactcagttcccagggtattcaaagacggcagcggctcccattccagtcccgatgcacatggacaccactccgtatgccctgtgaaaacaaaacttaattggctgggcaaaggcacccaccaaattacctccagaccaggctgacccagaaggacgtcatggacaagtaggatgcaaaaccatcagaccagatctgtgggcaagcggtaccctggcctcccacttgggcacacacacggtgacagatgcccactgcaggctagtatccctttcaaggctggcccttaaggaaaacagggatcatgcccctacatcctaagttcagggtgtttctgtgtgcatgttcccctccccagggatcgatcataatcccaaaagacacaatcccaaacacaatcatcccaaatgttgaaatcctggaagaacaaaatccctaaagtctaaaatcctgaaaatcacaatcctaaaagatcaaaatcctgaaaatataattctggaaaaaataatttggaagcctggcctggtggcatctacttgtagtcccagctattcagcaggctgaggcaagaggatcacttgtgcctaggagttcaagaccagcctaggcaata

SEQ ID NO: 3583 - protein, 1086 aa, Homo sapiens; identical to SEQ ID NO: 3573

SEQ ID NO: 3584 - DNA, 6768 bp, Homo sapiens
aggcagaagcagcatcatacttctttggtatcttcagcaatcagcacagacctgaaacacaatctttacacaataaatatgatgagtgaatgaacagttgcttaacaaattaaagaatggatgaaggtaggtagttaggtacaaggttttgcagataggcctggctgtgtcaattaaacctttcttcatgggtcctcacacttagtaagctcacttttaaaaggacaatgctgaagacacaaatgtttacaatgaccacagcgatgacgggatccgagagaaaggcaaggcggaaggggtgaggccggaagccgaagtgccgcagggagttagcggcgtctcggttgccatggagaccaggagctccaaaacgcggaggtctttagcgtcccggaccaacgagtgccaggggacaatgtgggcgccaacttcgccaccagccgggtccagcagccccagccagcccacctggaagtcctccttgtattcctccctcgcctactctgaggccttccactacagcttcgcagcccggccccgccgcctcacgcagcttgcgctggcgcagcgtcccgagcctcagctgcttcgtctgcgcccctcctcgctgcgcacccaagatatctcgcacttgctcaccggcgtcttccgcaacttgtactcagccgaggtcatcggcgacgaagtgagcgcaagcttgatcaaggcccgcggcagcgagaatgagcgccacgaggagttcgtggaccagctgcagcagattcgggagctctataagcagcggctggatgagtttgaaatgttggagagacatatcactcaggcccaagcacgggctattgcggaaaatgagcgggtcatgagccaggctggagtacaggacctcgagagccttgtcaggttgcctccagtgaagagtgtctccagatggtgtatagacagcgagttgctacggaaacatcatttgatctccccagaagattactacaccgatacagtgccgtttcactctgcacctaaaggcatctccctacctggatgttcaaaactgacatttagctgtgagaagcgttccgtccagaagaaagagctgaacaagaagcttgaagattcatgcaggaagaagcttgctgagttcgaagatgagttagaccacactgtggacagcctgacatggaatttaactcctaaggccaaagaaaggaccagagaacctctcaagaaagcaagtcaaccaaggaataaaaactggatgaaccacttacgtgtgccacagagagagctagacagacttctgcttgccagaatggagagtcggaaccacttcctaaaaaatccccgtttttttcctcctaacactcgatatggaggcaagtctcttgtttttcctccaaagaagccagcaccgataggagaattccagagtacagagccagaacagagttgtgctgatactccagtgtttctagctaagccaccaattgggtttttcacagattatgaaattggtccagtttatgagatggtaattgcgctgcagaacaccaccacgaccagccgctacctgcgagtcctcccgccttccacgccatacttcgctctgggactggggatgttcccaggaaaaggtggaatggtggctcctggaatgacctgccagtacattgtccagttttttcccgactgccttggggattttgatgattttattttagtggagacccagtcagcccacacacttctgatccccctgcaggcccggaggccgccccccgtgctgacattgtcaccggtgttggactgtggttactgcctcattgggggagtcaagatgaccagattcatctgcaaaaatgtgggtttcagtgttggcaggttctgcattatgcccaaaacaagctggccaccactaagtttcaaggccattgcaaccgtcggctttgttgaacaacctccttttggaatcctgccttcggtgtttgagctggccccgggacatgctatattagtggaggaattgggcagctgattgctttggatctgatctatatttctggtgaaaaaagccagccagaccctggagagctcacagacttaacagcccagcacttcatacgatttgagcctgaaaaccttcggtccacggctaggaagcagctgattattagaaatgctacgcacgtggagctggccttctactggcagatcatgaagcccaacctgcagcccctcatgcctggagaaaccttcagcatggacagcatcaagtgctaccccgacaaggagactgccttctccatcatgcccagaaagggggttctaagcccccacacagaccacgagttcatcctgagcttttctcctcatgagctgagggattttcacagtgtgctccagatggtgctagaggaagtcccagagcctgtaagttcagaagcggagagcctggggcactcctcctactctgtggatgatgtgattgtcctggaaatcgaggtgaaaggctcagtagaacctttccaggttctcttagagccatatgccctcatcatcccaggggagaactacattgggataaatgtgaagaaggcttttaagatgtggaacaacagcaagtcacccatcagatacctgtgggggaagatcagcgactgccacatcattgaagtggagcccggcacaggggtcatagagcccagtgaggtcggggattttgagttgaactttactgggggtgtccctggccccacaagccaggacctgctgtgtgaaatcgaagactcgccctcgccagtggtgttacacattgaggctgtctttaaggggcctgccctcatcatcaacgtctcagcccttcagtttggtctgctccgcctggggcagaaagccacaaactccatccagatccggaacgtcagccagctcccagccacatggcgcatgaaggagagcccagtctccctccaggaaaggcctgaggatgtgtctcccttcgacattgagccttcgagtggccagcttcactctctgggggagtgcagggtggacatcaccttggaggccctgcactgccagcatctggagaccgtcctggagctggaggtggaaaatggtgcctggagctaccttcctgtgtatgctgaggtacagaagccccatgtgtacctacagagcagccaggtggaggttagaaatctctacctgggtgtgcccacgaagacaaccatcacacttatcaatggcacgctcctgcctacccagttccactggggcaagctcctcggacaccaagcagaattctgcatggtgacagtctcccccaaacatggcctgctgggcccaagtgaggagtgccagctcaagttggagttgactgctcatacccaggaagagctgacccatctggccctcccttgtcacgtgtcaggcatgaagaagccactggttctaggcatttctgggaagccccagggactgcaagtggccattaccatctctaaggagagctctgattgcagcacagagcagtggccaggccacccaaaggagctccgcctggactttggctcagcggtgccactgaggacccgtgtgactcgccagctcattctcaccaatcgctccccaatacggacccgtttctccctcaagtttgagtatttcgggagcccccaaaacagcctgagcaaaaagaccagccttcccaacatgcctcctgccctgctaaagacagtgcggatgcaagagcacctggccaagcgagagcagctggattttatggagagcatgctatcccacgggaaaggagctgctttcttccctcacttttcccagggcatgctggggccctaccagcagctgtgcattgacatcacaggctgtgccaacatgtggggcgagtactgggacaacctcatctgcacggtgggagacctgctgccggaagtcatcccagtgcacatggcagcggtgggctgccccatcagctccctgaggaccacctcctacactattgaccaggcccagaaggaaccagccatgaggttcggcacccaggtctccggaggagacacagttacccgaacccttcgcctgaataactccagcccctgtgacatccgcctggattgggagacctatgttccagaagacaaggaagaccggctggtggagctgctggtgttttatgggccacctttcccgctgcgggaccaagccgggaatgagcttgtgtgccctgatacccctgagggtggctgcctcctctggtccccaggcccctccagttcatcggaattcagccatgaaactgactcatcagttgagggcagctccagtgccagcaatagggtggcacagaagctcatctcagtcatcctgcaggcacatgagggggtgccctccggccacctgtactgtatcagccccaagcaggtggtggtccctgctgggggcagcagtaccatctacatctccttcacccctatggtgctcagccctgagatcctgcacaaggtggagtgtactggctacgccctgggtttcatgagcttggacagcaaggtggaaagggagattccagggaagaggcatcgcctgcaggactttgcggtgggacccctgaaactggacctgcatagctacgtgaggcctgcacagctaagtgtggagctggactacggcggcagtatggaattccagtgccaggccagtgacctcattcccgagcagccctgctctggggtgctgagtgagctggtgaccacccaccacctgaagctgaccaacactacagagatcccacactacttccggcttatggtctccaggcccttctccgtttctcaagatggggcgagccaggaccacagagctcctggccctggccagaagcaggagtgtgaggaggagacagcctcagcggacaagcagctggtgctccaagcacaggagaacatgctggtgaacgtgtccttctcactctccctggagctgctctcctatcagaagctcccagctgaccagacactgcctggggtggacattcagcagagtgcgagtggagagagagagatggtgtttactcagaacctgctcctggagtacaccaaccagaccactcaggtggtgcccctgcgggctgtggtggccgtgcctgagctgcagctctccaccagctgggtggactttgggacctgctttgtgagccagcagcgagtccgggaggtctacctgatgaacctgagcgggtgccgaagctactggactatgctgatgggccagcaggagccagccaaggccgctgtggccttcagggtctccccaaacagtgggctgctagaagcacgatccgccaatgcacccccaacctccatcgccttgcaggttttcttcactgccaggagtagtgagctgtacgagtccacgatggtggtggaaggtgtgctcggtgagaagtcctgcaccctgcggctccggggccaaggctcctatgatgagagatacatgttgcctcaccagccctgaggctccgccccagccctcagccccaggccccagctggagaaaaaacattgcccagggattaggagcagctcttcagcacaaagacacagacttggggacctggggacctctgggcagctcctggaatggaagaacccccttccacaatggtctcagcctaggccctcatgatatgtcctcagagctaacataaaggacaggccacaccacagcagagaccaccacattgagatcactactcagtgcatagcgaagaccagtatggcaaaattagtcttggaaaaaaaccacagccactaagataaattcatgcacttttactatgcccattgcacttctcatccatggatttgccttgccttaagaattaaccatggccttgtggcctgggtgacccaggctgcttttatcttgcacagctaaagagggtctgatgggtggctcaacaccccacccactcctataccatgtcatcagtgttcacattttccaaatgagttgaagtgccttgatctgtccactgccaccaccaccagtgctgagttttcccatgtggttttgcttttgtggtgttactgccttgctgctagagcagcaggactgtctgcgtagcgcctccagcctgggacctcactcagttcccagggtattcaaagacggcagcggctcccattccagtcccgatgcacatggacaccactccgtatgccctgtgaaaacaaaacttaattggctgggcaaaggcacccaccaaattacctccagaccaggctgacccagaaggacgtcatggacaagtaggatgcaaaaccatcagaccagatctgtgggcaagcggtaccctggcctcccacttgggcacacacacggtgacagatgcccactgcaggctagtatccctttcaaggctggcccttaaggaaaacagggatcatgcccctacatcctaagttcagggtgtttctgtgtgcatgttcccctccccagggatcgatcataatcccaaaagacacaatcccaaacacaatcatcccaaatgttgaaatcctggaagaacaaaatccctaaagtctaaaatcctgaaaatcacaatcctaaaagatcaaaatcctgaaaatataattctggaaaaaataatttggaagcctggcctggtggcatctacttgtagtcccagctattcagcaggctgaggcaagaggatcacttgtgcctaggagttcaagaccagcctaggcaata

SEQ ID NO: 3585 - protein, 1105 aa, Homo sapiens; identical to SEQ ID NO: 3575

SEQ ID NO: 3586 - DNA, 6735 bp, Homo sapiens
aggcagaagcagcatcatacttctttggtatcttcagcaatcagcacagacctgaaacacaatctttacacaataaatatgatgagtgaatgaacagttgcttaacaaattaaagaatggatgaaggtaggtagttaggtacaaggttttgcagataggcctggctgtgtcaattaaacctttcttcatgggtcctcacacttagtaagctcacttttaaaaggacaatgctgaagacacaaatgtttacaatgaccacagcgatgacgggatccgagagaaaggcaaggcggaaggggtgaggccggaagccgaagtgccgcagggagttagcggcgtctcggttgccatggagaccaggagctccaaaacgcggaggtctttagcgtcccggaccaacgagtgccaggggacaatgtgggcgccaacttcgccaccagccgggtccagcagccccagccagcccacctggaagtcctccttgtattcctccctcgcctactctgaggccttccactacagcttcgcagcccggccccgccgcctcacgcagcttgcgctggcgcagcgtcccgagcctcagctgcttcgtctgcgcccctcctcgctgcgcacccaagatatctcgcacttgctcaccggcgtcttccgcaacttgtactcagccgaggtcatcggcgacgaagtgagcgcaagcttgatcaaggcccgcggcagcgagaatgagcgccacgaggagttcgtggaccagctgcagcagattcgggagctctataagcagcggctggatgagtttgaaatgttggagagacatatcactcaggcccaagcacgggctattgcggaaaatgagcgggtcatgagccaggctggagtacaggacctcgagagccttgtcaggttgcctccagtgaagagtgtctccagatggtgtatagacagcgagttgctacggaaacatcatttgatctccccagaagattactacaccgatacagtgccgtttcactctgcacctaaaggcatctccctacctggatgttcaaaactgacatttagctgtgagaagcgttccgtccagaagaaagagctgaacaagaagcttgaagattcatgcaggaagaagcttgctgagttcgaagatgagttagaccacactgtggacagcctgacatggaatttaactcctaaggccaaagaaaggaccagagaacctctcaagaaagcaagtcaaccaaggaataaaaactggatgaaccacttacgtgtgccacagagagagctagacagacttctgcttgccagaatggagagtcggaaccacttcctaaaaaatccccgtttttttcctcctaacactcgatatggaggcaagtctcttgtttttcctccaaagaagccagcaccgataggagaattccagagtacagagccagaacagagttgtgctgatactccagtgtttctagctaagccaccaattgggtttttcacagattatgaaattggtccagtttatgagatggtaattgcgctgcagaacaccaccacgaccagccgctacctgcgagtcctcccgccttccacgccatacttcgctctgggactggggatgttcccaggaaaaggtggaatggtggctcctggaatgacctgccagtacattgtccagttttttcccgactgccttggggattttgatgattttattttagtggagacccagtcagcccacacacttctgatccccctgcaggcccggaggccgccccccgtgctgacattgtcaccggtgttggactgtggttactgcctcattgggggagtcaagatgaccagattcatctgcaaaaatgtgggtttcagtgttggcaggttctgcattatgcccaaaacaagctggccaccactaagtttcaaggccattgcaaccgtcggctttgttgaacaacctccttttggaatcctgccttcggtgtttgagctggccccgggacatgctatattagtggaggtcttgttttccccaaagagcctaggaaaggcagagcagaccttcatcatcatgtgcgacaactgccagataaaggagctggtgaccataggaattgggcagctgattgctttggatctgatctatatttctggtgaaaaaagccagccagaccctggagagctcacagacttaacagcccagcacttcatacgatttgagcctgaaaaccttcggtccacggctaggaagcagctgattattagaaatgctacgcacgtggagctggccttctactggcagatcatgaagcccaacctgcagcccctcatgcctggagaaaccttcagcatggacagcatcaagtgctaccccgacaaggagactgccttctccatcatgcccagaaagggggttctaagcccccacacagaccacgagttcatcctgagcttttctcctcatgagctgagggattttcacagtgtgctccagatggtgctagaggaagtcccagagcctgtaagttcagaagcggagagcctggggcactcctcctactctgtggatgatgtgattgtcctggaaatcgaggtgaaaggctcagtagaacctttccaggttctcttagagccatatgccctcatcatcccaggggagaactacattgggataaatgtgaagaaggcttttaagatgtggaacaacagcaagtcacccatcagatacctgtgggggaagatcagcgactgccacatcattgaagtggagcccggcacaggggtcatagagcccagtgaggtcggggattttgagttgaactttactgggggtgtccctggccccacaagccaggacctgctgtgtgaaatcgaagactcgccctcgccagtggtgttacacattgaggctgtctttaaggggcctgccctcatcatcaacgtctcagcccttcagtttggtctgctccgcctggggcagaaagccacaaactccatccagatccggaacgtcagccagctcccagccacatggcgcatgaaggagagcccagtctccctccaggaaaggcctgaggatgtgtctcccttcgacattgagccttcgagtggccagcttcactctctgggggagtgcagggtggacatcaccttggaggccctgcactgccagcatctggagaccgtcctggagctggaggtggaaaatggtgcctggagctaccttcctgtgtatgctgaggtacagaagccccatgtgtacctacagagcagccaggtggaggttagaaatctctacctgggtgtgcccacgaagacaaccatcacacttatcaatggcacgctcctgcctacccagttccactggggcaagctcctcggacaccaagcagaattctgcatggtgacagtctcccccaaacatggcctgctgggcccaagtgaggagtgccagctcaagttggagttgactgctcatacccaggaagagctgacccatctggccctcccttgtcacgtgtcaggcatgaagaagccactggttctaggcatttctgggaagccccagggactgcaagtggccattaccatctctaaggagagctctgattgcagcacagagcagtggccaggccacccaaaggagctccgcctggactttggctcagcggtgccactgaggacccgtgtgactcgccagctcattctcaccaatcgctccccaatacggacccgtttctccctcaagtttgagtatttcgggagcccccaaaacagcctgagcaaaaagaccagccttcccaacatgcctcctgccctgctaaagacagtgcggatgcaagagcacctggccaagcgagagcagctggattttatggagagcatgctatcccacgggaaaggagctgctttcttccctcacttttcccagggcatgctggggccctaccagcagctgtgcattgacatcacaggctgtgccaacatgtggggcgagtactgggacaacctcatctgcacggtgggagacctgctgccggaagtcatcccagtgcacatggcagcggtgggctgccccatcagctccctgaggaccacctcctacactattgaccaggcccagaaggaaccagccatgaggttcggcacccaggtctccggaggagacacagttacccgaacccttcgcctgaataactccagcccctgtgacatccgcctggattgggagacctatgttccagaagacaaggaagaccggctggtggagctgctggtgttttatgggccacctttcccgctgcgggaccaagccgggaatgagcttgtgtgccctgatacccctgagggtggctgcctcctctggtccccaggcccctccagttcatcggaattcagccatgaaactgactcatcagttgagggcagctccagtgccagcaatagggtggcacagaagctcatctcagtcatcctgcaggcacatgagggggtgccctccggccacctgtactgtatcagccccaagcaggtggtggtccctgctgggggcagcagtaccatctacatctccttcacccctatggtgctcagccctgagatcctgcacaaggtggagtgtactggctacgccctgggtttcatgagcttggacagcaaggtggaaagggagattccagggaagaggcatcgcctgcaggactttgcggtgggacccctgaaactggacctgcatagctacgtgaggcctgcacagctaagtgtggagctggactacggcggcagtatggaattccagtgccaggccagtgacctcattcccgagcagccctgctctggggtgctgagtgagctggtgaccacccaccacctgaagctgaccaacactacagagatcccacactacttccggcttatggtctccaggcccttctccgtttctcaagatggggcgagccaggaccacagagctcctggccctggccagaagcaggagtgtgaggaggagacagcctcagcggacaagcagctggtgctccaagcacaggagaacatgctggtgaacgtgtccttctcactctccctggagctgctctcctatcagaagctcccagctgaccagacactgcctggggtggacattcagcagagtgcgagtggagagagagagatggtgtttactcagaacctgctcctggagtacaccaaccagaccactcaggtggtgcccctgcgggctgtggtggccgtgcctgagctgcagctctccaccagctgggtggactttgggacctgctttgtgagccagcagcgagtccgggaggtctacctgatgaacctgagcgggtgccgaagctactggactatgctgatgggagtagtgagctgtacgagtccacgatggtggtggaaggtgtgctcggtgagaagtcctgcaccctgcggctccggggccaaggctcctatgatgagagatacatgttgcctcaccagccctgaggctccgccccagccctcagccccaggccccagctggagaaaaaacattgcccagggattaggagcagctcttcagcacaaagacacagacttggggacctggggacctctgggcagctcctggaatggaagaacccccttccacaatggtctcagcctaggccctcatgatatgtcctcagagctaacataaaggacaggccacaccacagcagagaccaccacattgagatcactactcagtgcatagcgaagaccagtatggcaaaattagtcttggaaaaaaaccacagccactaagataaattcatgcacttttactatgcccattgcacttctcatccatggatttgccttgccttaagaattaaccatggccttgtggcctgggtgacccaggctgcttttatcttgcacagctaaagagggtctgatgggtggctcaacaccccacccactcctataccatgtcatcagtgttcacattttccaaatgagttgaagtgccttgatctgtccactgccaccaccaccagtgctgagttttcccatgtggttttgcttttgtggtgttactgccttgctgctagagcagcaggactgtctgcgtagcgcctccagcctgggacctcactcagttcccagggtattcaaagacggcagcggctcccattccagtcccgatgcacatggacaccactccgtatgccctgtgaaaacaaaacttaattggctgggcaaaggcacccaccaaattacctccagaccaggctgacccagaaggacgtcatggacaagtaggatgcaaaaccatcagaccagatctgtgggcaagcggtaccctggcctcccacttgggcacacacacggtgacagatgcccactgcaggctagtatccctttcaaggctggcccttaaggaaaacagggatcatgcccctacatcctaagttcagggtgtttctgtgtgcatgttcccctccccagggatcgatcataatcccaaaagacacaatcccaaacacaatcatcccaaatgttgaaatcctggaagaacaaaatccctaaagtctaaaatcctgaaaatcacaatcctaaaagatcaaaatcctgaaaatataattctggaaaaaataatttggaagcctggcctggtggcatctacttgtagtcccagctattcagcaggctgaggcaagaggatcacttgtgcctaggagttcaagaccagcctaggcaata

SEQ ID NO: 3587 - protein, 1778 aa, Homo sapiens; identical to SEQ ID NO: 345

SEQ ID NO: 3588 - DNA, 4525 bp, Homo sapiens
atctgatctatatttctggtgaaaaaagccagccagaccctggagagctcacagacttaacagcccagcacttcatacgatttgagcctgaaaaccttcggtccacggctaggaagcagctgattattagaaatgctacgcacgtggagctggccttctactggcagatcatgaagcccaacctgcagcccctcatgcctggagaaaccttcagcatggacagcatcaagtgctaccccgacaaggagactgccttctccatcatgcccagaaagggggttctaagcccccacacagaccacgagttcatcctgagcttttctcctcatgaggttcagatggtgtcatctcagtagccacacatggttggatcatgtatttagaccccccacctgtgttcctcaatcacactgaagccacagctgggcccaccgaggtgctatcctgcccaggccagcacttggctgagttgggttggagtacacacctggtgtgcagggtgaagcagctcattttgtctggtcctgatcccagactcaccccatctgcagcaagacccttggctggcttcctccgctctgggtgtctcccacatgtctactatggcaaaaaacattaccatccccacccataccacagcatcccctagagagagtgaggtgcagggacccgagggccaggttagcacagcgctggccccagcatggagggaagccctgtgggccacggtaggctagaagggaattcgagctgggcatgaaaaggatgctccggggccattgttagtgggtttggggctgagatgagtgatcctgcctctggtcccagcatccagctgcctcgttgtctatcctgggagggtgtggtgcttcggacacgttgaggggctttgtcagcatcaggaaggcctttgcttcttgcacccaggcccagctgagacaggcccctgagtcctggctcatgttctggcagcaacttcacttttcctaaggaggggaggaggcagcagggaagcaaccctgggttttcagaaggtccttctgatggctaggctaaggggaggaagaattcctgccatgccccagccttctccaggacaacctgctggaacgcagtggtgttttcagggcactgtgtttgccttgcagctgagggattttcacagtgtgctccagatggtgctagaggaagtcccagagcctgtaagttcagaagcggagagcctggggcactcctcctactctgtggatgatgtgattgtcctggaaatcgaggtgaaaggctcagtagaacctttccaggttctcttagagccatatgccctcatcatcccaggggagaactacattgggataaatgtgaagaaggcttttaagatgtggaacaacagcaagtcacccatcagatacctgtgggggaagatcagcgactgccacatcattgaagtggagcccggcacaggggtcatagagcccagtgaggtcggggattttgagttgaactttactgggggtgtccctggccccacaagccaggacctgctgtgtgaaatcgaagactcgccctcgccagtggtgttacacattgaggctgtctttaaggggcctgccctcatcatcaacgtctcagcccttcagtttggtctgctccgcctggggcagaaagccacaaactccatccagatccggaacgtcagccagctcccagccacatggcgcatgaaggagagcccagtctccctccaggaaaggcctgaggatgtgtctcccttcgacattgagccttcgagtggccagcttcactctctgggggagtgcagggtggacatcaccttggaggccctgcactgccagcatctggagaccgtcctggagctggaggtggaaaatggtgcctggagctaccttcctgtgtatgctgaggtacagaagccccatgtgtacctacagagcagccaggtggaggttagaaatctctacctgggtgtgcccacgaagacaaccatcacacttatcaatggcacgctcctgcctacccagttccactggggcaagctcctcggacaccaagcagaattctgcatggtgacagtctcccccaaacatggcctgctgggcccaagtgaggagtgccagctcaagttggagttgactgctcatacccaggaagagctgacccatctggccctcccttgtcacgtgtcaggcatgaagaagccactggttctaggcatttctgggaagccccagggactgcaagtggccattaccatctctaaggagagctctgattgcagcacagagcagtggccaggccacccaaaggagctccgcctggactttggctcagcggtgccactgaggacccgtgtgactcgccagctcattctcaccaatcgctccccaatacggacccgtttctccctcaagtttgagtatttcgggagcccccaaaacagcctgagcaaaaagaccagccttcccaacatgcctcctgccctgctaaagacagtgcggatgcaagagcacctggccaagcgagagcagctgggctgtgccaacatgtggggcgagtactgggacaacctcatctgcacggtgggagacctgctgccggaagtcatcccagtgcacatggcagcggtgggctgccccatcagctccctgaggaccacctcctacactattgaccaggcccagaaggaaccagccatgaggttcggcacccaggtctccggaggagacacagttacccgaacccttcgcctgaataactccagcccctgtgacatccgcctggattgggagacctatgttccagaagacaaggaagaccggctggtggagctgctggtgttttatgggccacctttcccgctgcgggaccaagccgggaatgagcttgtgtgccctgatacccctgagggtggctgcctcctctggtccccaggcccctccagttcatcggaattcagccatgaaactgactcatcagttgagggcagctccagtgccagcaatagggtggcacagaagctcatctcagtcatcctgcaggcacatgagggggtgccctccggccacctgtactgtatcagccccaagcaggtggtggtccctgctgggggcagcagtaccatctacatctccttcacccctatggtgctcagccctgagatcctgcacaaggtggagtgtactggctacgccctgggtttcatgagcttggacagcaaggtggaaagggagattccagggaagaggcatcgcctgcaggactttgcggtgggacccctgaaactggacctgcatagctacgtgaggcctgcacagctaagtgtggagctggactacggcggcagtatggaattccagtgccaggccagtgacctcattcccgagcagccctgctctggggtgctgagtgagctggtgaccacccaccacctgaagctgaccaacactacagagatcccacactacttccggcttatggtctccaggcccttctccgtttctcaagatggggcgagccaggaccacagagctcctggccctggccagaagcaggagtgtgaggaggagacagcctcagcggacaagcagctggtgctccaagcacaggagaacatgctggtgaacgtgtccttctcactctccctggagctgctctcctatcagaagctcccagctgaccagacactgcctggggtggacattcagcagagtgcgagtggagagagagagatggtgtttactcagaacctgctcctggagtacaccaaccagaccactcaggtggtgcccctgcgggctgtggtggccgtgcctgagctgcagctctccaccagctgggtggactttgggacctgctttgtgagccagcagcgagtccgggaggtctacctgatgaacctgagcgggtgccgaagctactggactatgctgatgggccagcaggagccagccaaggccgctgtggccttcagggtctccccaaacagtgggctgctagaagcacgatccgccaatgcacccccaacctccatcgccttgcaggttttcttcactgccaggagtagtgagctgtacgagtccacgatggtggtggaaggtgtgctcggtgagaagtcctgcaccctgcggctccggggccaaggctcctatgatgagagatacatgttgcctcaccagccctgaggctccgccccagccctcagccccaggccccagctggagaaaaaacattgcccagggattaggagcagctcttcagcacaaagacacagacttggggacctggggacctctgggcagctcctggaatggaagaacccccttccacaatggtctcagcctaggccctcatgatatgtcctcagagctaacataaaggacaggccacaccacagcagagaccaccacattgagatcactactcagtgcatagcgaagaccagtatggcaaaattagtcttggaaaaaaaccacagccactaagataaattcatgcacttttactatgc

SEQ ID NO: 3589 - protein, 1051 aa, Homo sapiens
MARLRGGRIPAMPQPSPGQPAGTQWCFQGTVFALQLRDFHSVLQMVLEEVPEPVSSEAESLGHSSYSVDDVIVLEIEVKGSVEPFQVLLEPYALIIPGENYIGINVKKAFKMWNNSKSPIRYLWGKISDCHIIEVEPGTGVIEPSEVGDFELNFTGGVPGPTSQDLLCEIEDSPSPVVLHIEAVFKGPALIINVSALQFGLLRLGQKATNSIQIRNVSQLPATWRMKESPVSLQERPEDVSPFDIEPSSGQLHSLGECRVDITLEALHCQHLETVLELEVENGAWSYLPVYAEVQKPHVYLQSSQVEVRNLYLGVPTKTTITLINGTLLPTQFHWGKLLGHQAEFCMVTVSPKHGLLGPSEECQLKLELTAHTQEELTHLALPCHVSGMKKPLVLGISGKPQGLQVAITISKESSDCSTEQWPGHPKELRLDFGSAVPLRTRVTRQLILTNRSPIRTRFSLKFEYFGSPQNSLSKKTSLPNMPPALLKTVRMQEHLAKREQLGCANMWGEYWDNLICTVGDLLPEVIPVHMAAVGCPISSLRTTSYTIDQAQKEPAMRFGTQVSGGDTVTRTLRLNNSSPCDIRLDWETYVPEDKEDRLVELLVFYGPPFPLRDQAGNELVCPDTPEGGCLLWSPGPSSSSEFSHETDSSVEGSSSASNRVAQKLISVILQAHEGVPSGHLYCISPKQVVVPAGGSSTIYISFTPMVLSPEILHKVECTGYALGFMSLDSKVEREIPGKRHRLQDFAVGPLKLDLHSYVRPAQLSVELDYGGSMEFQCQASDLIPEQPCSGVLSELVTTHHLKLTNTTEIPHYFRLMVSRPFSVSQDGASQDHRAPGPGQKQECEEETASADKQLVLQAQENMLVNVSFSLSLELLSYQKLPADQTLPGVDIQQSASGEREMVFTQNLLLEYTNQTTQVVPLRAVVAVPELQLSTSWVDFGTCFVSQQRVREVYLMNLSGCRSYWTMLMGQQEPAKAAVAFRVSPNSGLLEARSANAPPTSIALQVFFTARSSELYESTMVVEGVLGEKSCTLRLRGQGSYDERYMLPHQP

SEQ ID NO: 3590 - DNA, 893 bp, Homo sapiens
agggcatacggagtggtgtccatgtgcatcgggactggaatgggagccgctgccgtctttgaataccctgggaactgagtgaggtcccaggctggaggcgctacgcagacagtcctgctgctctagcagcaaggcagtaacaccacaaaagcaaaaccacatgggaaaactcagcactggtggtggtggcagtggacagatcaaggcacttcaactcatttggaaaatgagccttggccccggagccgcagggtgcaggacttctcaccgagcacaccttccaccaccatcgtggactcgtacagctcactactcctgtggggagcatgtgggggctgaggcctccctattccttgagacacaacaatattgaaattagaccaactgataaccctacaatagcctctaagtcttcaagtgaaaagaagagtcgtacgtatctcactttaaatcaaaatgattaagctaaaaaatgattaagcttagtgaggaaggcacattcaaagctgacacaggcagaaagctagctttgtgccaaacagacaaattgtgaatgcaaagaaatgtaatatctagcaaatgccctatttgtgaaaattttgaagtaaaagataataaagcaaataaaatgttatgcaaacaaggaaaagaaaataggagaaagaaataatgtgatcaggttaactgataaaacagaggagaacaaaactgctgcttgaaatccctgcacaggttacgtgcaatgcaatccttaatgatggaatgagggcatcaaagggcgggggagctgagcaaagcactgctgaagatccattggcttagccaggtcagggctccagccccagagctcagagcaacacatggaagagtgggctgccccaggcacagaagtc

SEQ ID NO: 3591 - protein, 70 aa, Homo sapiens
MGKLSTGGGGSGQIKALQLIWKMSLGPGAAGCRTSHRAHLPPPSWTRTAHYSCGEHVGAEASLFLETQQY

SEQ ID NO: 3592 - DNA, 533 bp, Homo sapiens
aggggacagggctgtaggtaccctgggcttgcccacatgaggcccagcaactgggagccatgccagcatgccgctggccagggacggtttgtgcagagtttgaggcctctctcagcatcatgggtgggcaggaaaggtgggtctgtggttggcagctcaatgaaacaggagtctgaggatgaagcctggtgtctgggcagcttctgcatgcccacccaagatggctccctgggcagggccaagggtggtgtgttacatagtaccaatgggcacaggacagtgttttcagcacagagcagtggccaggccacccaaaggagctccgcctggactttggctcagcggtgccactgaggacccgtgtgactcgccagctcattctcaccaatcgctccccaatacggacccgtttctccctcaagtttgagtatttcgggagcccccaaaacagcctgagcaaaaagaccagccttcccaacatgcctcctgccctgctaaagacagtgcggatgcaagagcacctggccaagcga

SEQ ID NO: 3593 - protein, 105 aa, Homo sapiens
MRPSNWEPCQHAAGQGRFVQSLRPLSASWVGRKGGSVVGSSMKQESEDEAWCLGSFCMPTQDGSLGRAKGGVLHSTNGHRTVFSAQSSGQATQRSSAWTLAQRCH

SEQ ID NO: 3594 - DNA, 2470 bp, Homo sapiens
cctgcacaaggtggagtgtactggctacgccctgggtttcatgagcttggacagcaaggtgagctcttccggcctggggtgggggccgcagccactgctccctcctgggtagcatgctgcctactcagcccagggatcagctgtgatcagacttgggctcagtaggtggaaagggagattccagggaagaggcatcgcctgcaggactttgcggtgggacccctgaaactggacctgcatagctacgtgaggcctgcacagtgagtcagctggggtgccccatctcctttcatccccatggggtgcaccctcaccaggcactggtggagccaggcagggttctcagagcaaaaggacgggcatgggtggagaagtcagcagaggagcccagggaaaggctggcccgaggctggatgagcagagtgggggcagccagaaggccccaggcgcccggcttgccccaacaatgcctattgctgggcaggctaagtgtggagctggactacggcggcagtatggaattccagtgccaggccagtgacctcattcccgagcagccctgctctggggtgctgagtgagctggtgaccacccaccacctgaagctgaccaacactacagagatcccacactacttccggcttatggtctccaggcccttctccgtttctcaagatggggcgagccaggaccacagagctcctggccctggccagaagcaggagtgtgaggaggagacagcctcagcggacaagcagctggtgctccaagcacaggagaacatgctggtgaacgtgtccttctcactctccctggagctgctctcctatcagaagctcccagctgaccagacactgcctggggtggacattcagcagagtgcgagtggagagagagagatggtgtttactcagaacctgctcctggagtacaccaaccagaccactcaggtggtgcccctgcgggctgtggtggccgtgcctgagctgcagctctccaccagctgggtggactttgggacctgctttgtgagccagcagcgagtccgggaggtctacctgatgaacctgagcgggtgccgaagctactggactatgctgatgggagtagtgagctgtacgagtccacgatggtggtggaaggtgtgctcggtgagaagtcctgcaccctgcggctccggggccaaggctcctatgatgagagatacatgttgcctcaccagccctgaggctccgccccagccctcagccccaggccccagctggagaaaaaacattgcccagggattaggagcagctcttcagcacaaagacacagacttggggacctggggacctctgggcagctcctggaatggaagaacccccttccacaatggtctcagcctaggccctcatgatatgtcctcagagctaacataaaggacaggccacaccacagcagagaccaccacattgagatcactactcagtgcatagcgaagaccagtatggcaaaattagtcttggaaaaaaaccacagccactaagataaattcatgcacttttactatgcccattgcacttctcatccatggatttgccttgccttaagaattaaccatggccttgtggcctgggtgacccaggctgcttttatcttgcacagctaaagagggtctgatgggtggctcaacaccccacccactcctataccatgtcatcagtgttcacattttccaaatgagttgaagtgccttgatctgtccactgccaccaccaccagtgctgagttttcccatgtggttttgcttttgtggtgttactgccttgctgctagagcagcaggactgtctgcgtagcgcctccagcctgggacctcactcagttcccagggtattcaaagacggcagcggctcccattccagtcccgatgcacatggacaccactccgtatgccctgtgaaaacaaaacttaattggctgggcaaaggcacccaccaaattacctccagaccaggctgacccagaaggacgtcatggacaagtaggatgcaaaaccatcagaccagatctgtgggcaagcggtaccctggcctcccacttgggcacacacacggtgacagatgcccactgcaggctagtatccctttcaaggctggcccttaaggaaaacagggatcatgcccctacatcctaagttcagggtgtttctgtgtgcatgttcccctccccagggatcgatcataatcccaaaagacacaatcccaaacacaatcatcccaaatgttgaaatcctggaagaacaaaatccctaaagtctaaaatcctgaaaatcacaatcctaaaagatcaaaatcctgaaaatataattctggaaaaaataatttggaagcctggcctggtggcatctacttgtagtcccagctattcagcaggctgaggcaagaggatcacttgtgcctaggagttcaagaccagcctaggcaata

SEQ ID NO: 3595 - protein, 335 aa, Homo sapiens
MSRVGAARRPQAPGLPQQCLLLGRLSVELDYGGSMEFQCQASDLIPEQPCSGVLSELVTTHHLKLTNTTEIPHYFRLMVSRPFSVSQDGASQDHRAPGPGQKQECEEETASADKQLVLQAQENMLVNVSFSLSLELLSYQKLPADQTLPGVDIQQSASGEREMVFTQNLLLEYTNQTTQVVPLRAVVAVPELQLSTSWVDFGTCFVSQQRVREVYLMNLSGCRSYWTMLMGVVSCTSPRWWWKVCSVRSPAPCGSGAKAPMMRDTCCLTSPEAPPQPSAPGPSWRKNIAQGLGAALQHKDTDLGTWGPLGSSWNGRTPFHNGLSLGPHDMSSELT

SEQ ID NO: 3596 - DNA, 674 bp, Homo sapiens
agggcaggcaccacttggaatttctgcagagcagccagtcccccaatcccacatgatctcagggttgccctgccctgcagtgctgagcaagaccagaggccagcaggagccagccaaggccgctgtggccttcagggtctccccaaacagtgggctgctagaagcacgatccgccaatgcacccccaacctccatcgccttgcaggttttcttcactgccaggagtagtgagctgtacgagtccacgatggtggtggaaggtgtgctcggtgagaagtcctgcaccctgcggctccggggccaaggctcctatgatgagagatacatgttgcctcaccagccctgaggctccgccccagccctcagccccaggccccagctggagaaaaaacattgcccagggattaggagcagctcttcagcacaaagacacagacttggggacctggggacctctgggcagctcctggaatggaagaacccccttccacaatggtctcagcctaggccctcatgatatgtcctcagagctaacataaaggacaggccacaccacagcagagaccaccacattgagatcactactcagtgcatagcgaagaccagtatggcaaaattagtcttggaaaaaaaccacagccactaagataaattcatgcacttttactatgccc

SEQ ID NO: 3597 - protein, 120 aa, Homo sapiens
MHPQPPSPCRFSSLPGVVSCTSPRWWWKVCSVRSPAPCGSGAKAPMMRDTCCLTSPEAPPQPSAPGPSWRKNIAQGLGAALQHKDTDLGTWGPLGSSWNGRTPFHNGLSLGPHDMSSELT

SEQ ID NO: 3598 - DNA, 732 bp, Homo sapiens
cagagcagccagtcccccaatcccacatgatctcagggttgccctgccctgcagtgctgagcaagaccagaggtacaggcccgggggtgggtaaagtcttcctgtgggagtacatggggctgcctgcactcatgtgtcttcccttccctttggtgcaggccagcaggagccagccaaggccgctgtggccttcagggtctccccaaacagtgggctgctagaagcacgatccgccaatgcacccccaacctccatcgccttgcaggttttcttcactgccaggagtagtgagctgtacgagtccacgatggtggtggaaggtgtgctcggtgagaagtcctgcaccctgcggctccggggccaaggctcctatgatgagagatacatgttgcctcaccagccctgaggctccgccccagccctcagccccaggccccagctggagaaaaaacattgcccagggattaggagcagctcttcagcacaaagacacagacttggggacctggggacctctgggcagctcctggaatggaagaacccccttccacaatggtctcagcctaggccctcatgatatgtcctcagagctaacataaaggacaggccacaccacagcagagaccaccacattgagatcactactcagtgcatagcgaagaccagtatggcaaaattagtcttggaaaaaaaccacagccactaagataaattcatgcacttttactatgc

SEQ ID NO: 3599 - protein, 120 aa, Homo sapiens; identical to SEQ ID NO: 3597

SEQ ID NO: 3600 - DNA, 1166 bp, Homo sapiens
agaccaggcccctctgcaaagtagaagtgggagggctgggatctcctcatccccaccccgatgccttcttaccccaacagtttgcccctaggaaactctagccaggtgagtgatggggcagctgccatcctgctggcccggaggtccaaggcagaagagttgggccttcccatccttggggtcctgaggtcttatgcagtggttggggtcccacctgacatcatgggcattggacctgcctatgccatcccagtagctttgcaaaaagcaggtaaggtggctccttcatatagtatctgggtcccacctggatcctgcagctgccctgcatgctgttgccaggggcatgagggtggtcctgtgggtgctgcagagtggaggtggggcaggctagtgtcccatacttcaagcccttcctgaccccacagctgggattggctcacccttctggaagagacacacaccaggcagcctgtaggcccatggatggggtgggccccaggggaggcagagggccagtgtgtcagctcaggtctttaccttgtctgcagggctgacagtgagtgacgtggacatcttcgagatcaatgaggcctttgcaagccaggctgcctactgtgtggagaagctacgactcccccctgagaaggtgaaccccctggggggtgcagtggccttagggcacccactgggctgcactggggcacgacaggtcatcacgctgctcaatgagctgaagcgccgtgggaagagggcatacggagtggtgtccatgtgcatcgggactggaatgggagccgctgccgtctttgaataccctgggaactgagtgaggtcccaggctggaggcgctacgcagacagtcctgctgctctagcagcaaggcagtaacaccacaaaagcaaaaccacatgggaaaactcagcactggtggtggtggcagtggacagatcaaggcacttcaactcatttggaaaatgtgaacactgatgacatggtataggagtgggtggggtgttgagccacccatcagaccctctttagctgtgcaagataaaagcagcctgggtcacccaggccacaaggccatggttaattcttaaggcaaggcaaatccatggatgagaagtgcaatgggcatagtaaaagtgcatgaatttatctta

SEQ ID NO: 3601 - protein, 119 aa, Homo sapiens [sequence omitted]

SEQ ID NO: 3602 - DNA, 952 bp, Homo sapiens
cagcaagagcccagagcaagggctgtttccaagctgagattgtgcctgtgaccaccacggtccatgatgacaagggcaccaagaggagcatcactgtgacccaggatgagggtatccgccccagcaccaccatggagggcctggccaaactgaagcctgccttcaagaaagatggttctaccacagctggccatcctgctggcccggaggtccaaggcagaagagttgggccttcccatccttggggtcctgaggtcttatgcagtggttggggtcccacctgacatcatgggcattggacctgcctatgccatcccagtagctttgcaaaaagcagggctgacagtgagtgacgtggacatcttcgagatcaatgaggcctttgcaagccaggctgcctactgtgtggagaagctacgactcccccctgagaaggtgaaccccctggggggtgcagtggccttagggcacccactgggctgcactggggcacgacaggtcatcacgctgctcaatgagctgaagcgccgtgggaagagggcatacggagtggtgtccatgtgcatcgggactggaatgggagccgctgccgtctttgaataccctgggaactgagtgaggtcccaggctggaggcgctacgcagacagtcctgctgctctagcagcaaggcagtaacaccacaaaagcaaaaccacatgggaaaactcagcactggtggtggtggcagtggacagatcaaggcacttcaactcatttggaaaatgtgaacactgatgacatggtataggagtgggtggggtgttgagccacccatcagaccctctttagctgtgcaagataaaagcagcctgggtcacccaggccacaaggccatggttaattcttaaggcaaggcaaatccatggatgagaagtgcaatgggcatagtaaaagtgcatgaatttatctta

SEQ ID NO: 3603 - protein, 147 aa, Homo sapiens
MVLPQLAILLARRSKAEELGLPILGVLRSYAVVGVPPDIMGIGPAYAIPVALQKAGLTVSDVDIFEINEAFASQAAYCVEKLRLPPEKVNPLGGAVALGHPLGCTGARQVITLLNELKRRGKRAYGVVSMCIGTGMGAAAVFEYPGN

SEQ ID NO: 3604 - DNA, 4726 bp, Homo sapiens
atatgatgcccatcagagtgcttcgtctaggtgggatcaggctttcaagagtccatgggaacatgcagggttagctatatgattactggtaaggccgagtggtccctggcctcagactttaggcatttcttttgctctggtgctctgtcccagcagcagttccttttctctgttttttgggggaaacagagatacacagttttcatttctgaatcttcaaagggagagagagagaaggatccctgtggcccaaacaggcttcccttgcctttgggctgtgcttggtctttgattgaagattctcataggagtagaagggaatgtgcttgtggggccctggggagcaagtgcctgcagagatggggtctgcccagtagctgctcacccccattccatggatctggcctggcatgggagcagagctgctgggtttgttcccctgccctttacatcccttgaggggggcagttagaagcataggactgctttccatgagagcctggcatggaattgggggctgattctactttctcaccttctgtttcagtgacatcccggagactgtgcctttgtccactgtcaatagacagtgttcgtcggggctacaggcagtggccagcatagcaggtggcatcagaaatgggtcttatgacattggcatggcctgtggggtggagtccatgtccctggctgacagagggaaccctggaaatattacttcgcgcttgatggagaaggagaaggccagagattgcctgattcctatggggataacctctgagaatgtggctgagcggtttggcatttcacgggagaagcaggatacctttgccctggcttcccagcagaaggcagcaagagcccagagcaagggctgtttccaagctgagattgtgcctgtgaccaccacggtccatgatgacaagggcaccaagaggagcatcactgtgacccaggatgagggtatccgccccagcaccaccatggagggcctggccaaactgaagcctgccttcaagaaagatggttctaccacagctggtgagactggtccggggtaggggtatgagaaagcaggccatggccatgctgggtgctgtactctgggaacctggaatagaccaggcccctctgcaaagtagaagtgggagggctgggatctcctcatccccaccccgatgccttcttaccccaacagtttgcccctaggaaactctagccaggtgagtgatggggcagctgccatcctgctggcccggaggtccaaggcagaagagttgggccttcccatccttggggtcctgaggtcttatgcagtggttggggtcccacctgacatcatgggcattggacctgcctatgccatcccagtagctttgcaaaaagcaggtaaggtggctccttcatatagtatctgggtcccacctggatcctgcagctgccctgcatgctgttgccaggggcatgagggtggtcctgtgggtgctgcagagtggaggtggggcaggctagtgtcccatacttcaagcccttcctgaccccacagctgggattggctcacccttctggaagagacacacaccaggcagcctgtaggcccatggatggggtgggccccaggggaggcagagggccagtgtgtcagctcaggtctttaccttgtctgcagggctgacagtgagtgacgtggacatcttcgagatcaatgaggcctttgcaagccaggctgcctactgtgtggagaagctacgactcccccctgagaaggtgaaccccctggggggtgcagtggccttagggcacccactgggctgcactggggcacgacaggtcatcacgctgctcaatgagctgaagcgccgtgggaagaggtaaggctttgctcctggcggtggggtcatagggggatatccaagttagggcacctgaagggcaggggatagaggtaggtgggctttggatcataatctcgacagacacagtcctgagcaccataatcccaaatgttgaaatcccaaaagatcaaagtccctaaggtcttggctggtccagaggtagtgagttatcttgattgttcagttacagatcaaactccatgttctactctttacccccttcttacttctacacttgactagtcaaggagaaaaatccttactgtctaaaatcccaaaaatcacaatctcaaaagattaaaatcctgaatgttgaaatcctaatgttgaattcatgttatgaattctagggaagggattagtgcattttccgctgtatgcaggatagtgcatcatattagttataccatgtaactaatatgatgcaaccattaccttgttattgtctttatttgaattaagtatggtttaaggagatgtgaatgggtgctaagttgacaaggaatggacttaattttgggaatacctagaaacctgacaaagcattgctttgggtgtgtctgtgacggtgtttgcagaggaggttagtgtgtgcatctgagtggaccaggtggggaagatccgccctcagtgttggcaggcatcagctaattgcctggggccctggagagaacaaatacagaaggtgaactgtctctctcagagccgggacacactttttttctgccttggacatcagaaatttgattccatgaaagtgcattatcacattgactttgtaagccttgtgcatgtacataaaaatgttgaaacttcctcagtaaaagaggtgtgctatttgtgcacctgcgtttgtgaaagataaaatttctcaagatcttggttctttggttgactacttgtgcagtggtgacccatcacaggttggtttgttgagacagggtcttactcaggcgcccaggctggagtggagtggctccatcttggctcactgcaacctctgcttccctgactcaagcaatcctcccacctcagcctcctgagtagctgagactacacgtgggtgccaccacacccagctaatttttcgtattttttgtagagacagggttttgctatgttgcccaggctggtctggaactcctgggttcaagtgatcttcccaccttagcttccaaagtgctgggattacaggtgtgagccacagtgcctggctctatcagtttttgatcaatctcatcaaaagacgtaggttgtccatcatggtattcatatgactgcagttataaagctgggtgcacatgattaccagcaatttatacagtttgcttttaacctatttatgaatacagtttgtctgtttataattgttataatcctgtgactattgttagcatacctgagtgtttatgcttgcagaaatttgtaattattttctattttattgtgtaaagtagcctgtgaagtgttctgttgtttttgtttctcaaataaatccccttttaaaaatgtacatttttttttttttttgacatggaatctcactccgttgtccaggctggctggagtgcagtggtgtgatctcggctcactgcaacctctgccttttgggttcaagcaattttcctgcctcagcctcagcctcccgagtatctgggattataggtgtctgccaccacacccagctaatttttgtatttttggtggagacagggtttcaccatgttggcgaggctggtcttgaactcctgacctcgtgatcctcccgcctcggcctcccaaagtgttgggattacaggtttgagccaccacacctggcctaaaaatgtaaatatcttttaaatcaatcttttaaaaaagtttttttctaagatggggtcttgctatattgcctaggctggtcttgaactcctaggcacaagtgatcctcttgcctcagcctgctgaatagctgggactacaagtagatgccaccaggccaggcttccaaattattttttccagaattatattttcaggattttgatcttttaggattgtgattttcaggattttagactttagggattttgttcttccaggatttcaacatttgggatgattgtgtttgggattgtgtcttttgggattatgatcgatccctggggaggggaacatgcacacagaaacaccctgaacttaggatgtaggggcatgatccctgttttccttaagggccagccttgaaagggatactagcctgcagtgggcatctgtcaccgtgtgtgtgcccaagtgggaggccagggtaccgcttgcccacagatctggtctgatggttttgcatcctacttgtccatgacgtccttctgggtcagcctggtctggaggtaatttggtgggtgcctttgcccagccaattaagttttgttttcacagggcatacggagtggtgtccatgtgcatcgggactggaatgggagccgctgccgtctttgaataccctgggaactgagtgaggtcccaggctggaggcgctacgcagacagtcctgctgctctagcagcaaggcagtaacaccacaaaagcaaaaccacatgggaaaactcagcactggtggtggtggcagtggacagatcaaggcacttcaactcatttggaaaatgtgaacactgatgacatggtataggagtgggtggggtgttgagccacccatcagaccctctttagctgtgcaagataaaagcagcctgggtcacccaggccacaaggccatggttaattcttaaggcaaggcaaatccatggatgagaagtgcaatgggcatagtaaaagtgcatgaatttatctta

SEQ ID NO: 3605 - protein, 133 aa, Homo sapiens [sequence omitted]

SEQ ID NO: 3606 - DNA, 1549 bp, Homo sapiens
ccactagcagagactttgggatagggcagaaccatggggaaggaggaccctcaggaggagacctggtcaactttcctttaagcgcctgcaggtgacatcccggagactgtgcctttgtccactgtcaatagacagtgttcgtcggggctacaggcagtggccagcatagcaggtggcatcagaaatgggtcttatgacattggcatggcctgtggggtggagtccatgtccctggctgacagagggaaccctggaaatattacttcgcgcttgatggagaaggagaaggccagagattgcctgattcctatggggataacctctgagaatgtggctgagcggtttggcatttcacgggagaagcaggatacctttgccctggcttcccagcagaaggcagcaagagcccagagcaagggctgtttccaagctgagattgtgcctgtgaccaccacggtccatgatgacaagggcaccaagaggagcatcactgtgacccaggatgagggtatccgccccagcaccaccatggagggcctggccaaactgaagcctgccttcaagaaagatggttctaccacagctggtgagactggtccggggtaggggtatgagaaagcaggccatggccatgctgggtgctgtactctgggaacctggaatagaccaggcccctctgcaaagtagaagtgggagggctgggatctcctcatccccaccccgatgccttcttaccccaacagtttgcccctaggaaactctagccaggtgagtgatggggcagctgccatcctgctggcccggaggtccaaggcagaagagttgggccttcccatccttggggtcctgaggtcttatgcagtggttggggtcccacctgacatcatgggcattggacctgcctatgccatcccagtagctttgcaaaaagcagggctgacagtgagtgacgtggacatcttcgagatcaatgaggcctttgcaagccaggctgcctactgtgtggagaagctacgactcccccctgagaaggtgaaccccctggggggtgcagtggccttagggcacccactgggctgcactggggcacgacaggtcatcacgctgctcaatgagctgaagcgccgtgggaagagggcatacggagtggtgtccatgtgcatcgggactggaatgggagccgctgccgtctttgaataccctgggaactgagtgaggtcccaggctggaggcgctacgcagacagtcctgctgctctagcagcaaggcagtaacaccacaaaagcaaaaccacatgggaaaactcagcactggtggtggtggcagtggacagatcaaggcacttcaactcatttggaaaatgtgaacactgatgacatggtataggagtgggtggggtgttgagccacccatcagaccctctttagctgtgcaagataaaagcagcctgggtcacccaggccacaaggccatggttaattcttaaggcaaggcaaatccatggatgagaagtgcaatgggcatagtaaaagtgcatgaatttatctta

SEQ ID NO: 3607 - protein, 162 aa, Homo sapiens
MPSYPNSLPLGNSSQVSDGAAAILLARRSKAEELGLPILGVLRSYAVVGVPPDIMGIGPAYAIPVALQKAGLTVSDVDIFEINEAFASQAAYCVEKLRLPPEKVNPLGGAVALGHPLGCTGARQVITLLNELKRRGKRAYGVVSMCIGTGMGAAAVFEYPGN

SEQ ID NO: 3608 - DNA, 1320 bp, Homo sapiens
caatcatggcccgaatcgcccagtttctgagtgacatcccggagactgtgcctttgtccactgtcaatagacagtgttcgtcggggctacaggcagtggccagcatagcaggtggcatcagaaatgggtcttatgacattggcatggcctgtggggtggagtccatgtccctggctgacagagggaaccctggaaatattacttcgcgcttgatggagaaggagaaggccagagattgcctgattcctatggggataacctctgagaatgtggctgagcggtttggcatttcacgggagaagcaggatacctttgccctggcttcccagcagaaggcagcaagagcccagagcaagggctgtttccaagctgagattgtgcctgtgaccaccacggtccatgatgacaagggcaccaagaggagcatcactgtgacccaggatgagggtatccgccccagcaccaccatggagggcctggccaaactgaagcctgccttcaagaaagatggttctaccacagctggaaactctagccaggtgagtgatggggcagctgccatcctgctggcccggaggtccaaggcagaagagttgggccttcccatccttggggtcctgaggtcttatgcagtggttggggtcccacctgacatcatgggcattggacctgcctatgccatcccagtagctttgcaaaaagcagggctgacagtgagtgacgtggacatcttcgagatcaatgaggcctttgcaagccaggctgcctactgtgtggagaagctacgactcccccctgagaaggtgaaccccctggggggtgcagtggccttagggcacccactgggctgcactggggcacgacaggtcatcacgctgctcaatgagctgaagcgccgtgggaagagggcatacggagtggtgtccatgtgcatcgggactggaatgggagccgctgccgtctttgaataccctgggaactgagtgaggtcccaggctggaggcgctacgcagacagtcctgctgctctagcagcaaggcagtaacaccacaaaagcaaaaccacatgggaaaactcagcactggtggtggtggcagtggacagatcaaggcacttcaactcatttggaaaatgtgaacactgatgacatggtataggagtgggtggggtgttgagccacccatcagaccctctttagctgtgcaagataaaagcagcctgggtcacccaggccacaaggccatggttaattcttaaggcaaggcaaatccatggatgagaagtgcaatgggcatagtaaaagtgcatgaatttatctta

SEQ ID NO: 3609 - protein, 325 aa, Homo sapiens [sequence omitted]

SEQ ID NO: 3610 - DNA, 1281 bp, Homo sapiens
tgaggccggaacagctgggggacatctgtgtcggaaatgtgctgcagcctggggccggggcaatcatggcccgaatcgcccagtttctgagtgacatcccggagactgtgcctttgtccactgtcaatagacagtgttcgtcggggctacaggcagtggccagcatagcaggtggcatcagaaatgggtcttatgacattggcatggcctgtgggataacctctgagaatgtggctgagcggtttggcatttcacgggagaagcaggatacctttgccctggcttcccagcagaaggcagcaagagcccagagcaagggctgtttccaagctgagattgtgcctgtgaccaccacggtccatgatgacaagggcaccaagaggagcatcactgtgacccaggatgagggtatccgccccagcaccaccatggagggcctggccaaactgaagcctgccttcaagaaagatggttctaccacagctggaaactctagccaggtgagtgatggggcagctgccatcctgctggcccggaggtccaaggcagaagagttgggccttcccatccttggggtcctgaggtcttatgcagtggttggggtcccacctgacatcatgggcattggacctgcctatgccatcccagtagctttgcaaaaagcagggctgacagtgagtgacgtggacatcttcgagatcaatgaggcctttgcaagccaggctgcctactgtgtggagaagctacgactcccccctgagaaggtgaaccccctggggggtgcagtggccttagggcacccactgggctgcactggggcacgacaggtcatcacgctgctcaatgagctgaagcgccgtgggaagagggcatacggagtggtgtccatgtgcatcgggactggaatgggagccgctgccgtctttgaataccctgggaactgagtgaggtcccaggctggaggcgctacgcagacagtcctgctgctctagcagcaaggcagtaacaccacaaaagcaaaaccacatgggaaaactcagcactggtggtggtggcagtggacagatcaaggcacttcaactcatttggaaaatgtgaacactgatgacatggtataggagtgggtggggtgttgagccacccatcagaccctctttagctgtgcaagataaaagcagcctgggtcacccaggccacaaggccatggttaattcttaaggcaaggcaaatccatggatgagaagtgcaatgggcatagtaaaagtgcatgaatttatctta

SEQ ID NO: 3611 - protein, 292 aa, Homo sapiens
MARIAQFLSDIPETVPLSTVNRQCSSGLQAVASIAGGIRNGSYDIGMACGITSENVAERFGISREKQDTFALASQQKAARAQSKGCFQAEIVPVTTTVHDDKGTKRSITVTQDEGIRPSTTMEGLAKLKPAFKKDGSTTAGNSSQVSDGAAAILLARRSKAEELGLPILGVLRSYAVVGVPPDIMGIGPAYAIPVALQKAGLTVSDVDIFEINEAFASQAAYCVEKLRLPPEKVNPLGGAVALGHPLGCTGARQVITLLNELKRRGKRAYGVVSMCIGTGMGAAAVFEYPGN

SEQ ID NO: 3612 - DNA, 758 bp, Homo sapiens
ggagttgaggccttggaggctgagatgtggttctgcgcgtgtgcggacggctgtctgttaactccgcggtcagttcccggactggtggctggtctgcagggttgacctgcgcaatgcagaggctgcaggtagtgctgggccacctgaggggtccggccgattccggctggatgccgcaggccgcgccttgcctgagcggtgccccgcaggcctcggccgcggacgtggtggtggtgcacgggcggcgcacggccatctgccgggcgggccgcggcggcttcaaggacaccacccccgacgagcttctctcggcagtcatgaccgcggttctcaaggacgtgaatctggggccggggcaatcatggcccgaatcgcccagtttctgagtgacatcccggagactgtgcctttgtccactgtcaatagacagtgttcgtcgggggctacgcagacagtcctgctgctctagcagcaaggcagtaacaccacaaaagcaaaaccacatgggaaaactcagcactggtggtggtggcagtggacagatcaaggcacttcaactcatttggaaaatgtgaacactgatgacatggtataggagtgggtggggtgttgagccacccatcagaccctctttagctgtgcaagataaaagcagcctgggtcacccaggccacaaggccatggttaattcttaaggcaaggcaaatccatggatgagaagtgcaatgggcatagtaaaagtgcatgaatttatctta

SEQ ID NO: 3613 - protein, 90 aa, Homo sapiens
MQRLQVVLGHLRGPADSGWMPQAAPCLSGAPQASAADVVVVHGRRTAICRAGRGGFKDTTPDELLSAVMTAVLKDVNLGPGQSWPESPSF

SEQ ID NO: 3614 - DNA, 1691 bp, Homo sapiens
gctgtgggcggagttgaggccttggaggctgagatgtggttctgcgcgtgtgcggacggctgtctgttaactccgcggtcagttcccggactggtggctggtctgcagggttgacctgcgcaatgcagaggctgcaggtagtgctgggccacctgaggggtccggccgattccggctggatgccgcaggccgcgccttgcctgagcggtgccccgcaggcctcggccgcggacgtggtggtggtgcacgggcggcgcacggccatctgccgggcgggccgcggcggcttcaaggacaccacccccgacgagcttctctcggcagtcatgaccgcggttctcaaggacgtgaatctgaggccggaacagctgggggacatctgtgtcggaaatgtgctgcagcctggggccggggcaatcatggcccgaatcgcccagtttctgagtgacatcccggagactgtgcctttgtccactgtcaatagacagtgttcgtcggggctacaggcagtggccagcatagcagggtggagtccatgtccctggctgacagagggaaccctggaaatattacttcgcgcttgatggagaaggagaaggccagagattgcctgattcctatggggataacctctgagaatgtggctgagcggtttggcatttcacgggagaagcaggatacctttgccctggcttcccagcagaaggcagcaagagcccagagcaagggctgtttccaagctgagattgtgcctgtgaccaccacggtccatgatgacaagggcaccaagaggagcatcactgtgacccaggatgagggtatccgccccagcaccaccatggagggcctggccaaactgaagcctgccttcaagaaagatggttctaccacagctggaaactctagccaggtgagtgatggggcagctgccatcctgctggcccggaggtccaaggcagaagagttgggccttcccatccttggggtcctgaggtcttatgcagtggttggggtcccacctgacatcatgggcattggacctgcctatgccatcccagtagctttgcaaaaagcagggctgacagtgagtgacgtggacatcttcgagatcaatgaggcctttgcaagccaggctgcctactgtgtggagaagctacgactcccccctgagaaggtgaaccccctggggggtgcagtggccttagggcacccactgggctgcactggggcacgacaggtcatcacgctgctcaatgagctgaagcgccgtgggaagagggcatacggagtggtgtccatgtgcatcgggactggaatgggagccgctgccgtctttgaataccctgggaactgagtgaggtcccaggctggaggcgctacgcagacagtcctgctgctctagcagcaaggcagtaacaccacaaaagcaaaaccacatgggaaaactcagcactggtggtggtggcagtggacagatcaaggcacttcaactcatttggaaaatgtgaacactgatgacatggtataggagtgggtggggtgttgagccacccatcagaccctctttagctgtgcaagataaaagcagcctgggtcacccaggccacaaggccatggttaattcttaaggcaaggcaaatccatggatgagaagtgcaatgggcatagtaaaagtgcatgaatttatctta

SEQ ID NO: 3615 - protein, 272 aa, Homo sapiens
MSLADRGNPGNITSRLMEKEKARDCLIPMGITSENVAERFGISREKQDTFALASQQKAARAQSKGCFQAEIVPVTTTVHDDKGTKRSITVTQDEGIRPSTTMEGLAKLKPAFKKDGSTTAGNSSQVSDGAAAILLARRSKAEELGLPILGVLRSYAVVGVPPDIMGIGPAYAIPVALQKAGLTVSDVDIFEINEAFASQAAYCVEKLRLPPEKVNPLGGAVALGHPLGCTGARQVITLLNELKRRGKRAYGVVSMCIGTGMGAAAVFEYPGN

SEQ ID NO: 3616 - DNA, 1455 bp, Homo sapiens
gctgtgggcggagttgaggccttggaggctgagatgtggttctgcgcgtgtgcggacggctgtctgttaactccgcggtcagttcccggactggtggctggtctgcagggttgacctgcgcaatgcagaggctgcaggtagtgctgggccacctgaggggtccggccgattccggctggatgccgcaggccgcgccttgcctgagcggtgccccgcaggcctcggccgcggacgtggtggtggtgcacgggcggcgcacggccatctgccgggcgggccgcggcggcttcaaggacaccacccccgacgagcttctctcggcagtcatgaccgcggttctcaaggacgtgaatctgaggccggaacagctgggggacatctgtgtcggaaatgtgctgcagcctggggccggggcaatcatggcccgaatcgcccagtttctgagtgacatcccggagactgtgcctttgtccactgtcaatagacagtgttcgtcggggctacaggcagtggccagcatagcaggtggcatcagaaatgggtcttatgacattggcatggcctgtgggataacctctgagaatgtggctgagcggtttggcatttcacgggagaagcaggatacctttgccctggcttcccagcagaaggcagcaagagcccagagcaagggctgtttccaagctgagattgtgcctgtgaccaccacggtccatgatgacaagggcaccaagaggagcatcactgtgacccaggatgagggtatccgccccagcaccaccatggagggcctggccaaactgaagcctgccttcaagaaagatggttctaccacagctgggctgacagtgagtgacgtggacatcttcgagatcaatgaggcctttgcaagccaggctgcctactgtgtggagaagctacgactcccccctgagaaggtgaaccccctggggggtgcagtggccttagggcacccactgggctgcactggggcacgacaggtcatcacgctgctcaatgagctgaagcgccgtgggaagagggcatacggagtggtgtccatgtgcatcgggactggaatgggagccgctgccgtctttgaataccctgggaactgagtgaggtcccaggctggaggcgctacgcagacagtcctgctgctctagcagcaaggcagtaacaccacaaaagcaaaaccacatgggaaaactcagcactggtggtggtggcagtggacagatcaaggcacttcaactcatttggaaaatgtgaacactgatgacatggtataggagtgggtggggtgttgagccacccatcagaccctctttagctgtgcaagataaaagcagcctgggtcacccaggccacaaggccatggttaattcttaaggcaaggcaaatccatggatgagaagtgcaatgggcatagtaaaagtgcatgaatttatctta

SEQ ID NO: 3617 - protein, 331 aa, Homo sapiens
MQRLQVVLGHLRGPADSGWMPQAAPCLSGAPQASAADVVVVHGRRTAICRAGRGGFKDTTPDELLSAVMTAVLKDVNLRPEQLGDICVGNVLQPGAGAIMARIAQFLSDIPETVPLSTVNRQCSSGLQAVASIAGGIRNGSYDIGMACGITSENVAERFGISREKQDTFALASQQKAARAQSKGCFQAEIVPVTTTVHDDKGTKRSITVTQDEGIRPSTTMEGLAKLKPAFKKDGSTTAGLTVSDVDIFEINEAFASQAAYCVEKLRLPPEKVNPLGGAVALGHPLGCTGARQVITLLNELKRRGKRAYGVVSMCIGTGMGAAAVFEYPGN

SEQ ID NO: 3618 - DNA, 1611 bp, Homo sapiens
gctgtgggcggagttgaggccttggaggctgagatgtggttctgcgcgtgtgcggacggctgtctgttaactccgcggtcagttcccggactggtggctggtctgcagggttgacctgcgcaatgcagaggctgcaggtagtgctgggccacctgaggggtccggccgattccggctggatgccgcaggccgcgccttgcctgagcggtgccccgcaggcctcggccgcggacgtggtggtggtgcacgggcggcgcacggccatctgccgggcgggccgcggcggcttcaaggacaccacccccgacgagcttctctcggcagtcatgaccgcggttctcaaggacgtgaatctgaggccggaacagctgggggacatctgtgtcggaaatgtgctgcagcctggggccggggcaatcatggcccgaatcgcccagtttctgagggtggagtccatgtccctggctgacagagggaaccctggaaatattacttcgcgcttgatggagaaggagaaggccagagattgcctgattcctatggggataacctctgagaatgtggctgagcggtttggcatttcacgggagaagcaggatacctttgccctggcttcccagcagaaggcagcaagagcccagagcaagggctgtttccaagctgagattgtgcctgtgaccaccacggtccatgatgacaagggcaccaagaggagcatcactgtgacccaggatgagggtatccgccccagcaccaccatggagggcctggccaaactgaagcctgccttcaagaaagatggttctaccacagctggaaactctagccaggtgagtgatggggcagctgccatcctgctggcccggaggtccaaggcagaagagttgggccttcccatccttggggtcctgaggtcttatgcagtggttggggtcccacctgacatcatgggcattggacctgcctatgccatcccagtagctttgcaaaaagcagggctgacagtgagtgacgtggacatcttcgagatcaatgaggcctttgcaagccaggctgcctactgtgtggagaagctacgactcccccctgagaaggtgaaccccctggggggtgcagtggccttagggcacccactgggctgcactggggcacgacaggtcatcacgctgctcaatgagctgaagcgccgtgggaagagggcatacggagtggtgtccatgtgcatcgggactggaatgggagccgctgccgtctttgaataccctgggaactgagtgaggtcccaggctggaggcgctacgcagacagtcctgctgctctagcagcaaggcagtaacaccacaaaagcaaaaccacatgggaaaactcagcactggtggtggtggcagtggacagatcaaggcacttcaactcatttggaaaatgtgaacactgatgacatggtataggagtgggtggggtgttgagccacccatcagaccctctttagctgtgcaagataaaagcagcctgggtcacccaggccacaaggccatggttaattcttaaggcaaggcaaatccatggatgagaagtgcaatgggcatagtaaaagtgcatgaatttatctta

SEQ ID NO: 3619 - protein, 383 aa, Homo sapiens
MQRLQVVLGHLRGPADSGWMPQAAPCLSGAPQASAADVVVVHGRRTAICRAGRGGFKDTTPDELLSAVMTAVLKDVNLRPEQLGDICVGNVLQPGAGAIMARIAQFLRVESMSLADRGNPGNITSRLMEKEKARDCLIPMGITSENVAERFGISREKQDTFALASQQKAARAQSKGCFQAEIVPVTTTVHDDKGTKRSITVTQDEGIRPSTTMEGLAKLKPAFKKDGSTTAGNSSQVSDGAAAILLARRSKAEELGLPILGVLRSYAVVGVPPDIMGIGPAYAIPVALQKAGLTVSDVDIFEINEAFASQAAYCVEKLRLPPEKVNPLGGAVALGHPLGCTGARQVITLLNELKRRGKRAYGVVSMCIGTGMGAAAVFEYPGN

SEQ ID NO: 3620 - DNA, 1859 bp, Homo sapiens
gctgtgggcggagttgaggccttggaggctgagatgtggttctgcgcgtgtgcggacggctgtctgttaactccgcggtcagttcccggactggtggctggtctgcagggttgacctgcgcaatgcagaggctgcaggtagtgctgggccacctgaggggtccggccgattccggctggatgccgcaggccgcgccttgcctgagcggtgccccgcaggcctcggccgcggacgtggtggtggtgcacgggcggcgcacggccatctgccgggcgggccgcggcggcttcaaggacaccacccccgacgagcttctctcggcagtcatgaccgcggttctcaaggacgtgaatctgaggccggaacagctgggggacatctgtgtcggaaatgtgctgcagcctggggccggggcaatcatggcccgaatcgcccagtttctgagtgacatcccggagactgtgcctttgtccactgtcaatagacagtgttcgtcggggctacaggcagtggccagcatagcagggtggagtccatgtccctggctgacagagggaaccctggaaatattacttcgcgcttgatggagaaggagaaggccagagattgcctgattcctatggggataacctctgagaatgtggctgagcggtttggcatttcacgggagaagcaggatacctttgccctggcttcccagcagaaggcagcaagagcccagagcaagggctgtttccaagctgagattgtgcctgtgaccaccacggtccatgatgacaagggcaccaagaggagcatcactgtgacccaggatgagggtatccgccccagcaccaccatggagggcctggccaaactgaagcctgccttcaagaaagatggttctaccacagctggtgagactggtccggggtaggggtatgagaaagcaggccatggccatgctgggtgctgtactctgggaacctggaatagaccaggcccctctgcaaagtagaagtgggagggctgggatctcctcatccccaccccgatgccttcttaccccaacagtttgcccctaggaaactctagccaggtgagtgatggggcagctgccatcctgctggcccggaggtccaaggcagaagagttgggccttcccatccttggggtcctgaggtcttatgcagtggttggggtcccacctgacatcatgggcattggacctgcctatgccatcccagtagctttgcaaaaagcagggctgacagtgagtgacgtggacatcttcgagatcaatgaggcctttgcaagccaggctgcctactgtgtggagaagctacgactcccccctgagaaggtgaaccccctggggggtgcagtggccttagggcacccactgggctgcactggggcacgacaggtcatcacgctgctcaatgagctgaagcgccgtgggaagagggcatacggagtggtgtccatgtgcatcgggactggaatgggagccgctgccgtctttgaataccctgggaactgagtgaggtcccaggctggaggcgctacgcagacagtcctgctgctctagcagcaaggcagtaacaccacaaaagcaaaaccacatgggaaaactcagcactggtggtggtggcagtggacagatcaaggcacttcaactcatttggaaaatgtgaacactgatgacatggtataggagtgggtggggtgttgagccacccatcagaccctctttagctgtgcaagataaaagcagcctgggtcacccaggccacaaggccatggttaattcttaaggcaaggcaaatccatggatgagaagtgcaatgggcatagtaaaagtgcatgaatttatctta

SEQ ID NO: 3621 - protein, 162 aa, Homo sapiens; identical to SEQ ID NO: 3607

SEQ ID NO: 3622 - DNA, 1610 bp, Homo sapiens
gtcgctcgcgtctgttcgcagagctgtgggcggagttgaggccttggaggctgagatgtggttctgcgcgtgtgcggacggctgtctgttaactccgcggtcagttcccggactggtggctggtctgcagggttgacctgcgcaatgcagaggctgcaggtagtgctgggccacctgaggggtccggccgattccggctggatgccgcaggccgcgccttgcctgagcggtgccccgcaggcctcggccgcggacgtggtggtggtgcacgggcggcgcacggccatctgccgggcgggccgcggcggcttcaaggacaccacccccgacgagcttctctcggcagtcatgaccgcggttctcaaggacgtgaatctgaggccggaacagctgggggacatctgtgtcggaaatgtgctgcagcctggggccggggcaatcatggcccgaatcgcccagtttctgagtgacatcccggagactgtgcctttgtccactgtcaatagacagtgttcgtcggggctacaggcagtggccagcatagcaggtggcatcagaaatgggtcttatgacattggcatggcctgtggggtggagtccatgtccctggctgacagagggaaccctggaaatattacttcgcgcttgatggagaaggagaaggccagagattgcctgattcctatggggataacctctgagaatgtggctgagcggtttggcatttcacgggagaagcaggatacctttgccctggcttcccagcagaaggcagcaagagcccagagcaagggctgtttccaagctgagattgtgcctgtgaccaccacggtccatgatgacaagggcaccaagaggagcatcactgtgacccaggatgagggtatccgccccagcaccaccatggagggcctggccaaactgaagcctgccttcaagaaagatggttctaccacagctggaaactctagccaggtgagtgatggggcagctgccatcctgctggcccggaggtccaaggcagaagagttgggccttcccatccttggggtcctgaggtcttatgcagtggttggggtcccacctgacatcatgggcattggacctgcctatgccatcccagtagctttgcaaaaagcagggctgacagtgagtgacgtggacatcttcgagatcaatgaggcctttgcaagccagggcatacggagtggtgtccatgtgcatcgggactggaatgggagccgctgccgtctttgaataccctgggaactgagtgaggtcccaggctggaggcgctacgcagacagtcctgctgctctagcagcaaggcagtaacaccacaaaagcaaaaccacatgggaaaactcagcactggtggtggtggcagtggacagatcaaggcacttcaactcatttggaaaatgtgaacactgatgacatggtataggagtgggtggggtgttgagccacccatcagaccctctttagctgtgcaagataaaagcagcctgggtcacccaggccacaaggccatggttaattcttaaggcaaggcaaatccatggatgagaagtgcaatgggcatagtaaaagtgcatgaatttatctta

SEQ ID NO: 3623 - protein, 370 aa, Homo sapiens
MQRLQVVLGHLRGPADSGWMPQAAPCLSGAPQASAADVVVVHGRRTAICRAGRGGFKDTTPDELLSAVMTAVLKDVNLRPEQLGDICVGNVLQPGAGAIMARIAQFLSDIPETVPLSTVNRQCSSGLQAVASIAGGIRNGSYDIGMACGVESMSLADRGNPGNITSRLMEKEKARDCLIPMGITSENVAERFGISREKQDTFALASQQKAARAQSKGCFQAEIVPVTTTVHDDKGTKRSITVTQDEGIRPSTTMEGLAKLKPAFKKDGSTTAGNSSQVSDGAAAILLARRSKAEELGLPILGVLRSYAVVGVPPDIMGIGPAYAIPVALQKAGLTVSDVDIFEINEAFASQGIRSGVHVHRDWNGSRCRL

SEQ ID NO: 3624 - DNA, 1785 bp, Homo sapiens
aggctggaggtggacgggacttttggagggtcgctcgcgtctgttcgcagagctgtgggcggagttgaggccttggaggctgagatgtggttctgcgcgtgtgcggacggctgtctgttaactccgcggtcagttcccggactggtggctggtctgcagggttgacctgcgcaatgcagaggctgcaggtagtgctgggccacctgaggggtccggccgattccggctggatgccgcaggccgcgccttgcctgagcggtgccccgcaggcctcggccgcggacgtggtggtggtgcacgggcggcgcacggccatctgccgggcgggccgcggcggcttcaaggacaccacccccgacgagcttctctcggcagtcatgaccgcggttctcaaggacgtgaatctgaggccggaacagctgggggacatctgtgtcggaaatgtgctgcagcctggggccggggcaatcatggcccgaatcgcccagtttctgagtgacatcccggagactgtgcctttgtccactgtcaatagacagtgttcgtcggggctacaggcagtggccagcatagcaggtggcatcagaaatgggtcttatgacattggcatggcctgtggggtggagtccatgtccctggctgacagagggaaccctggaaatattacttcgcgcttgatggagaaggagaaggccagagattgcctgattcctatggggataacctctgagaatgtggctgagcggtttggcatttcacgggagaagcaggatacctttgccctggcttcccagcagaaggcagcaagagcccagagcaagggctgtttccaagctgagattgtgcctgtgaccaccacggtccatgatgacaagggcaccaagaggagcatcactgtgacccaggatgagggtatccgccccagcaccaccatggagggcctggccaaactgaagcctgccttcaagaaagatggttctaccacagctggaaactctagccaggtgagtgatggggcagctgccatcctgctggcccggaggtccaaggcagaagagttgggccttcccatccttggggtcctgaggtcttatgcagtggttggggtcccacctgacatcatgggcattggacctgcctatgccatcccagtagctttgcaaaaagcagggctgacagtgagtgacgtggacatcttcgagatcaatgaggcctttgcaagccaggctgcctactgtgtggagaagctacgactcccccctgagaaggtgaaccccctggggggtgcagtggccttagggcacccactgggctgcactggggcacgacaggtcatcacgctgctcaatgagctgaagcgccgtgggaagagggcatacggagtggtgtccatgtgcatcgggactggaatgggagccgctgccgtctttgaataccctgggaactgagtgaggtcccaggctggaggcgctacgcagacagtcctgctgctctagcagcaaggcagtaacaccacaaaagcaaaaccacatgggaaaactcagcactggtggtggtggcagtggacagatcaaggcacttcaactcatttggaaaatgtgaacactgatgacatggtataggagtgggtggggtgttgagccacccatcagaccctctttagctgtgcaagataaaagcagcctgggtcacccaggccacaaggccatggttaattcttaaggcaaggcaaatccatggatgagaagtgcaatgggcatagtaaaagtgcatgaatttatctta

SEQ ID NO: 3625 - protein, 424 aa, Homo sapiens; identical to SEQ ID NO: 347

SEQ ID NO: 3626 - DNA, 515 bp, Homo sapiens
agaccaggcccctctgcaaagtagaagtgggagggctgggatctcctcatccccaccccgatgccttcttaccccaacagtttgcccctaggaaactctagccaggtgagtgatggggcagctgccatcctgctggcccggaggtccaaggcagaagagttgggccttcccatccttggggtcctgaggtcttatgcagtggttggggtcccacctgacatcatgggcattggacctgcctatgccatcccagtagctttgcaaaaagcagggctgacagtgagtgacgtggacatcttcgagatcaatgaggcctttgcaagccaggctgcctactgtgtggagaagctacgactcccccctgagaaggtgaaccccctggggggtgcagtggccttagggcacccactgggctgcactggggcacgacaggtcatcacgctgctcaatgagctgaagcgccgtgggaagaggtaaggctttgctcctggcggtggggtcatagggggatatcc

SEQ ID NO: 3627 - protein, 138 aa, Homo sapiens
MPSYPNSLPLGNSSQVSDGAAAILLARRSKAEELGLPILGVLRSYAVVGVPPDIMGIGPAYAIPVALQKAGLTVSDVDIFEINEAFASQAAYCVEKLRLPPEKVNPLGGAVALGHPLGCTGARQVITLLNELKRRGKR

SEQ ID NO: 3628 - DNA, 787 bp, Homo sapiens
gctgtgggcggagttgaggccttggaggctgagatgtggttctgcgcgtgtgcggacggctgtctgttaactccgcggtcagttcccggactggtggctggtctgcagggttgacctgcgcaatgcagaggctgcaggtagtgctgggccacctgaggggtccggccgattccggctggatgccgcaggccgcgccttgcctgagcggtgccccgcaggcctcggccgcggacgtggtggtggtgcacgggcggcgcacggccatctgccgggcgggccgcggcggcttcaaggacaccacccccgacgagcttctctcggcagtcatgaccgcggttctcaaggacgtgaatctgaggccggaacagctgggggacatctgtgtcggaaatgtgctgcagcctggggccggggcaatcatggcccgaatcgcccagtttctgagtgacatcccggagactgtgcctttgtccactgtcaatagacagtgttcgtcggggctacaggcagtggccagcatagcagggtggagtccatgtccctggctgacagagggaaccctggaaatattacttcgcgcttgatggagaaggagaaggccagagattgcctgattcctatggggataacctctgagaatgtggctgagcggtttggcatttcacgggagaagcaggatacctttgccctggcttcccagcagaagtccatgatgacaagggcaccaagaggagcatcactgtgacccaggatgagggtatccgccccagcaccaccatggagggcc

SEQ ID NO: 3629 - protein, 153 aa, Homo sapiens
MQRLQVVLGHLRGPADSGWMPQAAPCLSGAPQASAADVVVVHGRRTAICRAGRGGFKDTTPDELLSAVMTAVLKDVNLRPEQLGDICVGNVLQPGAGAIMARIAQFLSDIPETVPLSTVNRQCSSGLQAVASIAGWSPCPWLTEGTLEILLRA

SEQ ID NO: 3630 - DNA, 939 bp, Homo sapiens
ggagttgaggccttggaggctgagatgtggttctgcgcgtgtgcggacggctgtctgttaactccgcggtcagttcccggactggtggctggtctgcagggttgacctgcgcaatgcagaggctgcaggtagtgctgggccacctgaggggtccggccgattccggctggatgccgcaggccgcgccttgcctgagcggtgccccgcaggcctcggccgcggacgtggtggtggtgcacgggcggcgcacggccatctgccgggcgggccgcggcggcttcaaggacaccacccccgacgagcttctctcggcagtcatgaccgcggttctcaaggacgtgaatctgaggccggaacagctgggggacatctgtgtcgtgacatcccggagactgtgcctttgtccactgtcaatagacagtgttcgtcggggctacaggcagtggccagcatagcagggtggagtccatgtccctggctgacagagggaaccctggaaatattacttcgcgcttgatggagaaggagaaggccagagattgcctgattcctatggggataacctctgagaatgtggctgagcggtttggcatttcacgggagaagcaggatacctttgccctggcttcccagcagaagtgagtgctgattggggaggaatgtttaaagggctggagagtgaggttttgagtctatctaagtggtctgaagtggcaccatttcgtggttactgctgggcagtgagtgctttccaggccttgtgccacccaggttgggggtgggaagtaggaagtgtcagggccactgtgagttggtagtacttccaggttctattactgtctgttcaccctgactttgccctagctaggcctcagtttccccctctgttattttctggctgcggtttggggactggacattgtagcctggagtgtgggg

SEQ ID NO: 3631 - protein, 113 aa, Homo sapiens
MQRLQVVLGHLRGPADSGWMPQAAPCLSGAPQASAADVVVVHGRRTAICRAGRGGFKDTTPDELLSAVMTAVLKDVNLRPEQLGDICVVTSRRLCLCPLSIDSVRRGYRQWPA

SEQ ID NO: 3632 - DNA, 632 bp, Homo sapiens
gctgtgggcggagttgaggccttggaggctgagatgtggttctgcgcgtgtgcggacggctgtctgttaactccgcggtcagttcccggactggtggctggtctgcagggttgacctgcgcaatgcagaggctgcaggtagtgctgggccacctgaggggtccggccgattccggctggatgccgcaggccgcgccttgcctgagcggtgccccgcaggcctcggccgcggacgtggtggtggtgcacgggcggcgcacggccatctgccgggcgggccgcggcggcttcaaggacaccacccccgacgagcttctctcggcagtcatgaccgcggttctcaaggacgtgaatctgaggccggaacagctgggggacatctgtgtcggaaatgtgctgcagcctggggccggggcaatcatggcccgaatcgcccagtttctgagtgacatcccggagactgtgcctttgtccactgtcaatagacagtgttcgtcggggctacaggcagtggccagcatagcaggtggcatcagaaatgggtcttatgacattggcatggcctgtgggtaagaatttttttctgccggagcttattaaccaacttgtgacaataaaactaattttcatctg

SEQ ID NO: 3633 - protein, 149 aa, Homo sapiens
MQRLQVVLGHLRGPADSGWMPQAAPCLSGAPQASAADVVVVHGRRTAICRAGRGGFKDTTPDELLSAVMTAVLKDVNLRPEQLGDICVGNVLQPGAGAIMARIAQFLSDIPETVPLSTVNRQCSSGLQAVASIAGGIRNGSYDIGMACG

SEQ ID NO: 3634 - DNA, 496 bp, Homo sapiens
gctgtgggcggagttgaggccttggaggctgagatgtggttctgcgcgtgtgcggacggctgtctgttaactccgcggtcagttcccggactggtggctggtctgcagggttgacctgcgcaatgcagaggctgcaggtagtgctgggccacctgaggggtccggccgattccggctggatgccgcaggccgcgccttgcctgagcggtgccccgcaggcctcggccgcggacgtggtggtggtgcacgggcggcgcacggccatctgccgggcgggccgcggcggcttcaaggacaccacccccgacgagcttctctcggcagtcatgaccgcggttctcaaggacgtgaatctgaggccggaacagctgggggacatctgtgtcggaaatgtgctgcagcctggggccggggcaatcatggcccgaatcgcccagtttctgagtgacatcccggagactgtgcctttgtccactgtcaatagacagtgttcgtc

SEQ ID NO: 3635 - protein, 123 aa, Homo sapiens
MQRLQVVLGHLRGPADSGWMPQAAPCLSGAPQASAADVVVVHGRRTAICRAGRGGFKDTTPDELLSAVMTAVLKDVNLRPEQLGDICVGNVLQPGAGAIMARIAQFLSDIPETVPLSTVNRQC

SEQ ID NO: 3636 - DNA, 608 bp, Homo sapiens
ggagttgaggccttggaggctgagatgtggttctgcgcgtgtgcggacggctgtctgttaactccgcggtcagttcccggactggtggctggtctgcagggttgacctgcgcaatgcagaggctgcaggtagtgctgggccacctgaggggtccggccgattccggctggatgccgcaggccgcgccttgcctgagcggtgccccgcaggcctcggccgcggacgtggtggtggtgcacgggcggcgcacggccatctgccgggcgggccgcggcggcttcaaggacaccacccccgacgagcttctctcggcagtcatgaccgcggttctcaaggacgtgaatctgaggccggaacagctgggggacatctgtgtcggaaatgtgctgcagcctggggccggggcaatcatggcccgaatcgcccagtttctgaggtaaacttttctagttctagccatgggttggccattttgacactttactgggcccaggccccaggaaactcagtgtgcaggttggggaggataaggttggacaccagaatgaggcaacgagagtccttggctccctgctcttgtggactcaacctctcccctactttgaagt

SEQ ID NO: 3637 - protein, 108 aa, Homo sapiens
MQRLQVVLGHLRGPADSGWMPQAAPCLSGAPQASAADVVVVHGRRTAICRAGRGGFKDTTPDELLSAVMTAVLKDVNLRPEQLGDICVGNVLQPGAGAIMARIAQFLR

SEQ ID NO: 3638 - DNA, 559 bp, Homo sapiens
ggagttgaggccttggaggctgagatgtggttctgcgcgtgtgcggacggctgtctgttaactccgcggtcagttcccggactggtggctggtctgcagggttgacctgcgcaatgcagaggctgcaggtagtgctgggccacctgaggggtccggccgattccggctggatgccgcaggccgcgccttgcctgagcggtgccccgcaggcctcggccgcggacgtggtggtggtgcacgggcggcgcacggccatctgccgggcgggccgcggcggcttcaaggacaccacccccgacgagcttctctcggcagtcatgaccgcggttctcaaggacgtgaatctgaggccggaacagctgggggacatctgtgtcgatcaacatggagtttcttatgtcttccttttctacatacacacggaaatgtgctgcagcctggggccggggcaatcatggcccgaatcgcccagtttctgaggtaaacttttctagttctagccatgggttggccattttgacactttactgggcccaggccccaggaaactcagtgtgca

SEQ ID NO: 3639 - protein, 121 aa, Homo sapiens
MQRLQVVLGHLRGPADSGWMPQAAPCLSGAPQASAADVVVVHGRRTAICRAGRGGFKDTTPDELLSAVMTAVLKDVNLRPEQLGDICVDQHGVSYVFLFYIHTEMCCSLGPGQSWPESPSF

SEQ ID NO: 3640 - DNA, 646 bp, Homo sapiens
ggagttgaggccttggaggctgagatgtggttctgcgcgtgtgcggacggctgtctgttaactccgcggtcagttcccggactggtggctggtctgcagggttgacctgcgcaatgcagaggctgcaggtagtgctgggccacctgaggggtccggccgattccggctggatgccgcaggccgcgccttgcctgagcggtgccccgcaggcctcggccgcggacgtggtggtggtgcacgggcggcgcacggccatctgccgggcgggccgcggcggcttcaaggacaccacccccgacgagcttctctcggcagtcatgaccgcggttctcaaggacgtgaatctgaggccggaacagctgggggacatctgtgtcgtttctcgtctccaccttgcgagaaatacccacaggtgtggaggggcaggccctcttcaggcaaaacggggtgaacagggtgatggtggggagaaggtcagcaggaaaacatatcaacatggagtttcttatgtcttccttttctacatacacacggtaacaatctgatctttcttttccccacaatcttcagtccagccctctattccacccctcaccttgaaatacagcaatatgatatggcaagagtcttatccagcggatgccac

SEQ ID NO: 3641 - protein, 143 aa, Homo sapiens
MQRLQVVLGHLRGPADSGWMPQAAPCLSGAPQASAADVVVVHGRRTAICRAGRGGFKDTTPDELLSAVMTAVLKDVNLRPEQLGDICVVSRLHLARNTHRCGGAGPLQAKRGEQGDGGEKVSRKTYQHGVSYVFLFYIHTVTI

SEQ ID NO: 3642 - DNA, 1826 bp, Homo sapiens
agattcctacttcttacgccccccacatcacccgcctcgagacctcaagggtagaggtgggcacccccgcctccgcacttttgctcggggctccagattgtagggcagggcggcgcttctcggaaagcgaaagccggcggggcggggcgggtgccgcaggagaaagaggaagcgctggcagacaatgcgacccgaccgcgctgaggctccaggaccgcccgccatggctgcaggaggtcccggcgcggggtctgcggccccggtctcctccacatcctcccttcccctggctgctctcaacatgcgagtgcggcgccgcctgtctctgttcttgaacgtgcggacacaggtggcggccgactggaccgcgctggcggaggagatggactttgagtacttggagatccggcaactggagacacaagcggaccccactggcaggctgctggacgcctggcagggacgccctggcgcctctgtaggccgactgctcgagctgcttaccaagctgggccgcgacgacgtgctgctggagctgggacccagcattgaggaggattgccaaaagtatatcttgaagcacttcttccacagtgatgcctactgatgcttcagtgcctctgcacaccgcccattccacttcctccttccccacagggcaggtggggaagcagtttggcccagcccaaggagaccccaccttgagccttatttcctaatgggtccacctctcatctgcatctttcacacctcccagcttctgcccaaccttcagcagtgacaagtccccaagagactcgcctgagcagcttgggctgcttttcatttccacctgtcaggatgcctgtggtcatgctctcagctccacctggcatgagaagggatcctggcctctggcatattcatcaagtatgagttctggggatgagtcactgtaatgatgtgagcagggagccttcctccctgggccacctgcagagagctttcccaccaactttgtaccttgattgccttacaaagttatttgtttacaaacagcgaccatataaaagcctcctgccccaaagcttgtgggcacatgggcacatacagactcacatacagacacacacatatatgtacagacatgtactctcacacacacaggcaccagcatacacacgtttttctaggtacagctcccaggaacagctaggtgggaaagtcccatcactgagggagcctaaccatgtccctgaacaaaaattgggcactcatctattccttttctcttgtgtccctactcattgaaaccaaactctggaaaggacccaatgtaccagtatttatacctctaatgaagcacagagagaggaagagagctgcttaaactcacacaacaatgaactgcagacacagctgttctctccctctctccttcccagagcaatttatactttaccctcaggctgtcctctggggagaaggtgccatggtcttaggtgtctgtgccccaggacagaccctaggaccctaaatccaatagaaaatgcatatctttgctccactttcagccaggctggagcaaggtaccttttcttaggatcttgggagggaatggatgcccctctctgcatgatcttgttgaggcatttagctgccatgcacctgtccccctttaatactgggcattttaaagccatctcaagaggcatcttctacatgttttgtacgcattaaaataatttcaaagatatctgagaaaagccgatatttgccattcttcctatatcctggaatatatcttgcatcctgagtttataataataaataatattctaccttgg

SEQ ID NO: 3643 - protein, 140 aa, Homo sapiens
MRPDRAEAPGPPAMAAGGPGAGSAAPVSSTSSLPLAALNMRVRRRLSLFLNVRTQVAADWTALAEEMDFEYLEIRQLETQADPTGRLLDAWQGRPGASVGRLLELLTKLGRDDVLLELGPSIEEDCQKYILKHFFHSDAY

SEQ ID NO: 3644 - DNA, 1855 bp, Homo sapiens
agattcctacttcttacgccccccacatcacccgcctcgagacctcaagggtagaggtgggcacccccgcctccgcacttttgctcggggctccagattgtagggcagggcggcgcttctcggaaagcgaaagccggcggggcggggcgggtgccgcaggagaaagaggaagcgctggcagacaatgcgacccgaccgcgctgaggctccaggaccgcccgccatggctgcaggaggtcccggcgcggggtctgcggccccggtctcctccacatcctcccttcccctggctgctctcaacatgcgagtgcggcgccgcctgtctctgttcttgaacgtgcggacacaggtggcggccgactggaccgcgctggcggaggagatggactttgagtacttggagatccggcaactggagacacaagcggaccccactggcaggctgctggacgcctggcagggacgccctggcgcctctgtaggccgactgctcgagctgcttaccaagctgggccgcgacgacgtgctgctggagctgggacccagcattgaggaggattgccaaaagtatatcttgaagcacttcttccacagtgatgcctactgatgcttcagtgcctctgcacaccgcccattccacttcctccttccccacagggcaggtggggaagcagtttggcccagcccaaggagaccccaccttgagccttatttcctaatgggtccacctctcatctgcatctttcacacctcccagcttctgcccaaccttcagcagtgacaagtccccaagagactcgcctgagcagcttgggctgcttttcatttccacctgtcaggatgcctgtggtcatgctctcagctccacctggcatgagaagggatcctggcctctggcatattcatcaagtatgagttctggggatgagtcactgtaatgatgtgagcagggagccttcctccctgggccacctgcagagagctttcccaccaactttgtaccttgattgccttacaaagttatttgtttacaaacagcgaccatataaaagcctcctgccccaaagcttgtgggcacatgggcacatacagactcacatacagacacacacatatatgtacagacatgtactctcacacacacaggcaccagcatacacacgtttttctaggtacagctcccaggaacagctaggtgggaaagtcccatcactgagggagcctaaccatgtccctgaacaaaaattgggcactcatctattccttttctcttgtgtccctactcattgaaaccaaactctggaaaggacccaatgtaccagtatttatacctctaatgaagcacagagagaggaagagagctgcttaaactcacacaacaatgaactgcagacacagctgttctctccctctctccttcccagagcaatttatactttaccctcaggctgtcctctggggagaaggtgccatggtcttaggtgtctgtgccccaggacagaccctaggaccctaaatccaatagaaaatgcatatctttgctccactttcagccaggctggagcaaggtaccttttcttaggatcttgggagggaatggatgcccctctctgcatgatcttgttgaggcatttagctgccatgcacctgtccccctttaatactgggcattttaaagccatctcaagaggcatcttctacatgttttgtacgcattaaaataatttcaaagatatctgagaaaagccgatatttgccattcttcctatatcctggaatatatcttgcatcctgagtttataataataaataatattctaccttggaaacttgtgtgtgtgttgagtggaagagg

SEQ ID NO: 3645 - protein, 140 aa, Homo sapiens; identical to SEQ ID NO: 3643

SEQ ID NO: 3646 - DNA, 2811 bp, Homo sapiens
tcgagacctcaagggtagaggtgggcacccccgcctccgcacttttgctcggggctccagattgtagggcagggcggcgcttctcggaaagcgaaagccggcggggcggggcgggtgccgcaggagaaagaggaagcgctggcagacaatgcgacccgaccgcgctgaggctccaggaccgcccgccatggctgcaggaggtcccggcgcggggtctgcggccccggtctcctccacatcctcccttcccctggctgctctcaacatgcgagtgcggcgccgcctgtctctgttcttgaacgtgcggacacaggtggcggccgactggaccgcgctggcggaggagatggactttgagtacttggagatccggcaactggagacacaagcggaccccactggcaggctgctggacgcctggcagggacgccctggcgcctctgtaggccgactgctcgagctgcttaccaagctgggccgcgacgacgtgctgctggagctgggacccagcattgaggaggattgccaaaagtatatcttgaagcagcagcaggaggaggctgagaagcctttacaggtggccgctgtagacagcagtgtcccacggacagcagagctggcgggcatcaccacacttgatgaccccctggggcatatgcctgagcgtttcgatgccttcatctgctattgccccagcgacatccagtttgtgcaggagatgatccggcaactggaacagacaaactatcgactgaagttgtgtgtgtctgaccgcgatgtcctgcctggcacctgtgtctggtctattgctagtgagctcatcgaaaagaggtgccgccggatggtggtggttgtctctgatgattacctgcagagcaaggaatgtgacttccagaccaaatttgcactcagcctctctccaggtgcccatcagaagcgactgatccccatcaagtacaaggcaatgaagaaagagttccccagcatcctgaggttcatcactgtctgcgactacaccaacccctgcaccaaatcttggttctggactcgccttgccaaggccttgtccctgccctgaagactgttctgaggccctgggtgtgtgtgtatctgtctgcctgtccatgtacttctgccctgcctcctcctttcgttgtaggaggaatctgtgctctacttacctctcaattcctggagatgccaacttcacagacacgtctgcagcagctggacatcacatttcatgtcctgcatggaaccagtggctgtgagtggcatgtccacttgctggattatcagccaggacactatagaacaggaccagctgagactaagaaggaccagcagagccagctcagctctgagccattcacacatcttcaccctcagtttcctcacttgaggagtgggatggggagaacagagagtagctgtgtttgaatccctgtaggaaatggtgaagcatagctctgggtctcctgggggagaccaggcttggctgcgggagagctggctgttgctggactacatgctggccactgctgtgaccacgacactgctggggcagcttcttccacagtgatgcctactgatgcttcagtgcctctgcacaccgcccattccacttcctccttccccacagggcaggtggggaagcagtttggcccagcccaaggagaccccaccttgagccttatttcctaatgggtccacctctcatctgcatctttcacacctcccagcttctgcccaaccttcagcagtgacaagtccccaagagactcgcctgagcagcttgggctgcttttcatttccacctgtcaggatgcctgtggtcatgctctcagctccacctggcatgagaagggatcctggcctctggcatattcatcaagtatgagttctggggatgagtcactgtaatgatgtgagcagggagccttcctccctgggccacctgcagagagctttcccaccaactttgtaccttgattgccttacaaagttatttgtttacaaacagcgaccatataaaagcctcctgccccaaagcttgtgggcacatgggcacatacagactcacatacagacacacacatatatgtacagacatgtactctcacacacacaggcaccagcatacacacgtttttctaggtacagctcccaggaacagctaggtgggaaagtcccatcactgagggagcctaaccatgtccctgaacaaaaattgggcactcatctattccttttctcttgtgtccctactcattgaaaccaaactctggaaaggacccaatgtaccagtatttatacctctaatgaagcacagagagaggaagagagctgcttaaactcacacaacaatgaactgcagacacagctgttctctccctctctccttcccagagcaatttatactttaccctcaggctgtcctctggggagaaggtgccatggtcttaggtgtctgtgccccaggacagaccctaggaccctaaatccaatagaaaatgcatatctttgctccactttcagccaggctggagcaaggtaccttttcttaggatcttgggagggaatggatgcccctctctgcatgatcttgttgaggcatttagctgccatgcacctgtccccctttaatactgggcattttaaagccatctcaagaggcatcttctacatgttttgtacgcattaaaataatttcaaagatatctgagaaaagccgatatttgccattcttcctatatcctggaatatatcttgcatcctgagtttataataataaataatattctaccttgg

SEQ ID NO: 3647 - protein, 309 aa, Homo sapiens
MRPDRAEAPGPPAMAAGGPGAGSAAPVSSTSSLPLAALNMRVRRRLSLFLNVRTQVAADWTALAEEMDFEYLEIRQLETQADPTGRLLDAWQGRPGASVGRLLELLTKLGRDDVLLELGPSIEEDCQKYILKQQQEEAEKPLQVAAVDSSVPRTAELAGITTLDDPLGHMPERFDAFICYCPSDIQFVQEMIRQLEQTNYRLKLCVSDRDVLPGTCVWSIASELIEKRCRRMVVVVSDDYLQSKECDFQTKFALSLSPGAHQKRLIPIKYKAMKKEFPSILRFITVCDYTNPCTKSWFWTRLAKALSLP

SEQ ID NO: 3648 - DNA, 2840 bp, Homo sapiens
tcgagacctcaagggtagaggtgggcacccccgcctccgcacttttgctcggggctccagattgtagggcagggcggcgcttctcggaaagcgaaagccggcggggcggggcgggtgccgcaggagaaagaggaagcgctggcagacaatgcgacccgaccgcgctgaggctccaggaccgcccgccatggctgcaggaggtcccggcgcggggtctgcggccccggtctcctccacatcctcccttcccctggctgctctcaacatgcgagtgcggcgccgcctgtctctgttcttgaacgtgcggacacaggtggcggccgactggaccgcgctggcggaggagatggactttgagtacttggagatccggcaactggagacacaagcggaccccactggcaggctgctggacgcctggcagggacgccctggcgcctctgtaggccgactgctcgagctgcttaccaagctgggccgcgacgacgtgctgctggagctgggacccagcattgaggaggattgccaaaagtatatcttgaagcagcagcaggaggaggctgagaagcctttacaggtggccgctgtagacagcagtgtcccacggacagcagagctggcgggcatcaccacacttgatgaccccctggggcatatgcctgagcgtttcgatgccttcatctgctattgccccagcgacatccagtttgtgcaggagatgatccggcaactggaacagacaaactatcgactgaagttgtgtgtgtctgaccgcgatgtcctgcctggcacctgtgtctggtctattgctagtgagctcatcgaaaagaggtgccgccggatggtggtggttgtctctgatgattacctgcagagcaaggaatgtgacttccagaccaaatttgcactcagcctctctccaggtgcccatcagaagcgactgatccccatcaagtacaaggcaatgaagaaagagttccccagcatcctgaggttcatcactgtctgcgactacaccaacccctgcaccaaatcttggttctggactcgccttgccaaggccttgtccctgccctgaagactgttctgaggccctgggtgtgtgtgtatctgtctgcctgtccatgtacttctgccctgcctcctcctttcgttgtaggaggaatctgtgctctacttacctctcaattcctggagatgccaacttcacagacacgtctgcagcagctggacatcacatttcatgtcctgcatggaaccagtggctgtgagtggcatgtccacttgctggattatcagccaggacactatagaacaggaccagctgagactaagaaggaccagcagagccagctcagctctgagccattcacacatcttcaccctcagtttcctcacttgaggagtgggatggggagaacagagagtagctgtgtttgaatccctgtaggaaatggtgaagcatagctctgggtctcctgggggagaccaggcttggctgcgggagagctggctgttgctggactacatgctggccactgctgtgaccacgacactgctggggcagcttcttccacagtgatgcctactgatgcttcagtgcctctgcacaccgcccattccacttcctccttccccacagggcaggtggggaagcagtttggcccagcccaaggagaccccaccttgagccttatttcctaatgggtccacctctcatctgcatctttcacacctcccagcttctgcccaaccttcagcagtgacaagtccccaagagactcgcctgagcagcttgggctgcttttcatttccacctgtcaggatgcctgtggtcatgctctcagctccacctggcatgagaagggatcctggcctctggcatattcatcaagtatgagttctggggatgagtcactgtaatgatgtgagcagggagccttcctccctgggccacctgcagagagctttcccaccaactttgtaccttgattgccttacaaagttatttgtttacaaacagcgaccatataaaagcctcctgccccaaagcttgtgggcacatgggcacatacagactcacatacagacacacacatatatgtacagacatgtactctcacacacacaggcaccagcatacacacgtttttctaggtacagctcccaggaacagctaggtgggaaagtcccatcactgagggagcctaaccatgtccctgaacaaaaattgggcactcatctattccttttctcttgtgtccctactcattgaaaccaaactctggaaaggacccaatgtaccagtatttatacctctaatgaagcacagagagaggaagagagctgcttaaactcacacaacaatgaactgcagacacagctgttctctccctctctccttcccagagcaatttatactttaccctcaggctgtcctctggggagaaggtgccatggtcttaggtgtctgtgccccaggacagaccctaggaccctaaatccaatagaaaatgcatatctttgctccactttcagccaggctggagcaaggtaccttttcttaggatcttgggagggaatggatgcccctctctgcatgatcttgttgaggcatttagctgccatgcacctgtccccctttaatactgggcattttaaagccatctcaagaggcatcttctacatgttttgtacgcattaaaataatttcaaagatatctgagaaaagccgatatttgccattcttcctatatcctggaatatatcttgcatcctgagtttataataataaataatattctaccttggaaacttgtgtgtgtgttgagtggaagagg

SEQ ID NO: 3649 - protein, 309 aa, Homo sapiens; identical to SEQ ID NO: 3647

SEQ ID NO: 3650 - DNA, 665 bp, Homo sapiens
gagaaagaggaagcgctggcagacaatgcgacccgaccgcgctgaggctccaggaccgcccgccatggctgcaggaggtcccggcgcggggtctgcggccccggtctcctccacatcctcccttcccctggctgctctcaacatgcgagtgcggcgccgcctgtctctgttcttgaacgtgcggacacaggtggcggccgactggaccgcgctggcggaggagatggactttgagtacttggagatccggcaactggagacacaagcggaccccactggcaggctgctggacgcctggcagggacgccctggcgcctctgtaggccgactgctcgagctgcttaccaagctgggccgcgacgacgtgctgctggagctgggacccagcattgaggaggattgccaaaagtatatcttgaagcagcagcaggaggaggctgagaagcctttacaggtggccgctgtagacagcagtgtcccacggacagcagagctggcgggcatcaccacacttgatgaccccctgggtaagggtccaatactgttcccatgggacaggtggaataggacattgtggtgttaagagcatgggtgtttgaagcagatgggctgtgagaccttgggcaagtcacttaatctttctgagcctcagtttcctcacctaa

SEQ ID NO: 3651 - protein, 185 aa, Homo sapiens
MRPDRAEAPGPPAMAAGGPGAGSAAPVSSTSSLPLAALNMRVRRRLSLFLNVRTQVAADWTALAEEMDFEYLEIRQLETQADPTGRLLDAWQGRPGASVGRLLELLTKLGRDDVLLELGPSIEEDCQKYILKQQQEEAEKPLQVAAVDSSVPRTAELAGITTLDDPLGKGPILFPWDRWNRTLWC

SEQ ID NO: 3652 - DNA, 2541 bp, Homo sapiens
gagaaagaggaagcgctggcagacaatgcgacccgaccgcgctgaggctccaggaccgcccgccatggctgcaggaggtcccggcgcggggtctgcggccccggtctcctccacatcctcccttcccctggctgctctcaacatgcgagtgcggcgccgcctgtctctgttcttgaacgtgcggacacaggtggcggccgactggaccgcgctggcggaggagatggactttgagtacttggagatccggcaactggagacacaagcggaccccactggcaggctgctggacgcctggcagggacgccctggcgcctctgtaggccgactgctcgagctgcttaccaagctgggccgcgacgacgtgctgctggagctgggacccagcattgaggaggattgccaaaagtatatcttgaagcagcacgacatccagtttgtgcaggagatgatccggcaactggaacagacaaactatcgactgaagttgtgtgtgtctgaccgcgatgtcctgcctggcacctgtgtctggtctattgctagtgagctcatcgaaaagaggtgccgccggatggtggtggttgtctctgatgattacctgcagagcaaggaatgtgacttccagaccaaatttgcactcagcctctctccaggtgcccatcagaagcgactgatccccatcaagtacaaggcaatgaagaaagagttccccagcatcctgaggttcatcactgtctgcgactacaccaacccctgcaccaaatcttggttctggactcgccttgccaaggccttgtccctgccctgaagactgttctgaggccctgggtgtgtgtgtatctgtctgcctgtccatgtacttctgccctgcctcctcctttcgttgtaggaggaatctgtgctctacttacctctcaattcctggagatgccaacttcacagacacgtctgcagcagctggacatcacatttcatgtcctgcatggaaccagtggctgtgagtggcatgtccacttgctggattatcagccaggacactatagaacaggaccagctgagactaagaaggaccagcagagccagctcagctctgagccattcacacatcttcaccctcagtttcctcacttgaggagtgggatggggagaacagagagtagctgtgtttgaatccctgtaggaaatggtgaagcatagctctgggtctcctgggggagaccaggcttggctgcgggagagctggctgttgctggactacatgctggccactgctgtgaccacgacactgctggggcagcttcttccacagtgatgcctactgatgcttcagtgcctctgcacaccgcccattccacttcctccttccccacagggcaggtggggaagcagtttggcccagcccaaggagaccccaccttgagccttatttcctaatgggtccacctctcatctgcatctttcacacctcccagcttctgcccaaccttcagcagtgacaagtccccaagagactcgcctgagcagcttgggctgcttttcatttccacctgtcaggatgcctgtggtcatgctctcagctccacctggcatgagaagggatcctggcctctggcatattcatcaagtatgagttctggggatgagtcactgtaatgatgtgagcagggagccttcctccctgggccacctgcagagagctttcccaccaactttgtaccttgattgccttacaaagttatttgtttacaaacagcgaccatataaaagcctcctgccccaaagcttgtgggcacatgggcacatacagactcacatacagacacacacatatatgtacagacatgtactctcacacacacaggcaccagcatacacacgtttttctaggtacagctcccaggaacagctaggtgggaaagtcccatcactgagggagcctaaccatgtccctgaacaaaaattgggcactcatctattccttttctcttgtgtccctactcattgaaaccaaactctggaaaggacccaatgtaccagtatttatacctctaatgaagcacagagagaggaagagagctgcttaaactcacacaacaatgaactgcagacacagctgttctctccctctctccttcccagagcaatttatactttaccctcaggctgtcctctggggagaaggtgccatggtcttaggtgtctgtgccccaggacagaccctaggaccctaaatccaatagaaaatgcatatctttgctccactttcagccaggctggagcaaggtaccttttcttaggatcttgggagggaatggatgcccctctctgcatgatcttgttgaggcatttagctgccatgcacctgtccccctttaatactgggcattttaaagccatctcaagaggcatcttctacatgttttgtacgcattaaaataatttcaaagatatctgagaaaagccgatatttgccattcttcctatatcctggaatatatcttgcatcctgagtttataataataaataatattctaccttgg

SEQ ID NO: 3653 - protein, 260 aa, Homo sapiens
MRPDRAEAPGPPAMAAGGPGAGSAAPVSSTSSLPLAALNMRVRRRLSLFLNVRTQVAADWTALAEEMDFEYLEIRQLETQADPTGRLLDAWQGRPGASVGRLLELLTKLGRDDVLLELGPSIEEDCQKYILKQHDIQFVQEMIRQLEQTNYRLKLCVSDRDVLPGTCVWSIASELIEKRCRRMVVVVSDDYLQSKECDFQTKFALSLSPGAHQKRLIPIKYKAMKKEFPSILRFITVCDYTNPCTKSWFWTRLAKALSLP

SEQ ID NO: 3654 - DNA, 2741 bp, Homo sapiens
gagaaagaggaagcgctggcagacaatgcgacccgaccgcgctgaggctccaggaccgcccgccatggctgcaggaggtcccggcgcggggtctgcggccccggtctcctccacatcctcccttcccctggctgctctcaacatgcgagtgcggcgccgcctgtctctgttcttgaacgtgcggacacaggtggcggccgactggaccgcgctggcggaggagatggactttgagtacttggagatccggcaactggagacacaagcggaccccactggcaggctgctggacgcctggcagggacgccctggcgcctctgtaggccgactgctcgagctgcttaccaagctgggccgcgacgacgtgctgctggagctgggacccagcattgggcatatgcctgagcgtttcgatgccttcatctgctattgccccagcgacatccagtttgtgcaggagatgatccggcaactggaacagacaaactatcgactgaagttgtgtgtgtctgaccgcgatgtcctgcctggcacctgtgtctggtctattgctagtgagctcatcgaaaagaggttggctagaaggccacggggtgggtgcgtggatgcatgaagccctgccctggggtccagatactgggcatctcctcctagctgtgcactgtccagcctgggcacagtgggcccttcctgaagctattcccaggggatatgctgaactaagttgccacaggacctgcagcctgcccactctcccctaggtgccgccggatggtggtggttgtctctgatgattacctgcagagcaaggaatgtgacttccagaccaaatttgcactcagcctctctccaggtgcccatcagaagcgactgatccccatcaagtacaaggcaatgaagaaagagttccccagcatcctgaggttcatcactgtctgcgactacaccaacccctgcaccaaatcttggttctggactcgccttgccaaggccttgtccctgccctgaagactgttctgaggccctgggtgtgtgtgtatctgtctgcctgtccatgtacttctgccctgcctcctcctttcgttgtaggaggaatctgtgctctacttacctctcaattcctggagatgccaacttcacagacacgtctgcagcagctggacatcacatttcatgtcctgcatggaaccagtggctgtgagtggcatgtccacttgctggattatcagccaggacactatagaacaggaccagctgagactaagaaggaccagcagagccagctcagctctgagccattcacacatcttcaccctcagtttcctcacttgaggagtgggatggggagaacagagagtagctgtgtttgaatccctgtaggaaatggtgaagcatagctctgggtctcctgggggagaccaggcttggctgcgggagagctggctgttgctggactacatgctggccactgctgtgaccacgacactgctggggcagcttcttccacagtgatgcctactgatgcttcagtgcctctgcacaccgcccattccacttcctccttccccacagggcaggtggggaagcagtttggcccagcccaaggagaccccaccttgagccttatttcctaatgggtccacctctcatctgcatctttcacacctcccagcttctgcccaaccttcagcagtgacaagtccccaagagactcgcctgagcagcttgggctgcttttcatttccacctgtcaggatgcctgtggtcatgctctcagctccacctggcatgagaagggatcctggcctctggcatattcatcaagtatgagttctggggatgagtcactgtaatgatgtgagcagggagccttcctccctgggccacctgcagagagctttcccaccaactttgtaccttgattgccttacaaagttatttgtttacaaacagcgaccatataaaagcctcctgccccaaagcttgtgggcacatgggcacatacagactcacatacagacacacacatatatgtacagacatgtactctcacacacacaggcaccagcatacacacgtttttctaggtacagctcccaggaacagctaggtgggaaagtcccatcactgagggagcctaaccatgtccctgaacaaaaattgggcactcatctattccttttctcttgtgtccctactcattgaaaccaaactctggaaaggacccaatgtaccagtatttatacctctaatgaagcacagagagaggaagagagctgcttaaactcacacaacaatgaactgcagacacagctgttctctccctctctccttcccagagcaatttatactttaccctcaggctgtcctctggggagaaggtgccatggtcttaggtgtctgtgccccaggacagaccctaggaccctaaatccaatagaaaatgcatatctttgctccactttcagccaggctggagcaaggtaccttttcttaggatcttgggagggaatggatgcccctctctgcatgatcttgttgaggcatttagctgccatgcacctgtccccctttaatactgggcattttaaagccatctcaagaggcatcttctacatgttttgtacgcattaaaataatttcaaagatatctgagaaaagccgatatttgccattcttcctatatcctggaatatatcttgcatcctgagtttataataataaataatattctaccttgg

SEQ ID NO: 3655 - protein, 195 aa, Homo sapiens
MRPDRAEAPGPPAMAAGGPGAGSAAPVSSTSSLPLAALNMRVRRRLSLFLNVRTQVAADWTALAEEMDFEYLEIRQLETQADPTGRLLDAWQGRPGASVGRLLELLTKLGRDDVLLELGPSIGHMPERFDAFICYCPSDIQFVQEMIRQLEQTNYRLKLCVSDRDVLPGTCVWSIASELIEKRLARRPRGGCVDA

SEQ ID NO: 3656 - DNA, 2372 bp, Homo sapiens
gagaaagaggaagcgctggcagacaatgcgacccgaccgcgctgaggctccaggaccgcccgccatggctgcaggaggtcccggcgcggggtctgcggccccggtctcctccacatcctcccttcccctggctgctctcaacatgcgagtgcggcgccgcctgtctctgttcttgaacgtgcggacacaggtggcggccgactggaccgcgctggcggaggagatggactttgagtacttggagatccggcaactggagacacaagcggaccccactggcaggctgctggacgcctggcagggacgccctggcgcctctgtaggccgactgctcgagctgcttaccaagctgggccgcgacgacgtgctgctggagctgggacccagcattggtgccgccggatggtggtggttgtctctgatgattacctgcagagcaaggaatgtgacttccagaccaaatttgcactcagcctctctccaggtgcccatcagaagcgactgatccccatcaagtacaaggcaatgaagaaagagttccccagcatcctgaggttcatcactgtctgcgactacaccaacccctgcaccaaatcttggttctggactcgccttgccaaggccttgtccctgccctgaagactgttctgaggccctgggtgtgtgtgtatctgtctgcctgtccatgtacttctgccctgcctcctcctttcgttgtaggaggaatctgtgctctacttacctctcaattcctggagatgccaacttcacagacacgtctgcagcagctggacatcacatttcatgtcctgcatggaaccagtggctgtgagtggcatgtccacttgctggattatcagccaggacactatagaacaggaccagctgagactaagaaggaccagcagagccagctcagctctgagccattcacacatcttcaccctcagtttcctcacttgaggagtgggatggggagaacagagagtagctgtgtttgaatccctgtaggaaatggtgaagcatagctctgggtctcctgggggagaccaggcttggctgcgggagagctggctgttgctggactacatgctggccactgctgtgaccacgacactgctggggcagcttcttccacagtgatgcctactgatgcttcagtgcctctgcacaccgcccattccacttcctccttccccacagggcaggtggggaagcagtttggcccagcccaaggagaccccaccttgagccttatttcctaatgggtccacctctcatctgcatctttcacacctcccagcttctgcccaaccttcagcagtgacaagtccccaagagactcgcctgagcagcttgggctgcttttcatttccacctgtcaggatgcctgtggtcatgctctcagctccacctggcatgagaagggatcctggcctctggcatattcatcaagtatgagttctggggatgagtcactgtaatgatgtgagcagggagccttcctccctgggccacctgcagagagctttcccaccaactttgtaccttgattgccttacaaagttatttgtttacaaacagcgaccatataaaagcctcctgccccaaagcttgtgggcacatgggcacatacagactcacatacagacacacacatatatgtacagacatgtactctcacacacacaggcaccagcatacacacgtttttctaggtacagctcccaggaacagctaggtgggaaagtcccatcactgagggagcctaaccatgtccctgaacaaaaattgggcactcatctattccttttctcttgtgtccctactcattgaaaccaaactctggaaaggacccaatgtaccagtatttatacctctaatgaagcacagagagaggaagagagctgcttaaactcacacaacaatgaactgcagacacagctgttctctccctctctccttcccagagcaatttatactttaccctcaggctgtcctctggggagaaggtgccatggtcttaggtgtctgtgccccaggacagaccctaggaccctaaatccaatagaaaatgcatatctttgctccactttcagccaggctggagcaaggtaccttttcttaggatcttgggagggaatggatgcccctctctgcatgatcttgttgaggcatttagctgccatgcacctgtccccctttaatactgggcattttaaagccatctcaagaggcatcttctacatgttttgtacgcattaaaataatttcaaagatatctgagaaaagccgatatttgccattcttcctatatcctggaatatatcttgcatcctgagtttataataataaataatattctaccttgg

SEQ ID NO: 3657 - protein, 159 aa, Homo sapiens
MRPDRAEAPGPPAMAAGGPGAGSAAPVSSTSSLPLAALNMRVRRRLSLFLNVRTQVAADWTALAEEMDFEYLEIRQLETQADPTGRLLDAWQGRPGASVGRLLELLTKLGRDDVLLELGPSIGAAGWWWLSLMITCRARNVTSRPNLHSASLQVPIRSD

SEQ ID NO: 3658 - DNA, 2570 bp, Homo sapiens
gagaaagaggaagcgctggcagacaatgcgacccgaccgcgctgaggctccaggaccgcccgccatggctgcaggaggtcccggcgcggggtctgcggccccggtctcctccacatcctcccttcccctggctgctctcaacatgcgagtgcggcgccgcctgtctctgttcttgaacgtgcggacacaggtggcggccgactggaccgcgctggcggaggagatggactttgagtacttggagatccggcaactggagacacaagcggaccccactggcaggctgctggacgcctggcagggacgccctggcgcctctgtaggccgactgctcgagctgcttaccaagctgggccgcgacgacgtgctgctggagctgggacccagcattgaggaggattgccaaaagtatatcttgaagcagcacgacatccagtttgtgcaggagatgatccggcaactggaacagacaaactatcgactgaagttgtgtgtgtctgaccgcgatgtcctgcctggcacctgtgtctggtctattgctagtgagctcatcgaaaagaggtgccgccggatggtggtggttgtctctgatgattacctgcagagcaaggaatgtgacttccagaccaaatttgcactcagcctctctccaggtgcccatcagaagcgactgatccccatcaagtacaaggcaatgaagaaagagttccccagcatcctgaggttcatcactgtctgcgactacaccaacccctgcaccaaatcttggttctggactcgccttgccaaggccttgtccctgccctgaagactgttctgaggccctgggtgtgtgtgtatctgtctgcctgtccatgtacttctgccctgcctcctcctttcgttgtaggaggaatctgtgctctacttacctctcaattcctggagatgccaacttcacagacacgtctgcagcagctggacatcacatttcatgtcctgcatggaaccagtggctgtgagtggcatgtccacttgctggattatcagccaggacactatagaacaggaccagctgagactaagaaggaccagcagagccagctcagctctgagccattcacacatcttcaccctcagtttcctcacttgaggagtgggatggggagaacagagagtagctgtgtttgaatccctgtaggaaatggtgaagcatagctctgggtctcctgggggagaccaggcttggctgcgggagagctggctgttgctggactacatgctggccactgctgtgaccacgacactgctggggcagcttcttccacagtgatgcctactgatgcttcagtgcctctgcacaccgcccattccacttcctccttccccacagggcaggtggggaagcagtttggcccagcccaaggagaccccaccttgagccttatttcctaatgggtccacctctcatctgcatctttcacacctcccagcttctgcccaaccttcagcagtgacaagtccccaagagactcgcctgagcagcttgggctgcttttcatttccacctgtcaggatgcctgtggtcatgctctcagctccacctggcatgagaagggatcctggcctctggcatattcatcaagtatgagttctggggatgagtcactgtaatgatgtgagcagggagccttcctccctgggccacctgcagagagctttcccaccaactttgtaccttgattgccttacaaagttatttgtttacaaacagcgaccatataaaagcctcctgccccaaagcttgtgggcacatgggcacatacagactcacatacagacacacacatatatgtacagacatgtactctcacacacacaggcaccagcatacacacgtttttctaggtacagctcccaggaacagctaggtgggaaagtcccatcactgagggagcctaaccatgtccctgaacaaaaattgggcactcatctattccttttctcttgtgtccctactcattgaaaccaaactctggaaaggacccaatgtaccagtatttatacctctaatgaagcacagagagaggaagagagctgcttaaactcacacaacaatgaactgcagacacagctgttctctccctctctccttcccagagcaatttatactttaccctcaggctgtcctctggggagaaggtgccatggtcttaggtgtctgtgccccaggacagaccctaggaccctaaatccaatagaaaatgcatatctttgctccactttcagccaggctggagcaaggtaccttttcttaggatcttgggagggaatggatgcccctctctgcatgatcttgttgaggcatttagctgccatgcacctgtccccctttaatactgggcattttaaagccatctcaagaggcatcttctacatgttttgtacgcattaaaataatttcaaagatatctgagaaaagccgatatttgccattcttcctatatcctggaatatatcttgcatcctgagtttataataataaataatattctaccttggaaacttgtgtgtgtgttgagtggaagagg

SEQ ID NO: 3659 - protein, 260 aa, Homo sapiens; identical to SEQ ID NO: 3653

SEQ ID NO: 3660 - DNA, 2401 bp, Homo sapiens
gagaaagaggaagcgctggcagacaatgcgacccgaccgcgctgaggctccaggaccgcccgccatggctgcaggaggtcccggcgcggggtctgcggccccggtctcctccacatcctcccttcccctggctgctctcaacatgcgagtgcggcgccgcctgtctctgttcttgaacgtgcggacacaggtggcggccgactggaccgcgctggcggaggagatggactttgagtacttggagatccggcaactggagacacaagcggaccccactggcaggctgctggacgcctggcagggacgccctggcgcctctgtaggccgactgctcgagctgcttaccaagctgggccgcgacgacgtgctgctggagctgggacccagcattggtgccgccggatggtggtggttgtctctgatgattacctgcagagcaaggaatgtgacttccagaccaaatttgcactcagcctctctccaggtgcccatcagaagcgactgatccccatcaagtacaaggcaatgaagaaagagttccccagcatcctgaggttcatcactgtctgcgactacaccaacccctgcaccaaatcttggttctggactcgccttgccaaggccttgtccctgccctgaagactgttctgaggccctgggtgtgtgtgtatctgtctgcctgtccatgtacttctgccctgcctcctcctttcgttgtaggaggaatctgtgctctacttacctctcaattcctggagatgccaacttcacagacacgtctgcagcagctggacatcacatttcatgtcctgcatggaaccagtggctgtgagtggcatgtccacttgctggattatcagccaggacactatagaacaggaccagctgagactaagaaggaccagcagagccagctcagctctgagccattcacacatcttcaccctcagtttcctcacttgaggagtgggatggggagaacagagagtagctgtgtttgaatccctgtaggaaatggtgaagcatagctctgggtctcctgggggagaccaggcttggctgcgggagagctggctgttgctggactacatgctggccactgctgtgaccacgacactgctggggcagcttcttccacagtgatgcctactgatgcttcagtgcctctgcacaccgcccattccacttcctccttccccacagggcaggtggggaagcagtttggcccagcccaaggagaccccaccttgagccttatttcctaatgggtccacctctcatctgcatctttcacacctcccagcttctgcccaaccttcagcagtgacaagtccccaagagactcgcctgagcagcttgggctgcttttcatttccacctgtcaggatgcctgtggtcatgctctcagctccacctggcatgagaagggatcctggcctctggcatattcatcaagtatgagttctggggatgagtcactgtaatgatgtgagcagggagccttcctccctgggccacctgcagagagctttcccaccaactttgtaccttgattgccttacaaagttatttgtttacaaacagcgaccatataaaagcctcctgccccaaagcttgtgggcacatgggcacatacagactcacatacagacacacacatatatgtacagacatgtactctcacacacacaggcaccagcatacacacgtttttctaggtacagctcccaggaacagctaggtgggaaagtcccatcactgagggagcctaaccatgtccctgaacaaaaattgggcactcatctattccttttctcttgtgtccctactcattgaaaccaaactctggaaaggacccaatgtaccagtatttatacctctaatgaagcacagagagaggaagagagctgcttaaactcacacaacaatgaactgcagacacagctgttctctccctctctccttcccagagcaatttatactttaccctcaggctgtcctctggggagaaggtgccatggtcttaggtgtctgtgccccaggacagaccctaggaccctaaatccaatagaaaatgcatatctttgctccactttcagccaggctggagcaaggtaccttttcttaggatcttgggagggaatggatgcccctctctgcatgatcttgttgaggcatttagctgccatgcacctgtccccctttaatactgggcattttaaagccatctcaagaggcatcttctacatgttttgtacgcattaaaataatttcaaagatatctgagaaaagccgatatttgccattcttcctatatcctggaatatatcttgcatcctgagtttataataataaataatattctaccttggaaacttgtgtgtgtgttgagtggaagagg

SEQ ID NO: 3661 - protein, 159 aa, Homo sapiens; identical to SEQ ID NO: 3657

SEQ ID NO: 3662 - DNA, 2333 bp, Homo sapiens
agaaagaggaagcgctggcagacaatgcgacccgaccgcgctgaggctccaggaccgcccgccatggctgcaggaggtcccggcgcggggtctgcggccccggtctcctccacatcctcccttcccctggctgctctcaacatgcgagtgcggcgccgcctgtctctgttcttgaacgtgcggacacaggtggcggccgactggaccgcgctggcggaggagatggactttgagtacttggagatccggcaactggaacagacaaactatcgactgaagttgtgtgtgtctgaccgcgatgtcctgcctggcacctgtgtctggtctattgctagtgagctcatcgaaaagaggtgccgccggatggtggtggttgtctctgatgattacctgcagagcaaggaatgtgacttccagaccaaatttgcactcagcctctctccaggtgcccatcagaagcgactgatccccatcaagtacaaggcaatgaagaaagagttccccagcatcctgaggttcatcactgtctgcgactacaccaacccctgcaccaaatcttggttctggactcgccttgccaaggccttgtccctgccctgaagactgttctgaggccctgggtgtgtgtgtatctgtctgcctgtccatgtacttctgccctgcctcctcctttcgttgtaggaggaatctgtgctctacttacctctcaattcctggagatgccaacttcacagacacgtctgcagcagctggacatcacatttcatgtcctgcatggaaccagtggctgtgagtggcatgtccacttgctggattatcagccaggacactatagaacaggaccagctgagactaagaaggaccagcagagccagctcagctctgagccattcacacatcttcaccctcagtttcctcacttgaggagtgggatggggagaacagagagtagctgtgtttgaatccctgtaggaaatggtgaagcatagctctgggtctcctgggggagaccaggcttggctgcgggagagctggctgttgctggactacatgctggccactgctgtgaccacgacactgctggggcagcttcttccacagtgatgcctactgatgcttcagtgcctctgcacaccgcccattccacttcctccttccccacagggcaggtggggaagcagtttggcccagcccaaggagaccccaccttgagccttatttcctaatgggtccacctctcatctgcatctttcacacctcccagcttctgcccaaccttcagcagtgacaagtccccaagagactcgcctgagcagcttgggctgcttttcatttccacctgtcaggatgcctgtggtcatgctctcagctccacctggcatgagaagggatcctggcctctggcatattcatcaagtatgagttctggggatgagtcactgtaatgatgtgagcagggagccttcctccctgggccacctgcagagagctttcccaccaactttgtaccttgattgccttacaaagttatttgtttacaaacagcgaccatataaaagcctcctgccccaaagcttgtgggcacatgggcacatacagactcacatacagacacacacatatatgtacagacatgtactctcacacacacaggcaccagcatacacacgtttttctaggtacagctcccaggaacagctaggtgggaaagtcccatcactgagggagcctaaccatgtccctgaacaaaaattgggcactcatctattccttttctcttgtgtccctactcattgaaaccaaactctggaaaggacccaatgtaccagtatttatacctctaatgaagcacagagagaggaagagagctgcttaaactcacacaacaatgaactgcagacacagctgttctctccctctctccttcccagagcaatttatactttaccctcaggctgtcctctggggagaaggtgccatggtcttaggtgtctgtgccccaggacagaccctaggaccctaaatccaatagaaaatgcatatctttgctccactttcagccaggctggagcaaggtaccttttcttaggatcttgggagggaatggatgcccctctctgcatgatcttgttgaggcatttagctgccatgcacctgtccccctttaatactgggcattttaaagccatctcaagaggcatcttctacatgttttgtacgcattaaaataatttcaaagatatctgagaaaagccgatatttgccattcttcctatatcctggaatatatcttgcatcctgagtttataataataaataatattctaccttgg

SEQ ID NO: 3663 - protein, 191 aa, Homo sapiens
MRPDRAEAPGPPAMAAGGPGAGSAAPVSSTSSLPLAALNMRVRRRLSLFLNVRTQVAADWTALAEEMDFEYLEIRQLEQTNYRLKLCVSDRDVLPGTCVWSIASELIEKRCRRMVVVVSDDYLQSKECDFQTKFALSLSPGAHQKRLIPIKYKAMKKEFPSILRFITVCDYTNPCTKSWFWTRLAKALSLP

SEQ ID NO: 3664 - DNA, 2362 bp, Homo sapiens
agaaagaggaagcgctggcagacaatgcgacccgaccgcgctgaggctccaggaccgcccgccatggctgcaggaggtcccggcgcggggtctgcggccccggtctcctccacatcctcccttcccctggctgctctcaacatgcgagtgcggcgccgcctgtctctgttcttgaacgtgcggacacaggtggcggccgactggaccgcgctggcggaggagatggactttgagtacttggagatccggcaactggaacagacaaactatcgactgaagttgtgtgtgtctgaccgcgatgtcctgcctggcacctgtgtctggtctattgctagtgagctcatcgaaaagaggtgccgccggatggtggtggttgtctctgatgattacctgcagagcaaggaatgtgacttccagaccaaatttgcactcagcctctctccaggtgcccatcagaagcgactgatccccatcaagtacaaggcaatgaagaaagagttccccagcatcctgaggttcatcactgtctgcgactacaccaacccctgcaccaaatcttggttctggactcgccttgccaaggccttgtccctgccctgaagactgttctgaggccctgggtgtgtgtgtatctgtctgcctgtccatgtacttctgccctgcctcctcctttcgttgtaggaggaatctgtgctctacttacctctcaattcctggagatgccaacttcacagacacgtctgcagcagctggacatcacatttcatgtcctgcatggaaccagtggctgtgagtggcatgtccacttgctggattatcagccaggacactatagaacaggaccagctgagactaagaaggaccagcagagccagctcagctctgagccattcacacatcttcaccctcagtttcctcacttgaggagtgggatggggagaacagagagtagctgtgtttgaatccctgtaggaaatggtgaagcatagctctgggtctcctgggggagaccaggcttggctgcgggagagctggctgttgctggactacatgctggccactgctgtgaccacgacactgctggggcagcttcttccacagtgatgcctactgatgcttcagtgcctctgcacaccgcccattccacttcctccttccccacagggcaggtggggaagcagtttggcccagcccaaggagaccccaccttgagccttatttcctaatgggtccacctctcatctgcatctttcacacctcccagcttctgcccaaccttcagcagtgacaagtccccaagagactcgcctgagcagcttgggctgcttttcatttccacctgtcaggatgcctgtggtcatgctctcagctccacctggcatgagaagggatcctggcctctggcatattcatcaagtatgagttctggggatgagtcactgtaatgatgtgagcagggagccttcctccctgggccacctgcagagagctttcccaccaactttgtaccttgattgccttacaaagttatttgtttacaaacagcgaccatataaaagcctcctgccccaaagcttgtgggcacatgggcacatacagactcacatacagacacacacatatatgtacagacatgtactctcacacacacaggcaccagcatacacacgtttttctaggtacagctcccaggaacagctaggtgggaaagtcccatcactgagggagcctaaccatgtccctgaacaaaaattgggcactcatctattccttttctcttgtgtccctactcattgaaaccaaactctggaaaggacccaatgtaccagtatttatacctctaatgaagcacagagagaggaagagagctgcttaaactcacacaacaatgaactgcagacacagctgttctctccctctctccttcccagagcaatttatactttaccctcaggctgtcctctggggagaaggtgccatggtcttaggtgtctgtgccccaggacagaccctaggaccctaaatccaatagaaaatgcatatctttgctccactttcagccaggctggagcaaggtaccttttcttaggatcttgggagggaatggatgcccctctctgcatgatcttgttgaggcatttagctgccatgcacctgtccccctttaatactgggcattttaaagccatctcaagaggcatcttctacatgttttgtacgcattaaaataatttcaaagatatctgagaaaagccgatatttgccattcttcctatatcctggaatatatcttgcatcctgagtttataataataaataatattctaccttggaaacttgtgtgtgtgttgagtggaagagg

SEQ ID NO: 3665 - protein, 191 aa, Homo sapiens; identical to SEQ ID NO: 3663

SEQ ID NO: 3666 - DNA, 2929 bp, Homo sapiens
aaagaggaagcgctggcagacaatgcgacccgaccgcgctgaggctccaggaccgcccgccatggctgcaggaggtcccggcgcggggtctgcggccccggtctcctccacatcctcccttcccctggctgctctcaacatgcgagtgcggcgccgcctgtctctgttcttgaacgtgcggacacaggtggcggccgactggaccgcgctggcggaggagatggactttgagtacttggagatccggcaactggagacacaagcggaccccactggcaggctgctggacgcctggcagggacgccctggcgcctctgtaggccgactgctcgagctgcttaccaagctgggccgcgacgacgtgctgctggagctgggacccagcattggtgaggacgtccccttcctggcctcgtacctggggggtgaggaggctgactttccgcggcctcagcatcctgtctcccatggagagaccccatttcctgcctcgggggcccgaagaagcctgcagagggagaaccatgcgggtcccgttccttcttaataaccggtcgcggttattaagaaggactggagaaaggtccggataggcggagatgggaaggaagcagcttaggcagaggctttcagaggaggattgccaaaagtatatcttgaagcagcagcaggaggaggctgagaagcctttacaggtggccgctgtagacagcagtgtcccacggacagcagagctggcgggcatcaccacacttgatgaccccctggggcatatgcctgagcgtttcgatgccttcatctgctattgccccagcgacatccagtttgtgcaggagatgatccggcaactggaacagacaaactatcgactgaagttgtgtgtgtctgaccgcgatgtcctgcctggcacctgtgtctggtctattgctagtgagctcatcgaaaagaggtgccgccggatggtggtggttgtctctgatgattacctgcagagcaaggaatgtgacttccagaccaaatttgcactcagcctctctccaggtgcccatcagaagcgactgatccccatcaagtacaaggcaatgaagaaagagttccccagcatcctgaggttcatcactgtctgcgactacaccaacccctgcaccaaatcttggttctggactcgccttgccaaggccttgtccctgccctgaagactgttctgaggccctgggtgtgtgtgtatctgtctgcctgtccatgtacttctgccctgcctcctcctttcgttgtaggaggaatctgtgctctacttacctctcaattcctggagatgccaacttcacagacacgtctgcagcagctggacatcacatttcatgtcctgcatggaaccagtggctgtgagtggcatgtccacttgctggattatcagccaggacactatagaacaggaccagctgagactaagaaggaccagcagagccagctcagctctgagccattcacacatcttcaccctcagtttcctcacttgaggagtgggatggggagaacagagagtagctgtgtttgaatccctgtaggaaatggtgaagcatagctctgggtctcctgggggagaccaggcttggctgcgggagagctggctgttgctggactacatgctggccactgctgtgaccacgacactgctggggcagcttcttccacagtgatgcctactgatgcttcagtgcctctgcacaccgcccattccacttcctccttccccacagggcaggtggggaagcagtttggcccagcccaaggagaccccaccttgagccttatttcctaatgggtccacctctcatctgcatctttcacacctcccagcttctgcccaaccttcagcagtgacaagtccccaagagactcgcctgagcagcttgggctgcttttcatttccacctgtcaggatgcctgtggtcatgctctcagctccacctggcatgagaagggatcctggcctctggcatattcatcaagtatgagttctggggatgagtcactgtaatgatgtgagcagggagccttcctccctgggccacctgcagagagctttcccaccaactttgtaccttgattgccttacaaagttatttgtttacaaacagcgaccatataaaagcctcctgccccaaagcttgtgggcacatgggcacatacagactcacatacagacacacacatatatgtacagacatgtactctcacacacacaggcaccagcatacacacgtttttctaggtacagctcccaggaacagctaggtgggaaagtcccatcactgagggagcctaaccatgtccctgaacaaaaattgggcactcatctattccttttctcttgtgtccctactcattgaaaccaaactctggaaaggacccaatgtaccagtatttatacctctaatgaagcacagagagaggaagagagctgcttaaactcacacaacaatgaactgcagacacagctgttctctccctctctccttcccagagcaatttatactttaccctcaggctgtcctctggggagaaggtgccatggtcttaggtgtctgtgccccaggacagaccctaggaccctaaatccaatagaaaatgcatatctttgctccactttcagccaggctggagcaaggtaccttttcttaggatcttgggagggaatggatgcccctctctgcatgatcttgttgaggcatttagctgccatgcacctgtccccctttaatactgggcattttaaagccatctcaagaggcatcttctacatgttttgtacgcattaaaataatttcaaagatatctgagaaaagccgatatttgccattcttcctatatcctggaatatatcttgcatcctgagtttataataataaataatattctaccttgg

SEQ ID NO: 3667 - protein, 198 aa, Homo sapiens
MGRKQLRQRLSEEDCQKYILKQQQEEAEKPLQVAAVDSSVPRTAELAGITTLDDPLGHMPERFDAFICYCPSDIQFVQEMIRQLEQTNYRLKLCVSDRDVLPGTCVWSIASELIEKRCRRMVVVVSDDYLQSKECDFQTKFALSLSPGAHQKRLIPIKYKAMKKEFPSILRFITVCDYTNPCTKSWFWTRLAKALSLP

SEQ ID NO: 3668 - DNA, 2958 bp, Homo sapiens
aaagaggaagcgctggcagacaatgcgacccgaccgcgctgaggctccaggaccgcccgccatggctgcaggaggtcccggcgcggggtctgcggccccggtctcctccacatcctcccttcccctggctgctctcaacatgcgagtgcggcgccgcctgtctctgttcttgaacgtgcggacacaggtggcggccgactggaccgcgctggcggaggagatggactttgagtacttggagatccggcaactggagacacaagcggaccccactggcaggctgctggacgcctggcagggacgccctggcgcctctgtaggccgactgctcgagctgcttaccaagctgggccgcgacgacgtgctgctggagctgggacccagcattggtgaggacgtccccttcctggcctcgtacctggggggtgaggaggctgactttccgcggcctcagcatcctgtctcccatggagagaccccatttcctgcctcgggggcccgaagaagcctgcagagggagaaccatgcgggtcccgttccttcttaataaccggtcgcggttattaagaaggactggagaaaggtccggataggcggagatgggaaggaagcagcttaggcagaggctttcagaggaggattgccaaaagtatatcttgaagcagcagcaggaggaggctgagaagcctttacaggtggccgctgtagacagcagtgtcccacggacagcagagctggcgggcatcaccacacttgatgaccccctggggcatatgcctgagcgtttcgatgccttcatctgctattgccccagcgacatccagtttgtgcaggagatgatccggcaactggaacagacaaactatcgactgaagttgtgtgtgtctgaccgcgatgtcctgcctggcacctgtgtctggtctattgctagtgagctcatcgaaaagaggtgccgccggatggtggtggttgtctctgatgattacctgcagagcaaggaatgtgacttccagaccaaatttgcactcagcctctctccaggtgcccatcagaagcgactgatccccatcaagtacaaggcaatgaagaaagagttccccagcatcctgaggttcatcactgtctgcgactacaccaacccctgcaccaaatcttggttctggactcgccttgccaaggccttgtccctgccctgaagactgttctgaggccctgggtgtgtgtgtatctgtctgcctgtccatgtacttctgccctgcctcctcctttcgttgtaggaggaatctgtgctctacttacctctcaattcctggagatgccaacttcacagacacgtctgcagcagctggacatcacatttcatgtcctgcatggaaccagtggctgtgagtggcatgtccacttgctggattatcagccaggacactatagaacaggaccagctgagactaagaaggaccagcagagccagctcagctctgagccattcacacatcttcaccctcagtttcctcacttgaggagtgggatggggagaacagagagtagctgtgtttgaatccctgtaggaaatggtgaagcatagctctgggtctcctgggggagaccaggcttggctgcgggagagctggctgttgctggactacatgctggccactgctgtgaccacgacactgctggggcagcttcttccacagtgatgcctactgatgcttcagtgcctctgcacaccgcccattccacttcctccttccccacagggcaggtggggaagcagtttggcccagcccaaggagaccccaccttgagccttatttcctaatgggtccacctctcatctgcatctttcacacctcccagcttctgcccaaccttcagcagtgacaagtccccaagagactcgcctgagcagcttgggctgcttttcatttccacctgtcaggatgcctgtggtcatgctctcagctccacctggcatgagaagggatcctggcctctggcatattcatcaagtatgagttctggggatgagtcactgtaatgatgtgagcagggagccttcctccctgggccacctgcagagagctttcccaccaactttgtaccttgattgccttacaaagttatttgtttacaaacagcgaccatataaaagcctcctgccccaaagcttgtgggcacatgggcacatacagactcacatacagacacacacatatatgtacagacatgtactctcacacacacaggcaccagcatacacacgtttttctaggtacagctcccaggaacagctaggtgggaaagtcccatcactgagggagcctaaccatgtccctgaacaaaaattgggcactcatctattccttttctcttgtgtccctactcattgaaaccaaactctggaaaggacccaatgtaccagtatttatacctctaatgaagcacagagagaggaagagagctgcttaaactcacacaacaatgaactgcagacacagctgttctctccctctctccttcccagagcaatttatactttaccctcaggctgtcctctggggagaaggtgccatggtcttaggtgtctgtgccccaggacagaccctaggaccctaaatccaatagaaaatgcatatctttgctccactttcagccaggctggagcaaggtaccttttcttaggatcttgggagggaatggatgcccctctctgcatgatcttgttgaggcatttagctgccatgcacctgtccccctttaatactgggcattttaaagccatctcaagaggcatcttctacatgttttgtacgcattaaaataatttcaaagatatctgagaaaagccgatatttgccattcttcctatatcctggaatatatcttgcatcctgagtttataataataaataatattctaccttggaaacttgtgtgtgtgttgagtggaagagg

SEQ ID NO: 3669 - protein, 198 aa, Homo sapiens; identical to SEQ ID NO: 3667

SEQ ID NO: 3670 - DNA, 4058 bp, Homo sapiens
tgaggctccaggaccgcccgccatggctgcaggaggtcccggcgcggggtctgcggccccggtctcctccacatcctcccttcccctggctgctctcaacatgcgagtgcggcgccgcctgtctctgttcttgaacgtgcggacacaggtggcggccgactggaccgcgctggcggaggagatggactttgagtacttggagatccggcaactggagacacaagcggaccccactggcaggctgctggacgcctggcagggacgccctggcgcctctgtaggccgactgctcgagctgcttaccaagctgggccgcgacgacgtgctgctggagctgggacccagcattggtgaggacgtccccttcctggcctcgtacctggggggtgaggaggctgactttccgcggcctcagcatcctgtctcccatggagagaccccatttcctgcctcgggggcccgaagaagcctgcagagggagaaccatgcgggtcccgttccttcttaataaccggtcgcggttattaagaaggactggagaaaggtccggataggcggagatgggaaggaagcagcttaggcagaggctttcaggtagggccaggagtcagaatcaggcttctgtgggggcatctgggctgtttcaagtagagcaacaggacaggtggggcgattgacagtggactgtcttagaaacctcaagtcctggggaaatgcagcccttctttctactcactggcacttacataatatacatgcataggcgttggatacagccgcccacagacaggcacaccttgctgagttggaatcactgcaccataaccagtgggtctcctgagcctttctggcatgcccagccccttgctcacatctgccctggatcccagaagaagcagacctaccttggtaccattcttaggatccctaggaagggacagagatacaaacctgactttgatggccttccagaaagccagaacaccactgacatccctttgggtcagttagagccagtgggagctcaacttctcagagccgttgagcttcgcgtggcaccagtgaactggggaagccctctagaacaacccagccagaggaggtgggacagcggctggatcctgactgtgggtaaagaggtaggcactcccagggaggctgctttactctgtctcttccccacagaggaggattgccaaaagtatatcttgaagcagcagcaggaggaggctgagaagcctttacaggtggccgctgtagacagcagtgtcccacggacagcagagctggcgggcatcaccacacttgatgaccccctgggtaagggtccaatactgttcccatgggacaggtggaataggacattgtggtgttaagagcatgggtgtttgaagcagatgggctgtgagaccttgggcaagtcacttaatctttctgagcctcagtttcctcacctaagaaatggagataatagtcctacctctggattgctgtgagatgctcatgaaataatgtctgtctcgtggttaatccagagcttagcccctgaggtactcatctttcctctcctggaaagggcactttctctgaggagtatcatcttgggaagggtgcagggcccagggttgcctaggcaggggactcttggctggatccctcccaagccttcccatggagctctgaccaccacccttgtgctctgcacccagggcatatgcctgagcgtttcgatgccttcatctgctattgccccagcgacatccagtttgtgcaggagatgatccggcaactggaacagacaaactatcgactgaagttgtgtgtgtctgaccgcgatgtcctgcctggcacctgtgtctggtctattgctagtgagctcatcgaaaagaggttggctagaaggccacggggtgggtgcgtggatgcatgaagccctgccctggggtccagatactgggcatctcctcctagctgtgcactgtccagcctgggcacagtgggcccttcctgaagctattcccaggggatatgctgaactaagttgccacaggacctgcagcctgcccactctcccctaggtgccgccggatggtggtggttgtctctgatgattacctgcagagcaaggaatgtgacttccagaccaaatttgcactcagcctctctccaggtgcccatcagaagcgactgatccccatcaagtacaaggcaatgaagaaagagttccccagcatcctgaggttcatcactgtctgcgactacaccaacccctgcaccaaatcttggttctggactcgccttgccaaggccttgtccctgccctgaagactgttctgaggccctgggtgtgtgtgtatctgtctgcctgtccatgtacttctgccctgcctcctcctttcgttgtaggaggaatctgtgctctacttacctctcaattcctggagatgccaacttcacagacacgtctgcagcagctggacatcacatttcatgtcctgcatggaaccagtggctgtgagtggcatgtccacttgctggattatcagccaggacactatagaacaggaccagctgagactaagaaggaccagcagagccagctcagctctgagccattcacacatcttcaccctcagtttcctcacttgaggagtgggatggggagaacagagagtagctgtgtttgaatccctgtaggaaatggtgaagcatagctctgggtctcctgggggagaccaggcttggctgcgggagagctggctgttgctggactacatgctggccactgctgtgaccacgacactgctggggcagcttcttccacagtgatgcctactgatgcttcagtgcctctgcacaccgcccattccacttcctccttccccacagggcaggtggggaagcagtttggcccagcccaaggagaccccaccttgagccttatttcctaatgggtccacctctcatctgcatctttcacacctcccagcttctgcccaaccttcagcagtgacaagtccccaagagactcgcctgagcagcttgggctgcttttcatttccacctgtcaggatgcctgtggtcatgctctcagctccacctggcatgagaagggatcctggcctctggcatattcatcaagtatgagttctggggatgagtcactgtaatgatgtgagcagggagccttcctccctgggccacctgcagagagctttcccaccaactttgtaccttgattgccttacaaagttatttgtttacaaacagcgaccatataaaagcctcctgccccaaagcttgtgggcacatgggcacatacagactcacatacagacacacacatatatgtacagacatgtactctcacacacacaggcaccagcatacacacgtttttctaggtacagctcccaggaacagctaggtgggaaagtcccatcactgagggagcctaaccatgtccctgaacaaaaattgggcactcatctattccttttctcttgtgtccctactcattgaaaccaaactctggaaaggacccaatgtaccagtatttatacctctaatgaagcacagagagaggaagagagctgcttaaactcacacaacaatgaactgcagacacagctgttctctccctctctccttcccagagcaatttatactttaccctcaggctgtcctctggggagaaggtgccatggtcttaggtgtctgtgccccaggacagaccctaggaccctaaatccaatagaaaatgcatatctttgctccactttcagccaggctggagcaaggtaccttttcttaggatcttgggagggaatggatgcccctctctgcatgatcttgttgaggcatttagctgccatgcacctgtccccctttaatactgggcattttaaagccatctcaagaggcatcttctacatgttttgtacgcattaaaataatttcaaagatatctgagaaaagccgatatttgccattcttcctatatcctggaatatatcttgcatcctgagtttataataataaataatattctaccttgg

SEQ ID NO: 3671 - protein, 78 aa, Homo sapiens [sequence omitted]

SEQ ID NO: 3672 - DNA, 4087 bp, Homo sapiens
tgaggctccaggaccgcccgccatggctgcaggaggtcccggcgcggggtctgcggccccggtctcctccacatcctcccttcccctggctgctctcaacatgcgagtgcggcgccgcctgtctctgttcttgaacgtgcggacacaggtggcggccgactggaccgcgctggcggaggagatggactttgagtacttggagatccggcaactggagacacaagcggaccccactggcaggctgctggacgcctggcagggacgccctggcgcctctgtaggccgactgctcgagctgcttaccaagctgggccgcgacgacgtgctgctggagctgggacccagcattggtgaggacgtccccttcctggcctcgtacctggggggtgaggaggctgactttccgcggcctcagcatcctgtctcccatggagagaccccatttcctgcctcgggggcccgaagaagcctgcagagggagaaccatgcgggtcccgttccttcttaataaccggtcgcggttattaagaaggactggagaaaggtccggataggcggagatgggaaggaagcagcttaggcagaggctttcaggtagggccaggagtcagaatcaggcttctgtgggggcatctgggctgtttcaagtagagcaacaggacaggtggggcgattgacagtggactgtcttagaaacctcaagtcctggggaaatgcagcccttctttctactcactggcacttacataatatacatgcataggcgttggatacagccgcccacagacaggcacaccttgctgagttggaatcactgcaccataaccagtgggtctcctgagcctttctggcatgcccagccccttgctcacatctgccctggatcccagaagaagcagacctaccttggtaccattcttaggatccctaggaagggacagagatacaaacctgactttgatggccttccagaaagccagaacaccactgacatccctttgggtcagttagagccagtgggagctcaacttctcagagccgttgagcttcgcgtggcaccagtgaactggggaagccctctagaacaacccagccagaggaggtgggacagcggctggatcctgactgtgggtaaagaggtaggcactcccagggaggctgctttactctgtctcttccccacagaggaggattgccaaaagtatatcttgaagcagcagcaggaggaggctgagaagcctttacaggtggccgctgtagacagcagtgtcccacggacagcagagctggcgggcatcaccacacttgatgaccccctgggtaagggtccaatactgttcccatgggacaggtggaataggacattgtggtgttaagagcatgggtgtttgaagcagatgggctgtgagaccttgggcaagtcacttaatctttctgagcctcagtttcctcacctaagaaatggagataatagtcctacctctggattgctgtgagatgctcatgaaataatgtctgtctcgtggttaatccagagcttagcccctgaggtactcatctttcctctcctggaaagggcactttctctgaggagtatcatcttgggaagggtgcagggcccagggttgcctaggcaggggactcttggctggatccctcccaagccttcccatggagctctgaccaccacccttgtgctctgcacccagggcatatgcctgagcgtttcgatgccttcatctgctattgccccagcgacatccagtttgtgcaggagatgatccggcaactggaacagacaaactatcgactgaagttgtgtgtgtctgaccgcgatgtcctgcctggcacctgtgtctggtctattgctagtgagctcatcgaaaagaggttggctagaaggccacggggtgggtgcgtggatgcatgaagccctgccctggggtccagatactgggcatctcctcctagctgtgcactgtccagcctgggcacagtgggcccttcctgaagctattcccaggggatatgctgaactaagttgccacaggacctgcagcctgcccactctcccctaggtgccgccggatggtggtggttgtctctgatgattacctgcagagcaaggaatgtgacttccagaccaaatttgcactcagcctctctccaggtgcccatcagaagcgactgatccccatcaagtacaaggcaatgaagaaagagttccccagcatcctgaggttcatcactgtctgcgactacaccaacccctgcaccaaatcttggttctggactcgccttgccaaggccttgtccctgccctgaagactgttctgaggccctgggtgtgtgtgtatctgtctgcctgtccatgtacttctgccctgcctcctcctttcgttgtaggaggaatctgtgctctacttacctctcaattcctggagatgccaacttcacagacacgtctgcagcagctggacatcacatttcatgtcctgcatggaaccagtggctgtgagtggcatgtccacttgctggattatcagccaggacactatagaacaggaccagctgagactaagaaggaccagcagagccagctcagctctgagccattcacacatcttcaccctcagtttcctcacttgaggagtgggatggggagaacagagagtagctgtgtttgaatccctgtaggaaatggtgaagcatagctctgggtctcctgggggagaccaggcttggctgcgggagagctggctgttgctggactacatgctggccactgctgtgaccacgacactgctggggcagcttcttccacagtgatgcctactgatgcttcagtgcctctgcacaccgcccattccacttcctccttccccacagggcaggtggggaagcagtttggcccagcccaaggagaccccaccttgagccttatttcctaatgggtccacctctcatctgcatctttcacacctcccagcttctgcccaaccttcagcagtgacaagtccccaagagactcgcctgagcagcttgggctgcttttcatttccacctgtcaggatgcctgtggtcatgctctcagctccacctggcatgagaagggatcctggcctctggcatattcatcaagtatgagttctggggatgagtcactgtaatgatgtgagcagggagccttcctccctgggccacctgcagagagctttcccaccaactttgtaccttgattgccttacaaagttatttgtttacaaacagcgaccatataaaagcctcctgccccaaagcttgtgggcacatgggcacatacagactcacatacagacacacacatatatgtacagacatgtactctcacacacacaggcaccagcatacacacgtttttctaggtacagctcccaggaacagctaggtgggaaagtcccatcactgagggagcctaaccatgtccctgaacaaaaattgggcactcatctattccttttctcttgtgtccctactcattgaaaccaaactctggaaaggacccaatgtaccagtatttatacctctaatgaagcacagagagaggaagagagctgcttaaactcacacaacaatgaactgcagacacagctgttctctccctctctccttcccagagcaatttatactttaccctcaggctgtcctctggggagaaggtgccatggtcttaggtgtctgtgccccaggacagaccctaggaccctaaatccaatagaaaatgcatatctttgctccactttcagccaggctggagcaaggtaccttttcttaggatcttgggagggaatggatgcccctctctgcatgatcttgttgaggcatttagctgccatgcacctgtccccctttaatactgggcattttaaagccatctcaagaggcatcttctacatgttttgtacgcattaaaataatttcaaagatatctgagaaaagccgatatttgccattcttcctatatcctggaatatatcttgcatcctgagtttataataataaataatattctaccttggaaacttgtgtgtgtgttgagtggaagagg

SEQ ID NO: 3673 - protein, 78 aa, Homo sapiens [sequence omitted]

SEQ ID NO: 3674 - DNA, 2337 bp, Homo sapiens
gtgaactggggaagccctctagaacaacccagccagaggagaggaggattgccaaaagtatatcttgaagcagcagcaggaggaggctgagaagcctttacaggtggccgctgtagacagcagtgtcccacggacagcagagctggcgggcatcaccacacttgatgaccccctggggcatatgcctgagcgtttcgatgccttcatctgctattgccccagcgacatccagtttgtgcaggagatgatccggcaactggaacagacaaactatcgactgaagttgtgtgtgtctgaccgcgatgtcctgcctggcacctgtgtctggtctattgctagtgagctcatcgaaaagaggtgccgccggatggtggtggttgtctctgatgattacctgcagagcaaggaatgtgacttccagaccaaatttgcactcagcctctctccaggtgcccatcagaagcgactgatccccatcaagtacaaggcaatgaagaaagagttccccagcatcctgaggttcatcactgtctgcgactacaccaacccctgcaccaaatcttggttctggactcgccttgccaaggccttgtccctgccctgaagactgttctgaggccctgggtgtgtgtgtatctgtctgcctgtccatgtacttctgccctgcctcctcctttcgttgtaggaggaatctgtgctctacttacctctcaattcctggagatgccaacttcacagacacgtctgcagcagctggacatcacatttcatgtcctgcatggaaccagtggctgtgagtggcatgtccacttgctggattatcagccaggacactatagaacaggaccagctgagactaagaaggaccagcagagccagctcagctctgagccattcacacatcttcaccctcagtttcctcacttgaggagtgggatggggagaacagagagtagctgtgtttgaatccctgtaggaaatggtgaagcatagctctgggtctcctgggggagaccaggcttggctgcgggagagctggctgttgctggactacatgctggccactgctgtgaccacgacactgctggggcagcttcttccacagtgatgcctactgatgcttcagtgcctctgcacaccgcccattccacttcctccttccccacagggcaggtggggaagcagtttggcccagcccaaggagaccccaccttgagccttatttcctaatgggtccacctctcatctgcatctttcacacctcccagcttctgcccaaccttcagcagtgacaagtccccaagagactcgcctgagcagcttgggctgcttttcatttccacctgtcaggatgcctgtggtcatgctctcagctccacctggcatgagaagggatcctggcctctggcatattcatcaagtatgagttctggggatgagtcactgtaatgatgtgagcagggagccttcctccctgggccacctgcagagagctttcccaccaactttgtaccttgattgccttacaaagttatttgtttacaaacagcgaccatataaaagcctcctgccccaaagcttgtgggcacatgggcacatacagactcacatacagacacacacatatatgtacagacatgtactctcacacacacaggcaccagcatacacacgtttttctaggtacagctcccaggaacagctaggtgggaaagtcccatcactgagggagcctaaccatgtccctgaacaaaaattgggcactcatctattccttttctcttgtgtccctactcattgaaaccaaactctggaaaggacccaatgtaccagtatttatacctctaatgaagcacagagagaggaagagagctgcttaaactcacacaacaatgaactgcagacacagctgttctctccctctctccttcccagagcaatttatactttaccctcaggctgtcctctggggagaaggtgccatggtcttaggtgtctgtgccccaggacagaccctaggaccctaaatccaatagaaaatgcatatctttgctccactttcagccaggctggagcaaggtaccttttcttaggatcttgggagggaatggatgcccctctctgcatgatcttgttgaggcatttagctgccatgcacctgtccccctttaatactgggcattttaaagccatctcaagaggcatcttctacatgttttgtacgcattaaaataatttcaaagatatctgagaaaagccgatatttgccattcttcctatatcctggaatatatcttgcatcctgagtttataataataaataatattctaccttgg

SEQ ID NO: 3675 - protein, 140 aa, Homo sapiens
MPERFDAFICYCPSDIQFVQEMIRQLEQTNYRLKLCVSDRDVLPGTCVWSIASELIEKRCRRMVVVVSDDYLQSKECDFQTKFALSLSPGAHQKRLIPIKYKAMKKEFPSILRFITVCDYTNPCTKSWFWTRLAKALSLP

SEQ ID NO: 3676 - DNA, 2366 bp, Homo sapiens
gtgaactggggaagccctctagaacaacccagccagaggagaggaggattgccaaaagtatatcttgaagcagcagcaggaggaggctgagaagcctttacaggtggccgctgtagacagcagtgtcccacggacagcagagctggcgggcatcaccacacttgatgaccccctggggcatatgcctgagcgtttcgatgccttcatctgctattgccccagcgacatccagtttgtgcaggagatgatccggcaactggaacagacaaactatcgactgaagttgtgtgtgtctgaccgcgatgtcctgcctggcacctgtgtctggtctattgctagtgagctcatcgaaaagaggtgccgccggatggtggtggttgtctctgatgattacctgcagagcaaggaatgtgacttccagaccaaatttgcactcagcctctctccaggtgcccatcagaagcgactgatccccatcaagtacaaggcaatgaagaaagagttccccagcatcctgaggttcatcactgtctgcgactacaccaacccctgcaccaaatcttggttctggactcgccttgccaaggccttgtccctgccctgaagactgttctgaggccctgggtgtgtgtgtatctgtctgcctgtccatgtacttctgccctgcctcctcctttcgttgtaggaggaatctgtgctctacttacctctcaattcctggagatgccaacttcacagacacgtctgcagcagctggacatcacatttcatgtcctgcatggaaccagtggctgtgagtggcatgtccacttgctggattatcagccaggacactatagaacaggaccagctgagactaagaaggaccagcagagccagctcagctctgagccattcacacatcttcaccctcagtttcctcacttgaggagtgggatggggagaacagagagtagctgtgtttgaatccctgtaggaaatggtgaagcatagctctgggtctcctgggggagaccaggcttggctgcgggagagctggctgttgctggactacatgctggccactgctgtgaccacgacactgctggggcagcttcttccacagtgatgcctactgatgcttcagtgcctctgcacaccgcccattccacttcctccttccccacagggcaggtggggaagcagtttggcccagcccaaggagaccccaccttgagccttatttcctaatgggtccacctctcatctgcatctttcacacctcccagcttctgcccaaccttcagcagtgacaagtccccaagagactcgcctgagcagcttgggctgcttttcatttccacctgtcaggatgcctgtggtcatgctctcagctccacctggcatgagaagggatcctggcctctggcatattcatcaagtatgagttctggggatgagtcactgtaatgatgtgagcagggagccttcctccctgggccacctgcagagagctttcccaccaactttgtaccttgattgccttacaaagttatttgtttacaaacagcgaccatataaaagcctcctgccccaaagcttgtgggcacatgggcacatacagactcacatacagacacacacatatatgtacagacatgtactctcacacacacaggcaccagcatacacacgtttttctaggtacagctcccaggaacagctaggtgggaaagtcccatcactgagggagcctaaccatgtccctgaacaaaaattgggcactcatctattccttttctcttgtgtccctactcattgaaaccaaactctggaaaggacccaatgtaccagtatttatacctctaatgaagcacagagagaggaagagagctgcttaaactcacacaacaatgaactgcagacacagctgttctctccctctctccttcccagagcaatttatactttaccctcaggctgtcctctggggagaaggtgccatggtcttaggtgtctgtgccccaggacagaccctaggaccctaaatccaatagaaaatgcatatctttgctccactttcagccaggctggagcaaggtaccttttcttaggatcttgggagggaatggatgcccctctctgcatgatcttgttgaggcatttagctgccatgcacctgtccccctttaatactgggcattttaaagccatctcaagaggcatcttctacatgttttgtacgcattaaaataatttcaaagatatctgagaaaagccgatatttgccattcttcctatatcctggaatatatcttgcatcctgagtttataataataaataatattctaccttggaaacttgtgtgtgtgttgagtggaagagg

SEQ ID NO: 3677 - protein, 140 aa, Homo sapiens; identical to SEQ ID NO: 3675

SEQ ID NO: 3678 - DNA, 4532 bp, Homo sapiens
ggggaaagtttggcccgtgcgtggggctggggtggagggcgggacagaggggctgggcccaggcaaagcttctgtcgctgctgctgcggaggccgaggacaggacgtgggctgggccgggcagtgccggactcggaggagcaggaggcgaggtccgccggagctctgagcccccgctgctctgccgcgcggtgaccccgcgccccggcgccgtccgacccgtggctgttccgagacgattggtgggggcgcggcggcggcggcggcggctgttgggggtggggagacgcgcggcgaggagacgagcgaggtcagcgagtttgagggaggaccgcgagccgctgccgccgtcatgtccgaggactcgagcgccctgccctggtccatcaacagggacgattacgagctgcaggaggtgatcgggagtggagcaactgctgtagtccaagcagcttattgtgcccctaaaaaggagaaagtggcaatcaaacggataaaccttgagaaatgtcaaactagcatggatgaactcctgaaagaaattcaagccatgagtcaatgccatcatcctaatattgtatcttactacacatcttttgtggtaaaagatgagctgtggcttgtcatgaagctgctaagtggaggttctgttctggatattattaagcacattgtggcaaaaggggaacacaaaagtggagtcctagatgaatctaccattgctacgatactccgagaagtactggaagggctggaatatctgcataaaaatggacagatccacagagatgtgaaagctggaaacattcttcttggagaagatggctcagtacagattgcagactttggggttagtgcttttttagcaactggtggtgatattacccgaaataaagtgagaaagacctttgttggcaccccttgttggatggcacctgaagttatggaacaggtccgtggttatgatttcaaagctgatatttggagttttggaattacagcaattgaattggctacaggggcggctccttatcataaatatccaccaatgaaggttttaatgctgacactgcagaacgatcctccttctttggaaactggtgttcaagataaagaaatgctgaaaaaatatggaaaatcatttagaaaaatgatttcattgtgccttcaaaaagatccagaaaaaagaccaacagcagcagaactattaaggcacaaatttttccagaaagcaaagaataaagaatttcttcaagaaaaaacattgcagagagcaccaaccatttctgaaagagcaaaaaaggttcggagagtaccaggttccagtgggcgtcttcataagacagaggatggaggctgggagtggagtgatgatgaatttgatgaagaaagtgaggaagggaaagcagcaatttcacaactcaggtctccccgagtgaaagaatcaatatcaaattctgagctctttccaacaactgatcctgtgggtactttgctccaagttccagaacagatctctgctcatctacctcagccagctgggcagattgctacacagccaactcaagtctctctcccacccaccgcagagccagcaaaaacagctcaggctttgtcttcaggatcaggttcacaagaaaccaagatcccaatcagtctagtactaagattaaggaattccaaaaaagaactaaatgatattcgatttgaatttactcctgggagagatacagcagagggtgtctctcaggaactcatttctgctggcctggtcgacggaagggatttagtaatagtggcagctaatttgcagaaaattgtggaagaacctcagtcaaatcgatctgtcactttcaaactggcatctggtgtcgaaggctcagatattcctgatgatggtaaactgataggatttgcccagctcagcatcagctaaaccacaaccctggaagaggcggcctaaggagattccacacatgcgtatctctgttgcttctattggcctaaacccactactgccaaagaacccagcaacaaacctcccggctaggagctttagaagtctttatgttcttcctgccatcattcctccttttcccacagggaaagaaaagttggatcactagtggccagcatccccagagttccgttagtaaacttacttcatatgtcccctgtcttcctccatctgagaagtggcccatgtgcttcaaggcccaggagggagatctgtcagctcattcttgccttactccaatgatggcccaggtggaaaagtagcagctgtatcgggcttcctcatcctgcctgttcccccacacctgccaggatatggacatcttgggatatctctttaccactgaagtagaattgattgttcagctggagcccagagaatttaatttaatgttttttctttgtacctgatgtgaattctagcaacctttgttaggaaaaagcacagcctcagatggaggcagcctaaactgtgttcttgttttgttcatggtgtttctaagcgttttgctgaagctgctctcaggcacccccttcttcattgctctctccagaaagggttgctagccttaacttcagctggtgcaaaacatctgactgtagccgaacttcagccatcagatccttcaaagtggaactttggattgtttttacagacaacatcgagtaatggcttgtaaatgtgaattttgccagaggtggtttttgaacaggaaaatcataattcatatcattggagaagtatttattttcaaatatcaaattgaagaaaaactcaatcctcccatgaaaatcagttcgcctggcctccaagtcgtgaggaaatgggtatgcaaggctgagatttctacagcaataaaggagacacacactgggccagagaggcctgccttctgcctgctctcctgcactgaccctttggagggggtctctgtgtgctgaagctaactcaagatggaaagtgaaaccacatgtgccgtgacctttaggttttatgagtagacagtgttcatttgattttctacagaaataatataaattattctttaggtttaaaaaagagcactcataatgcaatatgtgaataatcagtgaggttgatttttcttttttcctaccgtttcatagtctttgtctaactgctagtaaccctaccgagttttatatatgagtgggatactcaatctggccttaaaaagatacacaaagatgggctgtgggtccctggaaagggggagagttgccctttacagaatcactcgagccctttccagcactgttggtctgatgaacaaggttgttttaccttattttctcttggaacatatctgaaaaccttccccacaaataacttgtcacaccttttgtttcattctgagtctttagttttagtcatgggctttcttcacctgctctaggtgcaaaggcatgttgggaaagagatggatgttggggaggaagagaggagatggatttcagttgggagttaggaggagagtaggtgagatgatcagacaccggagttcaacgtcccagcagtcttggtaaaaggagggagcctgctgagccaggagggagaaaagaagattgaccagcttgctagaaaaatacttagcttttctttttctttttttgtggaggggggacggagaggaacaaggatggggaggtaggaatgaggtatagaaaagagatagcatcttctttggcacaagactagtggcttaccgcttaccttagagttttgttttttttttttcaaacccatcaaaatctacttatttatgaatccaaggggtggcagcatcactctgttctagcattctttgtggagatggtctggtgcctagctgggagtgagcagcagcccatcccctgttcactttctctagcccatcattacctgtgaactgcagtggggcagtcatggcaaatagaattgggctggggtttctccttcttttcagttcattgtttgccctgctaggaattagaagacagacaccatgtcccaggacagtgttacttcttctgcatgatgtgtggtagactccctttgctggcttgtgcagtgatactgagaaaatacatgaacagaaactgcccaggtggaacagcacgtaacctagtgagtgactgtactcctttctaggaatgctgattcagagtgcacctctttgactaggtcccaggatccccttgtccctggagtagggactaactatagcacaaagtaatatgtgccaatgctatttgtgaaatgtttggtctttctaaacgactaaaggatttgttgggtttttgcttaagttttgaaccaaatcctagagccagctgataatatttaataatctggaggagagaataatgatgtaccaataagtggagattcctccttatgatgtatgctaggttatggaagatgtaaaatattcaactttttcctcctttttttggactttgtattttactgcatgttttcttcatttttaatcaataaagagtaaattgtcctta

SEQ ID NO: 3679 - protein, 527 aa, Homo sapiens; identical to SEQ ID NO: 351

SEQ ID NO: 3680 - DNA, 645 bp, Homo sapiens
tcagaaatggttggtgctctctgcaatgttttttcttgaagaaattctttattctggagaggaaaacatttctttatcttgaacaccagtttccaaagaaggaggatcgttctgcagtgtcagcattaaaacctgcaagaattttcaatatactataaacttgtgatgactcagtaaagtttaactattgtggtcaagatttttcaatacaggcaccccccgaccaacatacaaacattttattttctgtaagttcatatctgaatcagttgtttaaaacccagagttattacgtgtatttcacgtaaataatctgctgtagatggttagcttctcaacacacacacgcaatggatattattcagccttaaaaagcaagaaaattcttcaacatgctacaacatggatgaaacttggggacattacgctagccatgcaaagataaacactgtgtgattctacttatatgaggtattgagagtagtcaaaatcatagagacaaaaagtgattgccaaggggctaagaatgggaatcaagagttactatttaatgggtatagagttccagttttaaaatgaagagtttggatacagatggtggtgacaactgcacaacgtgatgaacgcatttaataccattgaact

SEQ ID NO: 3681 - protein, 40 aa, Homo sapiens
MVSFSTHTRNGYYSALKSKKILQHATTWMKLGDITLAMQR

SEQ ID NO: 3682 - DNA, 339 bp, Homo sapiens
gtctccccgagtgaaagaatcaatatcaaattctgagctctttccaacaactgatcctgtgggtactttgctccaagttccagaacagatctctgctcatctacctcagccagctgggcagattgctacacagccaactcaagtctctctcccacccaccgcagagccagcaaaaacagctcaggtaaagccggggatatggtttcatggtcactcctttggatagatgaaaagagcagatattaacgtggaatataacctaatgtaatcaggttaatgtcttggtagattttgaaacaagttagaaattctgtcttcacatttttaagcatgtacagg

SEQ ID NO: 3683 - protein, 74 aa, Homo sapiens
SPRVKESISNSELFPTTDPVGTLLQVPEQISAHLPQPAGQIATQPTQVSLPPTAEPAKTAQVKPGIWFHGHSFG

SEQ ID NO: 3684 - DNA, 2031 bp, Homo sapiens
acaaatcctttagtcgtttagaaagaccaaacatttcacaaatagcattggcacatattactttgtgctatagttagtccctactccagggacaaggggatcctgggacctagtcaaagaggtgcactctgaatcagcattcctagaaaggagtacagtcactcactaggttacgtgctgttccacctgggcagtttctgttcatgtattttctcactaggcaccagaccatctccacaaagaatgctagaacagagtgatgctgccaccccttggattcataaataagtagattttgatgggtttgaaaaaaaaaaaacaaaactctaaggtaagcggtaagccactagtcttgtgccaaagaagatgctatctcttttctatacctcattcctacctccccatccttgttcctctccgtcccccctccacaaaaaaagaaaaagaaaagctaagtatttttctagcaagctggtcaatcttcttttctccctcctggctcagcaggctccctccttttaccaagactgctgggacgttgaactccggtgtctgatcatctcacctactctcctcctaactcccaactgaaatccatctcctctcttcctccccaacatccatctctttcccaacatgcctttgcacctagagcaggtgaagaaagcccatgactaaaactaaagactcagaatgaaacaaaaggtgtgacaagttatttgtggggaaggttttcagatatgttccaagagaaaataaggtaaaacaaccttgttcatcagaccaacagtgctggaaagggctcgagtgattctgtaaagggcaactctccccctttccagggacccacagcccatctttgtgtatctttttaaggccagattgagtatcccactcatatataaaactcggtagggttactagcagttagacaaagactatgaaacggtaggaaaaaagaaaaatcaacctcactgattattcacatattgcattatgagtgctcttttttaaacctaaagaataatttatattatttctgtagaaaatcaaatgaacactgtctactcataaaacctaaaggtcacggcacatgtggtttcactttccatcttgagttagcttcagcacacagagaccccctccaaagggtcagtgcaggagagcaggcagaaggcaggcctctctggcccagtgtgtgtctcctttattgctgtagaaatctcagccttgcatacccatttcctcacgacttggaggccaggcgaactgattttcatgggaggattgagtttttcttcaatttgatatttgaaaataaatacttctccaatgatatgaattatgattttcctgttcaaaaaccacctctggcaaaattcacatttacaagccattactcgatgttgtctgtaaaaacaatccaaagttccactttgaaggatctgatggctgaagttcggctacagtcagatgttttgcaccagctgaagttaaggctagcaaccctttctggagagagcaatgaagaagggggtgcctgagagcagcttcagcaaaacgcttagaaacaccatgaacaaaacaagaacacagtttaggctgcctccatctgaggctgtgctttttcctaacaaaggttgctagaattcacatcaggtacaaagaaaaaacattaaattaaattctctgggctccagctgaacaatcaattctacttcagtggtaaagagatatcccaagatgtccatatcctggcaggtgtgggggaacaggcaggatgaggaagcccgatacagctgctacttttccacctgggccatcattggagtaaggcaagaatgagctgacagatctccctcctgggccttgaagcacatgggccacttctcagatggaggaagacaggggacatatgaagtaagtttactaacggaactctggggatgctggccactagtgatccaacttttctttccctgtgggaaaaggaggaatgatggcaggaagaacataaagacttctaaagct

SEQ ID NO: 3685 - protein, 85 aa, Homo sapiens [sequence omitted]

SEQ ID NO: 3686 - DNA, 683 bp, Homo sapiens
aagctacagagctaccctagtgtccccaggctgaggaggtagtgactggcatacatggctcagtttgtccaggtcctggctgaaataggtgactttggtcgcttccagatacagctattgatcctgctgtgtgttctcaacttcctgtctcccttctacttttttgcccatgtcttcatggtcctagatgagccccaccactgtgcagtggcttgggtgaagaaccacactttcaacctgagtgctgctgaacagctggtactgagcgtgcccctggacactgcaggtcacccagagccctgcctcatgttccggccaccccccgccaatgccagcctgcaggacatcctcagccaccgcttcaatgagacgcagccttgtgatatgggctgggaatatcctgagaacaggctcccatccctgaagaatgagttcaacctggtttgtgatcggaagcacctgaaggacaccacacagtcagtgttcatggctgggctccttgttggcaccctcatgtttgggcccctctgcgaccgtgacagaatgggtggggccctcatggaggacgcaggccgtggtcctggcccagtgcaacttctccctcgggcagatggtgcttgcgggactcgcctacggtttccgcaactggaggctccttcagatcaccggcactgcgcctggct

SEQ ID NO: 3687 - protein, 208 aa, Homo sapiens
MAQFVQVLAEIGDFGRFQIQLLILLCVLNFLSPFYFFAHVFMVLDEPHHCAVAWVKNHTFNLSAAEQLVLSVPLDTAGHPEPCLMFRPPPANASLQDILSHRFNETQPCDMGWEYPENRLPSLKNEFNLVCDRKHLKDTTQSVFMAGLLVGTLMFGPLCDRDRMGGALMEDAGRGPGPVQLLPRADGACGTRLRFPQLEAPSDHRHCA

SEQ ID NO: 3688 - DNA, 2897 bp, Homo sapiens
acagagctaccctagtgtccccaggctgaggaggtagtgactggcatacatggctcagtttgtccaggtcctggctgaaataggtgactttggtcgcttccagatacagctattgatcctgctgtgtgttctcaacttcctgtctcccttctacttttttgcccatgtcttcatggtcctagatgagccccaccactgtgcagtggcttgggtgaagaaccacactttcaacctgagtgctgctgaacagctggtactgagcgtgcccctggacactgcaggtcacccagagccctgcctcatgttccggccaccccccgccaatgccagcctgcaggacatcctcagccaccgcttcaatgagacgcagccttgtgatatgggctgggaatatcctgagaacaggctcccatccctgaagaatgagttcaacctggtttgtgatcggaagcacctgaaggacaccacacagtcagtgttcatggctgggctccttgttggcaccctcatgtttgggcccctctgcgaccggattggccgcaaggccacaatcctggcgcagctgctcctcttcaccctcatcggcctggccacagcttttgtgcccagctttgagctctacatggccctgcgctttgctgtggctactgccgtcgctggacttagcttcagcaatgtcaccctactgacagaatgggtggggccctcatggaggacgcaggccgtggtcctggcccagtgcaacttctccctcgggcagatggtgcttgcgggactcgcctacggtttccgcaactggaggctccttcagatcaccggcactgcgcctggcttactgctcttcttctacttctgggctctgccagaatctgcacgttggctcctgacccgtgggaggatggacgaggcgatacaactgatccagaaggcggcctcggtcaataggcggaaactctccccggagctcatgaaccagctggtcccagagaagacaggcccctcagggaatgccctggatctgttcagacacccccagctccggaaggtgaccctgattatcttctgtgtctggtttgtggacagtctggggtactacggcctgagcctccaagtgggggacttcggcctggacgtctatctgacgcagctcatctttggagctgttgaggtgcctgcccgctgttccagcatcttcatgatgcagaggtttggccgcaagtggagccagttggggaccttggtcttgggtggcctgatgtgtatcatcatcatcttcatcccagcagatctgcccgtggtggtcaccatgctggctgtggtggggaagatggccacagctgctgcctttaccatctcctatgtgtactctgccgagcttttccccaccatcctccggcagacaggcatggggctggtgggcatcttctcacggatcgggggcatcctcacaccacttgtgatcctgctgggagagtaccacgctgccctccccatgctcatctacggcagcctccccatcgtggccggcctgctgtgcaccctgctgccagagacgcatggccagggcctgaaagacaccctccaggacctggagctggggcctcacccacggtcccccaaatcagtgccctcagagaaggaaacagaggccaagggaagaacttccagcccgggagtggcctttgtgagcagcacatacttctgattgaggtctctaagagctggaccatcagcagcagggagctgcctaaacacctccttggatatggccaggacccacagggacacagggcaagaccagccttgcttatggaggcaggacaccacaatctggcccatggctgtcacctcctgccgagtccaatcccagactgggaaccaccatctgagacaggacctcccggcctccttcacctttctcatctccagagccctgcccccaatactctgtctgggttaggatcttgggtatgtcttggaattaacttgtcctctaacaatcttcatggggtatggctctcttgatctcctcaatctggagtcccctgccctcaaaacacagtgatgttcagaacagaacacaaggtaagccctttccaatttgtgggaacaggaggggagaggaaacaaatgtgaagttgtggactctacccaggcaggtggatgaaaatgctgtggataaaaggaaggttatgattccttctagcggatggaccagattcctctggctaacgtatggccccataggtcactgggtcatacagagagaagattcagttcagcctaaatcaaaacttccaccttgtgttcacttcaaagatggcccaacccccgccctacactcagctcatgcctaacctatgtgtggctcagggaccagcttggggaaggaaaggaggtttgttctgctccccgcctcaccccgcctcctcctgctcatgctcagctgcttctggaccttccagggcccatgcagggtgagggaaagggtagaggtcttttcaccgagctgctgctggttgcagttctttctggtgcacattggctaatgccagttggtgtgttttgtcaggcttctgaaagctgccttttccacgggccatcttcttgggcttctcagagatcttctcaggccttggtattgttccttagaatgagcaatatgctcccaatgcactcccagctcctcttgggacccttctccagccccacccagcattgctcctacaacctgtcctacagctggcagcccctgacccaaccaagatggccttcttggctgggcgtggtggttcatgcctgtaatcccagcactttgggaggctgaggcgggcggattacctgaggtcaggaatttgagaccagcctggctggcatggcaaaaccctgtctctact

SEQ ID NO: 3689 - protein, 551 aa, Homo sapiens; identical to SEQ ID NO: 353

SEQ ID NO: 3690 - DNA, 603 bp, Homo sapiens
gcagacaggcatggggctggtgggcatcttctcacggatcgggggcatcctcacaccacttgtgatcctgctgggagagtaccacgctgccctccccatgctcatctacggcagcctccccatcgtggccggcctgctgtgcaccctgctgccagagacgcatggccagggcctgaaagacaccctccaggacctggagctggggcctcacccacggtcccccaaatcagtgccctcagagaaggaaacagaggccaagggaagaacttccagcccgggagtggcctttgtgagcagcacatacttctgattgaggtctctaagagctggaccatcagcagcagggagctgcctaaacacctccttggatatggccaggacccacagggacacagggcaagaccagccttgcttatggaggcaggacaccacaatctggcccatggctgtcacctcctgccgagtccaatcccagactgggaaccaccatctgagacaggacctcccggcctccttcacctttctcatctccagagccctgcccccaatactctgtctgggttaggatcttgggtatgtcttggaattaacttgtcctctaac

SEQ ID NO: 3691 - protein, 99 aa, Homo sapiens [sequence omitted]

SEQ ID NO: 3692 - DNA, 562 bp, Homo sapiens
aaaggttctgcttccaagggtctggctgggcctggattgtggtcagatggcaggagaggagaacttcaaggaagagctcagatcccaggatgcttccaggaacttgaaccagcatgaggtagcaggacatccacattcctggtctctggagatgctgttacgcagattgagggctgtccacaccaagcaggatgacaagtttgccaacctcctggatgcggtgggggagtttggcacattccagcagaggctagtagccctcacctttatccccagcatcatgtcggccttcttcatgtttgctgaccacttcgtgttcacagcccagaagccctattgcaataccagctggatcctggcagtgggcccccacctgtccaaagctgagcagctgaatctgaccataccccaagcacccaatggcagtttcctgacatgcttcatgtaccttcctgtgccttggaatctggattctatcatccagtttggcctcaatgacacagacacatgccaagatgggtggatctatcctgacgctaagaagcgatcgctgatcaatgag

SEQ ID NO: 3693 - protein, 171 aa, Homo sapiens
MAGEENFKEELRSQDASRNLNQHEVAGHPHSWSLEMLLRRLRAVHTKQDDKFANLLDAVGEFGTFQQRLVALTFIPSIMSAFFMFADHFVFTAQKPYCNTSWILAVGPHLSKAEQLNLTIPQAPNGSFLTCFMYLPVPWNLDSIIQFGLNDTDTCQDGWIYPDAKKRSLIN

SEQ ID NO: 3694 - DNA, 523 bp, Homo sapiens
aaaggttctgcttccaagggtctggctgggcctggattgtggtcagcccagaagccctattgcaataccagctggatcctggcagtgggcccccacctgtccaaagctgagcagctgaatctgaccataccccaagcacccaatggcagtttcctgacatgcttcatgtaccttcctgtgccttggaatctggattctatcatccagtttggcctcaatgacacagacacatgccaagatgggtggatctatcctgacgctaagaagcgatcgctgatcaatgagtttgacttggtatgtggcatggagacgaagaaggacactgcacagatcatgttcatggcagggctcccgataggctctctcatcttcaggctcataactgacaagatgggccgctaccctgccatcctgctgtcactgctggggctgatcatcttcggctttgggacagccttcatgaacagctttcacctgtatttgttctttcgctttggcatctcgcagtcagtggtgggctacg

SEQ ID NO: 3695 - protein, 118 aa, Homo sapiens
MYLPVPWNLDSIIQFGLNDTDTCQDGWIYPDAKKRSLINEFDLVCGMETKKDTAQIMFMAGLPIGSLIFRLITDKMGRYPAILLSLLGLIIFGFGTAFMNSFHLYLFFRFGISQSVVG

SEQ ID NO: 3696 - DNA, 2277 bp, Homo sapiens
tttgtatctgacagtttcaacatctgcagtctaaaagtctgtggtttctggattctgtcgacttgtagagtggcttgccttctcaagctataatctctttgcttgatgtacctctgtgagagtcttgcagaatcaacttgaagaaattttcctttagagaaggctcgcttctgcctctgctctgagccaaggggtgccccgcaccaggaactgttaccccttctgagagttttggctcaaaacagagttttaagcttagtttcccctccttgctgctgttgcaaggtaatatgctgacagtcagtactgctcaccttcctccttccccactcctgcctttccagtttggctccatgctgcactgcctcaccactgcaccagccttggtgccccatctctgtggcccaggcttccagcctcccaccttgggcccacctcctggctacagccgacgatgcagatctttgtttgtttttgaagaaaaggtccctagagacctctcctaccttttgcaagaccactggtgtctcagtgtgtgtgtaaacaaaaagcttgagttgtggggaagttgtaggagagttcctaagaacttagtccttcatgacaacagaagcacagcattttctaaaacattaaaaatctcaattacactaaaactccaggatggttgggccaggggggaataaatcatgttaactaagaaagcaagggagggaactactgagaacgtcaaggttggaatccatattgcttcaagccagaggccagttcctagtcggtggctcccatgctggtctctgatgtttaggaagtggtgtcagcagagactgagctgcaccctttctttggacagatggcaggagaggagaacttcaaggaagagctcagatcccaggatgcttccaggaacttgaaccagcatgaggtagcaggacatccacattcctggtctctggagatgctgttacgcagattgagggctgtccacaccaagcaggatgacaagtttgccaacctcctggatgcggtgggggagtttggcacattccagcagaggctagtagccctcacctttatccccagcatcatgtcggccttcttcatgtttgctgaccacttcgtgttcacagcccagaagccctattgcaataccagctggatcctggcagtgggcccccacctgtccaaagctgagcagctgaatctgaccataccccaagcacccaatggcagtttcctgacatgcttcatgtaccttcctgtgccttggaatctggattctatcatccagtttggcctcaatgacacagacacatgccaagatgggtggatctatcctgacgctaagaagcgatcgctgatcaatgagtttgacttggtatgtggcatggagacgaagaaggacactgcacagatcatgttcatggcagggctcccgataggctctctcatcttcaggctcataactgacaagtgagtccccgggagtttctgctggtccccgagccatcccaactcctcctcatgggcattcagggttggagtgtgtcaggctgagggaggtgagggtaggggttctccagggacccatggatggctcagggcctggcccaggtgtatccggctggggccagcccgggagatcccggcacttggtgcagcctccctttgacacctgtaggatgggccgctaccctgccatcctgctgtcactgctggggctgatcatcttcggctttgggacagccttcatgaacagctttcacctgtatttgttctttcgctttggcatctcgcagtcagtggtgggctacgccatcagcagcatttctttgggtgagactgggcctcaatggggcagggcagggtggcacaggggcatggcggcataggcgggtgacaaggggacatagtggcagggggcgtggcggcataggcagatggcaagggggcgtggtgtagctgtaagagggcatggcgggggtgtggcagcgtgggcatctgctgggatcccacaggacacagagtcaggggcctaattggacaggcagaagtggaagggatctccgttcctggctgcctggagatgtcagagaatcagtgccctgactgcccttccaccttcatcctccttcctaactccctcatacaccacaccttccaccgcatactctttgcatacccccaagccccatgggttacatttactgagcccttaagaaaggccaggcaaaagaaaaaacaacaaaaaacagaagaagaaggaggaggaggagg

SEQ ID NO: 3697 - protein, 207 aa, Homo sapiens
MAGEENFKEELRSQDASRNLNQHEVAGHPHSWSLEMLLRRLRAVHTKQDDKFANLLDAVGEFGTFQQRLVALTFIPSIMSAFFMFADHFVFTAQKPYCNTSWILAVGPHLSKAEQLNLTIPQAPNGSFLTCFMYLPVPWNLDSIIQFGLNDTDTCQDGWIYPDAKKRSLINEFDLVCGMETKKDTAQIMFMAGLPIGSLIFRLITDK

SEQ ID NO: 3698 - DNA, 2201 bp, Homo sapiens
ggccagttcctagtcggtggctcccatgctggtctctgatgtttaggaagtggtgtcagcagagactgagctgcaccctttctttggacagatggcaggagaggagaacttcaaggaagagctcagatcccaggatgcttccaggaacttgaaccagcatgaggtagcaggacatccacattcctggtctctggagatgctgttacgcagattgagggctgtccacaccaagcaggatgacaagtttgccaacctcctggatgcggtgggggagtttggcacattccagcagaggctagtagccctcacctttatccccagcatcatgtcggccttcttcatgtttgctgaccacttcgtgttcacagcccagaagccctattgcaataccagctggatcctggcagtgggcccccacctgtccaaagctgagcagctgaatctgaccataccccaagcacccaatggcagtttcctgacatgcttcatgtaccttcctgtgccttggaatctggattctatcatccagtttggcctcaatgacacagacacatgccaagatgggtggatctatcctgacgctaagaagcgatcgctgatcaatgagtttgacttggtatgtggcatggagacgaagaaggacactgcacagatcatgttcatggcagggctcccgataggctctctcatcttcaggctcataactgacaagatgggccgctaccctgccatcctgctgtcactgctggggctgatcatcttcggctttgggacagccttcatgaacagctttcacctgtatttgttctttcgctttggcatctcgcagtcagtggtgggctacgccatcagcagcatttctttggccactgagtggttagtgggtgagcaccgggcccatgccattatcctgggacactgctttttcgctgttggggccgtgttgctgacagggatcgcctacagtcttccccactggcagctgctgtttctggtgggtgggatacttgtgatccccttcatctcctatatctggattctcccggagtccccgcggtggctgatgatgaaagggaaggtgaaggaggccaagcaggtgctgtgctacgccgcaagtgtgaacaagaagaccattccttcaaatctgctggacgagctgcagctgcccagaaagaaggtgactcgggcctctgtcctggacttctgtaagaataggcagctctgcaaggtgaccttggtgatgagctgtgtgtggtttaccgtcagttacacctattttacgttgagcctgagaatgagagagctgggcgtgagcgtccacttcagacacgtggtccccagcatcatggaggtgcctgcccggctgtgctgcatctttctcctccagcagattgggaggaagtggagcctggctgtgactctcctccaagccatcatctggtgcttgcttctccttttcctccctgaaggggaggatggcctcagactcaagtggccacgttgtccggccacagagctgaaatccatgacgatcttggtgctcatgctcagagagttcagcctggccgccactgtcactgtgttcttcctctacaccgctgagctcctccccactgtgctcagggcgacaggtctggggctggtgtctctggcctcggtggctggagccatcttgtccctgacaatcatcagccagaccccctccctcctgcccatctttctctgctgcgtcttagccatcgtggccttttccctctcctccctgctgccggaaacgcgagatcagcccctctccgagagcctgaaccactcctcacagataaggaataaggtcaaggacatgaagactaaggaaacatcatctgatgatgtctgaggaagcggccaagaatgtcattctcaatgcccagatcctgagattggacccataccctgtctccaaccctgccttgaagcaattcaataaagaggaagcaaacagccaggctccctgagggccaggcccccagaccatcttgggttggaattgagtggccaagtatggggtcatggattccaggccacaaattccaggcctagttcagtctgggggcagggtcagtccttctcccaggccagcccttgacattaaaaaaaatgccccctccttctgcaggagctctgctgtgattcattccaataaaggtacaatgttggtcttg

SEQ ID NO: 3699 - protein, 594 aa, Homo sapiens; identical to SEQ ID NO: 355

SEQ ID NO: 3700 - DNA, 387 bp, Homo sapiens
atgtccacatctgctcaggtgaatgtatccttctcgctctccctggagctgctctcctatcagaagctcccagccaaccagatgctgcctggggtggacattcagcagagcgcgagtggagagagagagatggtgtttactcagaacctgctcctggagcacaccaaccagaccaaggtgctgctcctgcaggccatagtgaccgtgcctgagctgcagctctccaccagctgggtggactttaggacctgctttgtgagccagcaacgagtctgggaggtctacctaatgcacctgagcagctgccgaagttactgggccacagaaactggagagaagatgacgccccaggaagggtcttgtcttagtccattttctgttgcttag

SEQ ID NO: 3701 - protein, 128 aa, Homo sapiens
MSTSAQVNVSFSLSLELLSYQKLPANQMLPGVDIQQSASGEREMVFTQNLLLEHTNQTKVLLLQAIVTVPELQLSTSWVDFRTCFVSQQRVWEVYLMHLSSCRSYWATETGEKMTPQEGSCLSPFSVA

SEQ ID NO: 3702 - DNA, 2391 bp, Homo sapiens
cagtccggccgggcggagctaggggcgggcccctgcgtctctgggcgctggagcgcggcgactatcacgccgcgtggcggacggacggactgacggacgcgcagccttacccgaaaggccatggcggagcacgcccctcgccgctgctgcctgggctgggacttcagcacgcagcaggtaaaggttgttgctgttgatgcagagttgaatgtcttctatgaggaaagtgtgcattttgacagagatcttccagaatttgggactcagggtggtgttcatgtgcacaaggatgggctgacggtcacttctccagtactaatgtgggtccaggcactggatatcatcttggagaagatgaaggcttcgggcttcgacttctctcaagtcctagccttgtccggggcgggccagcaacacggaagtatatactggaaggctggagcccagcaggcactgacaagcttatcaccagacctccggctacaccagcagctgcaggactgtttctccatcagcgactgcccggtgtggatggactccagcaccacagcccagtgccgccagctggaggctgctgtgggtggtgctcaggctctcagctgcctcacggggtcccgtgcctatgagcgttttacagggaaccaaattgcaaaaatttaccagcagaaccccgaggcctactcacatacggagagaatttctttggtcagtagctttgctgcttccctgttccttggctcttactcccctattgactacagtgatggttctggaatgaatttgttgcagatacaggataaagtctggtcccaggcttgccttggtgcctgtgcacctcatttagaggagaagcttagcccaccagtaccatcatgctcagttgtgggagccatttcttcctactacgtccagcgctacggatttcctccaggatgcaaagtggtggccttcactggggacaacccagcgtcgctggcaggcatgagactggaggaaggtgacattgcggtcagcctgggcaccagtgacaccctgtttctctggctccaagagcccatgcctgccctggaaggccacatcttctgcaacccggttgactcccagcactacatggcactcctgtgctttaaaaatggctccctcatgagagagaagatccgcaacgagtctgtatcccgttcctggagcgatttctctaaggcactgcagtccacagagatgggcaacggtggaaacctgggtttttattttgatgtaatggagatcacccctgaaattattggacgtcataggtttaacacagaaaaccacaaggttgcagcattccctggggatgtggaggttcgagcactaattgaaggacaattcatggccaagaggattcacgcagaaggcctgggctatcgagtcatgtccaagacaaagattttggccacaggaggagcatctcacaatagagaaatcttacaggtgcttgcagatgtgtttgatgccccggtgtatgttatagacactgccaactcggcctgtgtgggttctgcataccgagcttttcatggtcttgcaggtggaacagatgtgcccttttcagaggttgtgaagttagctccaaatcccagactagctgctaccccaagcccgggagcttctcaggtgagagaccatcggaatttgtttgtagcatttgcattatgaaagcccgctagggttttttcccccaccaaaaggtcacctacattgaacgtgatgtgctcaactaaaggagaaattctgctttattgaaattatcaagaaaatggagctaaagggccatgttgtcagctgcaagtcacagatactgctgattttacagccagggtcagatggattgctgggcatatttgtattgcttcttatgcctcacggtgggcccttccatgtcactgggctataaaagctactgaaaggatccatcactgaaattcaagacatgctgggtttctagcactgaaatctcaagtctagacccaagatagctgtgcagtcacccaggccaggaaatccctgtgaaggcagacctcacttgttgcaggttgggtccctcagaaagcagagtctgagatgtcaactaagatatatgaggtttatgggagtcgggggagttgctcttggaatccacaactgcagaaaggaaagggagtagacaggattggacagagggagaaggtgagcagcaatgcaatttctggagcctaagctattcctacagaaagctccgaagctgagatgacctttagagttttacccagttggtctaaggggctgggcctttataccccatgtcaatcagtcatcacatgtgggccaccccaggatggggtgaggcagctctttatagctaaagcagtctcc

SEQ ID NO: 3703 - protein, 524 aa, Homo sapiens
MAEHAPRRCCLGWDFSTQQVKVVAVDAELNVFYEESVHFDRDLPEFGTQGGVHVHKDGLTVTSPVLMWVQALDIILEKMKASGFDFSQVLALSGAGQQHGSIYWKAGAQQALTSLSPDLRLHQQLQDCFSISDCPVWMDSSTTAQCRQLEAAVGGAQALSCLTGSRAYERFTGNQIAKIYQQNPEAYSHTERISLVSSFAASLFLGSYSPIDYSDGSGMNLLQIQDKVWSQACLGACAPHLEEKLSPPVPSCSVVGAISSYYVQRYGFPPGCKVVAFTGDNPASLAGMRLEEGDIAVSLGTSDTLFLWLQEPMPALEGHIFCNPVDSQHYMALLCFKNGSLMREKIRNESVSRSWSDFSKALQSTEMGNGGNLGFYFDVMEITPEIIGRHRFNTENHKVAAFPGDVEVRALIEGQFMAKRIHAEGLGYRVMSKTKILATGGASHNREILQVLADVFDAPVYVIDTANSACVGSAYRAFHGLAGGTDVPFSEVVKLAPNPRLAATPSPGASQVRDHRNLFVAFAL

SEQ ID NO: 3704 - DNA, 2877 bp, Homo sapiens
cagtccggccgggcggagctaggggcgggcccctgcgtctctgggcgctggagcgcggcgactatcacgccgcgtggcggacggacggactgacggacgcgcagccttacccgaaaggccatggcggagcacgcccctcgccgctgctgcctgggctgggacttcagcacgcagcaggtaaaggttgttgctgttgatgcagagttgaatgtcttctatgaggaaagtgtgcattttgacagagatcttccagaatttgggactcagggtggtgttcatgtgcacaaggatgggctgacggtcacttctccagtactaatgtgggtccaggcactggatatcatcttggagaagatgaaggcttcgggcttcgacttctctcaagtcctagccttgtccggggcgggccagcaacacggaagtatatactggaaggctggagcccagcaggcactgacaagcttatcaccagacctccggctacaccagcagctgcaggactgtttctccatcagcgactgcccggtgtggatggactccagcaccacagcccagtgccgccagctggaggctgctgtgggtggtgctcaggctctcagctgcctcacggggtcccgtgcctatgagcgttttacagggaaccaaattgcaaaaatttaccagcagaaccccgaggcctactcacatacggagagaatttctttggtcagtagctttgctgcttccctgttccttggctcttactcccctattgactacagtgatggttctggaatgaatttgttgcagatacaggataaagtctggtcccaggcttgccttggtgcctgtgcacctcatttagaggagaagcttagcccaccagtaccatcatgctcagttgtgggagccatttcttcctactacgtccagcgctacggatttcctccaggatgcaaagtggtggccttcactggggacaacccagcgtcgctggcaggcatgagactggaggaaggtgacattgcggtcagcctgggcaccagtgacaccctgtttctctggctccaagagcccatgcctgccctggaaggccacatcttctgcaacccggttgactcccagcactacatggcactcctgtgctttaaaaatggctccctcatgagagagaagatccgcaacgagtctgtatcccgttcctggagcgatttctctaaggcactgcagtccacagagatgggcaacggtggaaacctgggtttttattttgatgtaatggagatcacccctgaaattattggacgtcataggtttaacacagaaaaccacaaggttgcagcattccctggggatgtggaggttcgagcactaattgaaggacaattcatggccaagaggattcacgcagaaggcctgggctatcgagtcatgtccaagacaaagattttggccacaggaggagcatctcacaatagagaaatcttacaggtgcttgcagatgtgtttgatgccccggtgtatgttatagacactgccaactcggcctgtgtgggttctgcataccgagcttttcatggtcttgcaggtggaacagatgtgcccttttcagaggttgtgaagttagctccaaatcccagactagctgctaccccaagcccgggagcttctcaggtctacgaggcccttctcccccagtatgccaaactcgagcagagaatcttgtctcagacccgggggcctccggagtgaacaggcatccctgttgcccctgcctgcccagatttactgaccccatttgtcgacatggccccagacaggagggatccacttctctgttctgaacagctcttcctgcccctactgactccttggagtgtccaggaccatcttaaagccgccctcagcacatctgcatgaagatagataggcactcctgtccctgtgcccgtgtgccccagggcaggaaagcatctctcttttcctgtcttttatcccaggaggcaggacaacactgagactgggatatgtccaataaaaactatgacttttccccttgcagaggcagaattaaagctaatctagggactcaaatcagcagaatgggggagacaaagcccggtctcaccccctaacctcatcctatctctttctccaaccctgactgcccactcctccacaaaccgtgacccatagccgcccccaccccataccttgatctaccatccatcctcttccccaatccaaaccccacagtctcttctctcccacaccctgccctccttgtttcagctgtctgaggtgcctcgcagggaaactcacttggcataattcacaacctcccacccaaacaatgggcctggtggacgtgcttcctgtgccctccctttagctatgcccacagatcactgagagggaccatctcccaagtggtgcagtttagaacttctctccctttttctccctcattccctctctcttcttgcagtccacttgctgaagaagttgtgtcatttctctggaagaatttccaaaattctggatttcttttttattttggagtatttcatcagctgaaaagtgattctcactttgagttttcttcctatatttgtatagtgagttcctttttccttcctctttatccctcctgttttactttatacctctctattccttgctcaaattattgcaaaagcctctatagaaagtcctctgtgatctgactcctgcagactcttccagatttttctgcccaaggcctttactgagctcaggactccagctaaatcaaaatacgcatgttctcacccagagtgacaaaatcctgcagataggtttaagattactttttaaagacattttacattattgtccagcagaaaaaggctgtcttgg

SEQ ID NO: 3705 - protein, 536 aa, Homo sapiens; identical to SEQ ID NO: 359

SEQ ID NO: 3706 - DNA, 1665 bp, Homo sapiens
ggcggagctaggggcgggcccctgcgtctctgggcgctggagcgcggcgactatcacgccgcgtggcggacggacggactgacggacgcgcagccttacccgaaaggccatggcggagcacgcccctcgccgctgctgcctgggctgggacttcagcacgcagcaggtaaaggttgttgctgttgatgcagagttgaatgtcttctatgaggaaagtgtgcattttgacagagatcttccagaatttggagcaaccttggaagcacatgtggaacatgacagagccaccatcaacctggttcctgaatgactgcatggagcagaactccccactccccactcatgttcctaaccacctactgattgtgctttacatgaggagaaagaaacttcagctgtatcaagccatagaaatgtgtttttccttaactaatataattttttccctcatatcctttttttaaagaaaatactggggccaggtgtggtcgctcacgcctgtaatcccagcactttgggattacagaggcgggcacatcacgaggtcaggagatcgagaccatcctggctaatgcagtgaaaccccgtctctactaaaaatacaaaaatttagccaggcttggtgccgggcgcctgtagtcccagctactcgggaggctgaggcaggagaatggcgtgaacctgggaggcagagtttgtagtgagccgagataatgccactgcactccagcctgggtgacagagcaagactctgtctcaaaaaaaaaaaaaaaagaaagagaaaatactgtttctattgaaatgtaattcacataccataaaattcaccttttaaaatgtacaatttgatggttttagtatattcaaagaacaatatcactatcaccactatgtaatcttagaacattttcaccacctggaaaggaaaccctgtattaattagcatccactgtatagtccccctcctgccagtagtggcaaccacaatcaactctctatctctggatttgctgattctggacatttcgtagacatgaatatatataatatgtgacagccttcttttacttagcataatgctttctttttaaaaaattttcatagctttttgtttatttcaaataccaacttgaaccagatacctggcataatgttttcaaagttcatccatgtcatagcgtgtgtcagtacttcattcctttttgtggttcagtaatattccattgcattgatatatcagagtttgtttttccattcaacttttagacatttgagttgttctgcttttttgctattgtgagttattctgctatgaacatccacatatgttatggattgaattgtggccccccagaattcatatgttggaagcctaccctcatcatgacagtatatttggaggtgaggcctttaggtagataattaaggttaaatgaggttgtaagggtggggctctaatttgataggacctgtttccttataagaaggagagacaccagtgctatcccacttcatgcgcagatgcacagaggaaaggccttgtgagaaggcggctgtctgcaagctggaaagagagccctaaccagaaactgaatttgctggcaccttaattgtggacttctagcctccagaactgtgagaaaataaatgcctgttgtttaaacc

SEQ ID NO: 3707 - protein, 88 aa, Homo sapiens
MSSMRKVCILTEIFQNLEQPWKHMWNMTEPPSTWFLNDCMEQNSPLPTHVPNHLLIVLYMRRKKLQLYQAIEMCFSLTNIIFSLISFF

SEQ ID NO: 3708 - DNA, 2009 bp, Homo sapiens
ccctgcgtctctgggcgctggagcgcggcgactatcacgccgcgtggcggacggacggactgacggacgcgcagccttacccgaaaggccatggcggagcacgcccctcgccgctgctgcctgggctgggacttcagcacgcagcaggtaaaggttgttgctgttgatgcagagttgaatgtcttctatgaggaaagtgtgcattttgacagagatcttccagaatttgggactcagggtggtgttcatgtgcacaaggatgggctgacggtcacttctccagtactaatgtgggtccaggcactggatatcatcttggagaagatgaaggcttcgggcttcgacttctctcaagtcctagccttgtccggggcgggccagcaacacggaagtatatactggaaggctggagcccagcaggcactgacaagcttatcaccagacctccggctacaccagcagctgcaggactgtttctccatcagcgactgcccggtgtggatggactccagcaccacagcccagtgccgccagctggaggctgctgtgggtggtgctcaggctctcagctgcctcacggggtcccgtgcctatgagcgttttacagggaaccaaattgcaaaaatttaccagcagaaccccgaggcctactcacatacggagagaatttctttggtcagtagctttgctgcttccctgttccttggctcttactcccctattgactacagtgatggttctggaatgaatttgttgcagatacaggataaagtctggtcccaggcttgccttggtgcctgtgcacctcatttagaggagaagcttagcccaccagtaccatcatgctcagttgtgggagccatttcttcctactacgtccagcgctacggatttcctccaggatgcaaagtggtggccttcactggggacaacccagcgtcgctggcaggcatgagactggaggaaggtgacattgcggtcagcctgggcaccagtgacaccctgtttctctggctccaagagcccatgcctgccctggaaggccacatcttctgcaacccggttgactcccagcactacatggcactcctgtgctttaaaaatggctccctcatgagagagaagatccgcaacgagtctgtatcccgttcctggagcgatttctctaaggcactgcagtccacagagatgggcaacggtggaaacctgggtttttattttgatgtaatggagatcacccctgaaattattggacgtcataggtttaacacagaaaaccacaaggttgcagcattccctggggatgtggaggttcgagcactaattgaaggacaattcatggccaagaggattcacgcagaaggcctgggctatcgagtcatgtccaagacaaagattttggccacaggaggagcatctcacaatagagaaatcttacaggtgcttgcagatgtgtttgatgccccggtgtatgttatagacactgccaactcggcctgtgtgggttctgcataccgagcttttcatggtcttgcaggtggaacagatgtgcccttttcagaggttgtgaagttagctccaaatcccagactagctgctaccccaagcccgggagcttctcaggtctacgaggcccttctcccccagtatgccaaactcgagcagagaatcttgtctcagacccgggggcctccggagtgaacaggcatccctgttgcccctgcctgcccagatttactgaccccatttgtcgacatggccccagacaggagggatccacttctctgttctgaacagctcttcctgcccctactgactccttggagtgtccaggaccatcttaaagccgccctcagcacatctgcatgaagatagataggcactcctgtccctgtgcccgtgtgccccagggcaggaaagcatctctcttttcctgtcttttatcccaggaggcaggacaacactgagactgggatatgtccaataaaaactatgacttttccccttgc

SEQ ID NO: 3709 - protein, 536 aa, Homo sapiens; identical to SEQ ID NO: 359

SEQ ID NO: 3710 - DNA, 661 bp, Homo sapiens
tggtgaatttcacaataaaaaacacgaagggatgcttcctagacctacaaagggggagacagtgcacggataccacaaacttcacgtgcactgataggacaataaacaaatgctaaatgaagaaatcaaatcaagcatcaacacctaggagactctaagcaggatacactggcacctggcaagatacagtcatcaacacctagaaggacacgtgggtcaggagttcctaaatgacagcccttgatcctgattggttcacaggaatgattggtttgaccaacaacgatttttaaaggatgaatattgatgcctttcaatggagcatgtctatggggcctggttccattagagcacccctctccccaacttcctattcaccgcatcactcacatttacatatcccacgagaccatcaaaggcatttgattttgtgaatataaatttattatgcctgcctgagaacagaagtaataagaatgttttctaccttttcattttacctccactatagctcccaagagatgttacatggacaagaagggcacaaagaagtttatacttcctgctctagattaattgtatcccgatacaacacaggaaggacatgggcttgaaatgaacagacttgggcccagattctagctccatcatttgcttcttt

SEQ ID NO: 3711 - protein, 45 aa, Homo sapiens
MFSTFSFYLHYSSQEMLHGQEGHKEVYTSCSRLIVSRYNTGRTWA

SEQ ID NO: 3712 - DNA, 1254 bp, Homo sapiens
tgtctgctctgcaagacaatgagtcaagaagatacaggcaaagcaaagagaaggagggctctggtcttgtttctcgtccctaaaaggacacataaaaatgaactctgaatggctcaagaggattagggaaaataggacaattgagagaatccaaatgttgagagaatacgtgtccagagcttctggggaacatgatttcagcttcaagaaaggaaatgaggcctcctagcagaaagcaaagacatgagaagagaagggataatgaactgctgttgagtccctggttccaggtgaccttgcctgcctgtgatgtggttcttgtatgcagtgtttcctgagatcacctcccaaacaattgcatctggaatccttcactcatgtctacttctgggagaagcatctaagacagtcatggtccataaaacagcagcaacatgaacaaagacacagggctcaactgtaccaggcaaatgaagggagatggagagattgaagcaagagctaaaactatccaccagactgcagtccattgtgagtaggttgagaggaaattgagctgccaagacatatgaaactcctggtggagatttggaggaagatgaatggtacttaagtaacaagaagaccgtgaaatcaaaccattaaaagacaatttcaagactagtcacttccctcaccttctattcactgtgataaagcccccaaaagtcattggatgcttcctttgatgttgcttcagctggtgtgttgactttgttagcactctctattgggcatagaggtgctccttacaaatgctctctaggagtaaatgggcatgaggaggctccatcaccttcttcctattttctctgttgttttccagccttggggacaaagctgggattcttagggccgaagtcatcaaggttgcctgcaggtgtgcctagaagagatatggtttcagcaagccttcttctctctgatttctaaaaggttttttcatctaatctgaggtccctgtcactttctaccctacctcatcccagaattgaggtcagaatggacttgtgtgggattttggcccatgtagcagtgtgcctttaaatctggtgctggcagtggtagcggtgatggtgggtgtcacctaggatggcataaatttctccttctgtgcccaaagcccacctttccattctttagtttttagtttaaaatttaactctaatcatacaaattacaggaaagtacattcttcttgtgagaagttaaatc

SEQ ID NO: 3713 - protein, 56 aa, Homo sapiens
MQCFLRSPPKQLHLESFTHVYFWEKHLRQSWSIKQQQHEQRHRAQLYQANEGRWRD

SEQ ID NO: 3714 - DNA, 560 bp, Homo sapiens
agcaaagaatcaccccacacaaagatggcgcgtgcagaatttgtgaaagcgaaaaagaagacgaaggagaagcaaagagggacggaatactgcagtgctagggtgctggagtccagaaatgattttttcgatgaatttaggattttgccgcagtatacatctgcagtcccagaatcctccgggtatttgaagtataccatacaactgttttgaaaatccagcgtggacaatggctactcaaggctaccttttgctccattttctgctcactcctcctaatggcttggtgaaatagcaaacaagccaccagcaggaatctagtctggatgactgcttctggagcctggatgcagtaccattcttccactgattcactgatttgatggagttggacatggccatggaaccagacagaaaagcggctgttagtcactggcagcaacagtcttacctggactctggaatccattctggtgccactaccacagctccttctctgagtggtaaaggcaatcctgaggaagaggatgtggatacctcccaagtcctgtatgagtggg

SEQ ID NO: 3715 - protein, 62 aa, Homo sapiens
MARAEFVKAKKKTKEKQRGTEYCSARVLESRNDFFDEFRILPQYTSAVPESSGYLKYTIQLF

SEQ ID NO: 3716 - DNA, 916 bp, Homo sapiens
atgcttttcagtctgcacagcagggatgttcttaagaagttgccctctgcgaaatttcactaaatgggaaccgtggaccctgcatgatgggattataatcacaccagccactccttttacataattttttgtttaagatccagtaagactccctgtttttaatacatataaagcaacagacatgtatatgtcgataaactgagggtttgcgtccctattgcctggtgcaagctacagcaaaaaaccggtgatatcacatctacaaatctcaatggattcaaaaacaatatgaaaatttttagctgacaagaacatgtctgctgcctgcagtccctgcaatagctcaccatgttgcctactaaccaaaagatcaaaaattatcgatttcatggcgctgcgaggtctggaaagaaaagctactttaaaatttgcattgtttaagaaatgacttaaaagaaaagaatcatttttttttctgaatactttggaaggtgaaaatggcttgttttaatcttatccatgatttactataattctattatttttagcagctggagtccagaaatgattttttcgatgaatttaggattttgccgcagtatacatctgcagtcccagaatcctccgggtatttgaagtataccatacaactgttttgaaaatccagcgtggacaatggctactcaagctgatttgatggagttggacatggccatggaaccagacagaaaagcggctgttagtcactggcagcaacagtcttacctggactctggaatccattctggtgccactaccacagctccttctctgagtggtaaaggcaatcctgaggaagaggatgtggatacctcccaagtcctgtatgagtgggaacagggattttctcagtccttcactcaagaacaagtagctg

SEQ ID NO: 3717 - protein, 79 aa, Homo sapiens
MATQADLMELDMAMEPDRKAAVSHWQQQSYLDSGIHSGATTTAPSLSGKGNPEEEDVDTSQVLYEWEQGFSQSFTQEQV

SEQ ID NO: 3718 - DNA, 659 bp, Homo sapiens
aacgctccgcgctgcgccggtggcggcaggatacagcggcttctgcgcgacttataagagctccttgtgcggcgccattttaagcctctcggtctgtggcagcagcgttggcccggccccgggagcggagagcgaggggaggcggagacggaggaaggtctgaggagcagcttcagtccccgccgagccgccaccgcaggtcgaggacggtcggactcccgcggcgggaggagcctgttcccctgagggtatttgaagtataccatacaactgttttgaaaatccagcgtggacaatggctactcaagctgatttgatggagttggacatggccatggaaccagacagaaaagcggctgttagtcactggcagcaacagtcttacctggactctggaatccattctggtgccactaccacagctccttctctgagtggtaaaggcaatcctgaggaagaggatgtggatacctcccaagtcctgtatgagtgggaacagggattttctcagtccttcactcatcccactaatgtccagcgtttggctgaaccatcacagatgctgaaacatgcagttgtaaacttgattaactatcaagatgatgcagaacttgccacacgtgcaatccctgaactgacaaaactgctaaatgacgagg

SEQ ID NO: 3719 - protein, 120 aa, Homo sapiens
MATQADLMELDMAMEPDRKAAVSHWQQQSYLDSGIHSGATTTAPSLSGKGNPEEEDVDTSQVLYEWEQGFSQSFTHPTNVQRLAEPSQMLKHAVVNLINYQDDAELATRAIPELTKLLND

SEQ ID NO: 3720 - DNA, 3724 bp, Homo sapiens
aggatacagcggcttctgcgcgacttataagagctccttgtgcggcgccattttaagcctctcggtctgtggcagcagcgttggcccggccccgggagcggagagcgaggggaggcggagacggaggaaggtctgaggagcagcttcagtccccgccgagccgccaccgcaggtcgaggacggtcggactcccgcggcgggaggagcctgttcccctgagggtatttgaagtataccatacaactgttttgaaaatccagcgtggacaatggctactcaagctgatttgatggagttggacatggccatggaaccagacagaaaagcggctgttagtcactggcagcaacagtcttacctggactctggaatccattctggtgccactaccacagctccttctctgagtggtaaaggcaatcctgaggaagaggatgtggatacctcccaagtcctgtatgagtgggaacagggattttctcagtccttcactcaagaacaagtagctgatattgatggacagtatgcaatgactcgagctcagagggtacgagctgctatgttccctgagacattagatgagggcatgcagatcccatctacacagtttgatgctgctcatcccactaatgtccagcgtttggctgaaccatcacagatgctgaaacatgcagttgtaaacttgattaactatcaagatgatgcagaacttgccacacgtgcaatccctgaactgacaaaactgctaaatgacgaggaccaggtggtggttaataaggctgcagttatggtccatcagctttctaaaaaggaagcttccagacacgctatcatgcgttctcctcagatggtgtctgctattgtacgtaccatgcagaatacaaatgatgtagaaacagctcgttgtaccgctgggaccttgcataacctttcccatcatcgtgagggcttactggccatctttaagtctggaggcattcctgccctggtgaaaatgcttggttcaccagtggattctgtgttgttttatgccattacaactctccacaaccttttattacatcaagaaggagctaaaatggcagtgcgtttagctggtgggctgcagaaaatggttgccttgctcaacaaaacaaatgttaaattcttggctattacgacagactgccttcaaattttagcttatggcaaccaagaaagcaagctcatcatactggctagtggtggaccccaagctttagtaaatataatgaggacctatacttacgaaaaactactgtggaccacaagcagagtgctgaaggtgctatctgtctgctctagtaataagccggctattgtagaagctggtggaatgcaagctttaggacttcacctgacagatccaagtcaacgtcttgttcagaactgtctttggactctcaggaatctttcagatgctgcaactaaacaggaagggatggaaggtctccttgggactcttgttcagcttctgggttcagatgatataaatgtggtcacctgtgcagctggaattctttctaacctcacttgcaataattataagaacaagatgatggtctgccaagtgggtggtatagaggctcttgtgcgtactgtccttcgggctggtgacagggaagacatcactgagcctgccatctgtgctcttcgtcatctgaccagccgacaccaagaagcagagatggcccagaatgcagttcgccttcactatggactaccagttgtggttaagctcttacacccaccatcccactggcctctgataaaggctactgttggattgattcgaaatcttgccctttgtcccgcaaatcatgcacctttgcgtgagcagggtgccattccacgactagttcagttgcttgttcgtgcacatcaggatacccagcgccgtacgtccatgggtgggacacagcagcaatttgtggagggggtccgcatggaagaaatagttgaaggttgtaccggagcccttcacatcctagctcgggatgttcacaaccgaattgttatcagaggactaaataccattccattgtttgtgcagctgctttattctcccattgaaaacatccaaagagtagctgcaggggtcctctgtgaacttgctcaggacaaggaagctgcagaagctattgaagctgagggagccacagctcctctgacagagttacttcactctaggaatgaaggtgtggcgacatatgcagctgctgttttgttccgaatgtctgaggacaagccacaagattacaagaaacggctttcagttgagctgaccagctctctcttcagaacagagccaatggcttggaatgagactgctgatcttggacttgatattggtgcccagggagaaccccttggatatcgccaggatgatcctagctatcgttcttttcactctggtggatatggccaggatgccttgggtatggaccccatgatggaacatgagatgggtggccaccaccctggtgctgactatccagttgatgggctgccagatctggggcatgcccaggacctcatggatgggctgcctccaggtgacagcaatcagctggcctggtttgatactgacctgtaaatcatcctttaggtaagaagttttaaaaagccagtttgggtaaaatacttttactctgcctacagaacttcagaaagacttggttggtagggtgggagtggtttaggctatttgtaaatctgccacaaaaacaggtatatactttgaaaggagatgtcttggaacattggaatgttctcagatttctggttgttatgtgatcatgtgtggaagttattaactttaatgttttttgccacagcttttgcaacttaatactcaaatgagtaacatttgctgttttaaacattaatagcagcctttctctctttatacagctgtattgtctgaacttgcattgtgattggcctgtagagttgctgagagggctcgaggggtgggctggtatctcagaaagtgcctgacacactaaccaagctgagtttcctatgggaacaattgaagtaaactttttgttctggtcctttttggtcgaggagtaacaatacaaatggattttgggagtgactcaagaagtgaagaatgcacaagaatggatcacaagatggaatttatcaaaccctagccttgcttgttaaatttttttttttttttttttaagaatatctgtaatggtactgactttgcttgctttgaagtagctctttttttttttttttttttttttttgcagtaactgttttttaagtctctcgtagtgttaagttatagtgaatactgctacagcaatttctaatttttaagaattgagtaatggtgtagaacactaattcataatcactctaattaattgtaatctgaataaagtgtaacaattgtgtagcctttttgtataaaatagacaaatagaaaatggtccaattagtttcctttttaatatgcttaaaataagcaggtggatctatttcatgtttttgatcaaaaactatttgggatatgtatgggtagggtaaatcagtaagaggtgttatttggaaccttgttttggacagtttaccagttgccttttatcccaaagttgttgtaacctgctgtgatacgatgcttcaagagaaaatgcggttataaaaaatggttcagaattaaacttttaattcattcgattgtgtc

SEQ ID NO: 3721 - protein, 781 aa, Homo sapiens; identical to SEQ ID NO: 361

SEQ ID NO: 3722 - DNA, 3260 bp, Homo sapiens
aggatacagcggcttctgcgcgacttataagagctccttgtgcggcgccattttaagcctctcggtctgtggcagcagcgttggcccggccccgggagcggagagcgaggggaggcggagacggaggaaggtctgaggagcagcttcagtccccgccgagccgccaccgcaggtcgaggacggtcggactcccgcggcgggaggagcctgttcccctgagggtatttgaagtataccatacaactgttttgaaaatccagcgtggacaatggctactcaagctgatttgatggagttggacatggccatggaaccagacagaaaagcggctgttagtcactggcagcaacagtcttacctggactctggaatccattctggtgccactaccacagctccttctctgagtggtaaaggcaatcctgaggaagaggatgtggatacctcccaagtcctgtatgagtgggaacagggattttctcagtccttcactcaagaacaagtagctgatattgatggacagtatgcaatgactcgagctcagagggtacgagctgctatgttccctgagacattagatgagggcatgcagatcccatctacacagtttgatgctgctcatcccactaatgtccagcgtttggctgaaccatcacagatgctgaaacatgcagttgtaaacttgattaactatcaagatgatgcagaacttgccacacgtgcaatccctgaactgacaaaactgctaaatgacgaggaccaggtggtggttaataaggctgcagttatggtccatcagctttctaaaaaggaagcttccagacacgctatcatgcgttctcctcagatggtgtctgctattgtacgtaccatgcagaatacaaatgatgtagaaacagctcgttgtaccgctgggaccttgcataacctttcccatcatcgtgagggcttactggccatctttaagtctggaggcattcctgccctggtgaaaatgcttggttcaccagtggattctgtgttgttttatgccattacaactctccacaaccttttattacatcaagaaggagctaaaatggcagtgcgtttagctggtgggctgcagaaaatggttgccttgctcaacaaaacaaatgttaaattcttggctattacgacagactgccttcaaattttagcttatggcaaccaagaaagcaagctcatcatactggctagtggtggaccccaagctttagtaaatataatgaggacctatacttacgaaaaactactgtggaccacaagcagagtgctgaaggtgctatctgtctgctctagtaataagccggctattgtagaagctggtggaatgcaagctttaggacttcacctgacagatccaagtcaacgtcttgttcagaactgtctttggactctcaggaatctttcagatgctgcaactaaacaggaagggatggaaggtctccttgggactcttgttcagcttctgggttcagatgatataaatgtggtcacctgtgcagctggaattctttctaacctcacttgcaataattataagaacaagatgatggtctgccaagtgggtggtatagaggctcttgtgcgtactgtccttcgggctggtgacagggaagacatcactgagcctgccatctgtgctcttcgtcatctgaccagccgacaccaagaagcagagatggcccagaatgcagttcgccttcactatggactaccagttgtggttaagctcttacacccaccatcccactggcctctgataaaggctactgttggattgattcgaaatcttgccctttgtcccgcaaatcatgcacctttgcgtgagcagggtgccattccacgactagttcagttgcttgttcgtgcacatcaggatacccagcgccgtacgtccatgggtgggacacagcagcaatttgtggagggggtccgcatggaagaaatagttgaaggttgtaccggagcccttcacatcctagctcgggatgttcacaaccgaattgttatcagaggactaaataccattccattgtttgtgcagctgctttattctcccattgaaaacatccaaagagtagctgcaggggtcctctgtgaacttgctcaggacaaggaagctgcagaagctattgaagctgagggagccacagctcctctgacagagttacttcactctaggaatgaaggtgtggcgacatatgcagctgctgttttgttccgaatgtctgaggacaagccacaagattacaagaaacggctttcagttgagctgaccagctctctcttcagaacagagccaatggcttggaatgagactgctgatcttggacttgatattggtgcccagggagaaccccttggatatcgccaggatgatcctagctatcgttcttttcactctggtggatatggccaggatgccttgggtatggaccccatgatggaacatgagatgggtggccaccaccctggtgctgactatccagttgatgggctgccagatctggggcatgcccaggacctcatggatgggctgcctccaggtgacagcaatcagctggcctggtttgatactgacctgtaaatcatcctttaggagtaacaatacaaatggattttgggagtgactcaagaagtgaagaatgcacaagaatggatcacaagatggaatttatcaaaccctagccttgcttgttaaatttttttttttttttttttaagaatatctgtaatggtactgactttgcttgctttgaagtagctctttttttttttttttttttttttttgcagtaactgttttttaagtctctcgtagtgttaagttatagtgaatactgctacagcaatttctaatttttaagaattgagtaatggtgtagaacactaattcataatcactctaattaattgtaatctgaataaagtgtaacaattgtgtagcctttttgtataaaatagacaaatagaaaatggtccaattagtttcctttttaatatgcttaaaataagcaggtggatctatttcatgtttttgatcaaaaactatttgggatatgtatgggtagggtaaatcagtaagaggtgttatttggaaccttgttttggacagtttaccagttgccttttatcccaaagttgttgtaacctgctgtgatacgatgcttcaagagaaaatgcggttataaaaaatggttcagaattaaacttttaattcattcgattgtgtc

SEQ ID NO: 3723 - protein, 781 aa, Homo sapiens; identical to SEQ ID NO: 361

SEQ ID NO: 3724 - DNA, 3419 bp, Homo sapiens
aggatacagcggcttctgcgcgacttataagagctccttgtgcggcgccattttaagcctctcggtctgtggcagcagcgttggcccggccccgggagcggagagcgaggggaggcggagacggaggaaggtctgaggagcagcttcagtccccgccgagccgccaccgcaggtcgaggacggtcggactcccgcggcgggaggagcctgttcccctgagggtatttgaagtataccatacaactgttttgaaaatccagcgtggacaatggctactcaagctgatttgatggagttggacatggccatggaaccagacagaaaagcggctgttagtcactggcagcaacagtcttacctggactctggaatccattctggtgccactaccacagctccttctctgagtggtaaaggcaatcctgaggaagaggatgtggatacctcccaagtcctgtatgagtgggaacagggattttctcagtccttcactcaagaacaagtagctgatattgatggacagtatgcaatgactcgagctcagagggtacgagctgctatgttccctgagacattagatgagggcatgcagatcccatctacacagtttgatgctgctcatcccactaatgtccagcgtttggctgaaccatcacagatgctgaaacatgcagttgtaaacttgattaactatcaagatgatgcagaacttgccacacgtgcaatccctgaactgacaaaactgctaaatgacgaggaccaggtggtggttaataaggctgcagttatggtccatcagctttctaaaaaggaagcttccagacacgctatcatgcgttctcctcagatggtgtctgctattgtacgtaccatgcagaatacaaatgatgtagaaacagctcgttgtaccgctgggaccttgcataacctttcccatcatcgtgagggcttactggccatctttaagtctggaggcattcctgccctggtgaaaatgcttggttcaccagtggattctgtgttgttttatgccattacaactctccacaaccttttattacatcaagaaggagctaaaatggcagtgcgtttagctggtgggctgcagaaaatggttgccttgctcaacaaaacaaatgttaaattcttggctattacgacagactgccttcaaattttagcttatggcaaccaagaaagcaagctcatcatactggctagtggtggaccccaagctttagtaaatataatgaggacctatacttacgaaaaactactgtggaccacaagcagagtgctgaaggtgctatctgtctgctctagtaataagccggctattgtagaagctggtggaatgcaagctttaggacttcacctgacagatccaagtcaacgtcttgttcagaactgtctttggactctcaggaatctttcagatgctgcaactaaacaggaagggatggaaggtctccttgggactcttgttcagcttctgggttcagatgatataaatgtggtcacctgtgcagctggaattctttctaacctcacttgcaataattataagaacaagatgatggtctgccaagtgggtggtatagaggctcttgtgcgtactgtccttcgggctggtgacagggaagacatcactgagcctgccatctgtgctcttcgtcatctgaccagccgacaccaagaagcagagatggcccagaatgcagttcgccttcactatggactaccagttgtggttaagctcttacacccaccatcccactggcctctgataaaggctactgttggattgattcgaaatcttgccctttgtcccgcaaatcatgcacctttgcgtgagcagggtgccattccacgactagttcagttgcttgttcgtgcacatcaggatacccagcgccgtacgtccatgggtgggacacagcagcaatttgtggagggggtccgcatggaagaaatagttgaaggttgtaccggagcccttcacatcctagctcgggatgttcacaaccgaattgttatcagaggactaaataccattccattgtttgtgcagctgctttattctcccattgaaaacatccaaagagtagctgcaggggtcctctgtgaacttgctcaggacaaggaagctgcagaagctattgaagctgagggagccacagctcctctgacagagttacttcactctaggaatgaaggtgtggcgacatatgcagctgctgttttgttccgaatgtctgaggacaagccacaagattacaagaaacggctttcagttgagctgaccagctctctcttcagaacagagccaatggcttggaatgagactgctgatcttggacttgatattggtgcccagggagaaccccttggatatcgccaggatgatcctagctatcgttcttttcactctggtggatatggccaggatgccttgggtatggaccccatgatggaacatgagatgggtggccaccaccctggtgctgactatccagttgatgggctgccagatctggggcatgcccaggacctcatggatgggctgcctccaggtgacagcaatcagctggcctggtttgatactgacctgtaaatcatcctttagctgtattgtctgaacttgcattgtgattggcctgtagagttgctgagagggctcgaggggtgggctggtatctcagaaagtgcctgacacactaaccaagctgagtttcctatgggaacaattgaagtaaactttttgttctggtcctttttggtcgaggagtaacaatacaaatggattttgggagtgactcaagaagtgaagaatgcacaagaatggatcacaagatggaatttatcaaaccctagccttgcttgttaaatttttttttttttttttttaagaatatctgtaatggtactgactttgcttgctttgaagtagctctttttttttttttttttttttttttgcagtaactgttttttaagtctctcgtagtgttaagttatagtgaatactgctacagcaatttctaatttttaagaattgagtaatggtgtagaacactaattcataatcactctaattaattgtaatctgaataaagtgtaacaattgtgtagcctttttgtataaaatagacaaatagaaaatggtccaattagtttcctttttaatatgcttaaaataagcaggtggatctatttcatgtttttgatcaaaaactatttgggatatgtatgggtagggtaaatcagtaagaggtgttatttggaaccttgttttggacagtttaccagttgccttttatcccaaagttgttgtaacctgctgtgatacgatgcttcaagagaaaatgcggttataaaaaatggttcagaattaaacttttaattcattcgattgtgtc

SEQ ID NO: 3725 - protein, 781 aa, Homo sapiens; identical to SEQ ID NO: 361

SEQ ID NO: 3726 - DNA, 586 bp, Homo sapiens
gacttataagagctccttgtgcggcgccattttaagcctctcggtctgtggcagcagcgttggcccggccccgggagcggagagcgaggggaggcggagacggaggaaggtctgaggagcagcttcagtccccgccgagccgccaccgcaggtcgaggacggtcggactcccgcggcgggaggagcctgttcccctgagggtatttgaagtataccatacaactgttttgaaaatccagcgtggacaatggctactcaagctgatttgatggagttggacatggccatggaaccagacagaaaagcggctgttagtcactggcagcaacagtcttacctggactctggaatccattctggtgccactaccacagctccttctctgagtggtaaaggcaatcctgaggaagaggatgtggatacctcccaagtcctgtatgagtgggaacagggattttctcagtccttcactcaagaacaagtagctgatgctgaaacatgcagttgtaaacttgattaactatcaagatgatgcagaacttgccacacgtgcaatccctgaactgacaaaactgctaaatgacga

SEQ ID NO: 3727 - protein, 90 aa, Homo sapiens [sequence omitted]

SEQ ID NO: 3728 - DNA, 527 bp, Homo sapiens
agttggggttcgggcgctgaggcagagacgccaccctaagtcccatcagtcctggggatcggaccagtggactttctcttaagatttcctctttcattcttaagaatagaagtgttattattttttttaatgccctggctatgtgagtttgaatcgaagcaactttaaaccttagagcaactaaactctaagtgcagcgggtgcgatgcgtcagtagggtgagcacataaaaaatccatgtcttgcacctgtattttagcgtactatgcagggtatttgaagtataccatacaactgttttgaaaatccagcgtggacaatggctactcaagctgatttgatggagttggacatggccatggaaccagacagaaaagcggctgttagtcactggcagcaacagtcttacctggactctggaatccattctggtgccactaccacagctccttctctgagtggtaaaggcaatcctgaggaagaggatgtggatacctcccaagtcctgtatgagtgggaacagggat

SEQ ID NO: 3729 - protein, 68 aa, Homo sapiens
MATQADLMELDMAMEPDRKAAVSHWQQQSYLDSGIHSGATTTAPSLSGKGNPEEEDVDTSQVLYEWEQ

SEQ ID NO: 3730 - DNA, 1170 bp, Homo sapiens
acccaagcattttcaccagggcaggaatgcctccagacttaaagatggccagtaagccctcacgatgatgggaaaggttatgcaaggtcccagcggtacaacgagctgtttctacatcatttgtattctgcatggacttgggaggtatccacatcctcttcctcaggattgcctttaccactcagagaaggagctgtggtagtggcaccagaatggattccagagtccaggtaaacaagccaggcgaagtggcttgtaattctaacactttgggaggcgggtggattgctgcagcacaagagttccaagaccagcctggacaacacagcgaaattccatctctacaaaaaaatgttaaaaattagccaggtgtggtagtatgtgcctgtagtcctagccactggggaggctgaggcaaagaggatcacttaggagttcaaggttatagtgagctatgatcacaccaatgcatccagcctgggcaacagagcaagaccctgtctcttaaaagaatttaaaaaaaaaaaaaaggatacataaataccactgtttcaactgcctatagtaacacgctatacagctttacaccctagaagcaacaggctatactatataggctaggcatgcagtacactatgccatctaggtttgtataagtactacgctaaatgtttcaagacacagattatcattaaactacagactacattagaatgctgtgttttccaacagctttatcaccaccaagtgatgttttgacaaagagggggctagccaacttctcatgtattttccatccagtctaatgcatccatgcatcttttttttggcaatatgaacataatactctttccaactacaaggatacttcaaaattcaccgtgctatttccgattttaaccctataaatgtctccagtcaaagtcaatgggagaaatcttgccacaactaatatataatagatttcacactgaagttatttttcctcttcccatcaggacagaattatcttaattaccttagttttcagtaagtttgagtattattaactaggagtaaatctgctacataaaaatataaagcagacatattttaaaaccacagttttatactagcaattcataattcacttttccaataatcaagatccaaagaattattccccgtttt

SEQ ID NO: 3731 - protein, 77 aa, Homo sapiens
MDLGGIHILFLRIAFTTQRRSCGSGTRMDSRVQVNKPGEVACNSNTLGGGWIAAAQEFQDQPGQHSEIPSLQKNVKN

SEQ ID NO: 3732 - DNA, 468 bp, Homo sapiens
cttcaggaaaatttttttttaaagcaacgaaaaaactgactccatagaaactgagataaaacttgaaactagggatagggtggagagagaaacagaacacttcaatttagtatctccattcaagacacagattatcattaaactacagactacattagaatgctgtgttttccaacagctttatcaccaccaagtgatgttttgacaaagagggggctagccaacttctcatgtattttccatccagtctaatgcatccatgcatcttttttttggcaatatgaacataatactctttccaactacaaggatacttcaaaattcaccgtgctatttccgattttaaccctataaatgtctccagtcaaagtcaatgggagaaatcttgccacaactaatatataatagatttcacactgaagttatttttcctcttcccatcaggacagaattatcttaattacctta

SEQ ID NO: 3733 - protein, 30 aa, Homo sapiens
MLCFPTALSPPSDVLTKRGLANFSCIFHPV

SEQ ID NO: 3734 - DNA, 330 bp, Homo sapiens
aaggtcccagcggtacaacgagctgtttctacatcatttgtattctgcatggacttgggaggtatccacatcctcttcctcaggattgcctttaccactcagagaaggagctgtggtagtggcaccagaatggattccagagtccagaaaaattcacagatcccctttggataacagaggtaaacaagccaggcgaagtggcttgtaattctaacactttgggaggcgggtggattgctgcagcacaagagttccaagaccagcctggacaacacagcgaaattccatctctacaaaaaaatgttaaaaattagccaggtgtggtagtat

SEQ ID NO: 3735 - protein, 41 aa, Homo sapiens
MDLGGIHILFLRIAFTTQRRSCGSGTRMDSRVQKNSQIPFG

SEQ ID NO: 3736 - DNA, 1818 bp, Homo sapiens
taataaccccttttaaaactcaaatccagaaacaggagaaacagatggtacttacatattgcaaaagctatcttccttctatacatgaggctgtcagctgaatagtcttggaagagtgaggagtgaatttttctgctggcaactcggttagttttagcagttggtgctaaaacttggcaaagttttcaccaaatacatggaagatatacaaaaatagagggggcatgtaaaagaaaaacgttgacatagtctgagcattactttctcatcttctctttttatataccttttacccagaatgattggtgcccttactgtaggaaagttgtctttgggattcagcgctgtatggaagctctgttgcactgtgtatgggggaggggtgctgctttgaattagtgctgccaggaggcctcttttcagtgacattcaagttaatggaatccttcttccttcctgaactaattgcaagttacggggaacttcgggtatataatgtaaataattacagtctaataattgttcctcaaactttacagaggagaatgccctgtttgttaaccatgtttcttttggcaggagggggtccgcatggaagaaatagttgaaggttgtaccggagcccttcacatcctagctcgggatgttcacaaccgaattgttatcagaggactaaataccattccattgtttgtgcagctgctttattctcccattgaaaacatccaaagagtagctgcaggggtcctctgtgaacttgctcaggacaaggaagctgcagaagctattgaagctgagggagccacagctcctctgacagagttacttcactctaggaatgaaggtgtgggtaagtaaaaaggaaccaaagcctttagcagatgtgtacattgaagtctcagtttttcctcaagggcctttttctccttgtctcttagcgacatatgcagctgctgttttgttccgaatgtctgaggacaagccacaagattacaagaaacggctttcagttgagctgaccagctctctcttcagaacagagccaatggcttggaatgaggtagggaaatgtgagcagttatttatctggtagtttcctagagcaggtatggcagcttgttctttcctctcaaaacacttagtacacattcatttgcattgatgtttccctggcttgagtatttcttctttatgctgtctagcaactgctctgaggaagaactataatacaagctttaaagagtctgttcagaatcattacaaataagttgtgttatttaaaattataattcataagggagaaagatgaaaaatgttaccagattaaagaagatttttcaaaaggatgtaaggaaagaggcagtgttaaacactgttaagaggacagtttatcagtattttttactaaactttaataaaacttttctatttgaatttctgctatgaatttttcttcagcatttgtcctcagtacaggtggttccttgaaacattgtttctaataaaactagaacatcctgatattttatccattctatagagatcattgatggtacacagacatacagtggattatgtttgttgagtgaatggaaagagagattgttaggtttacaacgatgcagctcttgagaccggagtttaagatcagcctgggcaacatagtgaaaccccatctttagctgggcatggagatggatgcctatagtcctagctactggggagacgggggcaggaggattgcttgaacccaggagttaacagactgcactcagtgacagagccagactccaacacaaaaaaaaaaaaaaaaaaaaa

SEQ ID NO: 3737 - protein, 88 aa, Homo sapiens
MEEIVEGCTGALHILARDVHNRIVIRGLNTIPLFVQLLYSPIENIQRVAAGVLCELAQDKEAAEAIEAEGATAPLTELLHSRNEGVGK

SEQ ID NO: 3738 - DNA, 1011 bp, Homo sapiens
ctcctggtctgctggctgctaagactgtgggaaaagtgcagtgtttgggcaggagtgtcccgtttttttcaggtacagactatgatggcttcccttgggtaggaaagggaaatcccccgaccccttgtgcctcccaggtgaggcgacaccccgccctgcttcggcgcactctccatgggctgcacccatgtgcatcccatgagaagaaccaggtacctcagttggaaatgcagaaatcacctgtcttctgcatcgatctcactgggagctgcagagtagagctgttcccatttggccatcttggaagcaaaaacccctagggtttttaagccttgtggatgaaagtcatcttctgatttatttgcaacttgtgggtgatttcctgggagcacagcctctgcacacaatctcatggcagggctggtcggggcactgagcctggatgtagtcagctgacctgtttgaggcagttctgagaaaaatgaagtgggaatcctcactgaagacgcctgatggggagtgtaccttcagtatcacctccaatgagaagcacttggagagcctcaagaatgcaggcagcctcctgcgggctctggagcggctggcccctgggagtggttcatttgccgacagtgcggtggctcccttggccctggaaatcctccaagccgttgggcactaggcaagaaggtgcttagcacaagcccgccctgtggccccagccctcggatgcataagcaaggtcagctcccagacacctttgccacatcccctcacagctgtctttggacctaataaagtcagcttaacccagaacctggtggcccaagtgctcactaaccccagggcctagaaaactgactcagaatggacttccttggttcctgtggaatgcatctgggaagcccaggtttgttagctgttctcagaaatgttctttccctctctgtgtgggccaggtgggctaaggttagcactgcctgtggtaataaagcagtggatgcaaagcac

SEQ ID NO: 3739 - protein, 66 aa, Homo sapiens
MKWESSLKTPDGECTFSITSNEKHLESLKNAGSLLRALERLAPGSGSFADSAVAPLALEILQAVGH

SEQ ID NO: 3740 - DNA, 831 bp, Homo sapiens
cgagccaggcacgggagggaatctcctggtctgctggctgctaagactgtgggaaaagtgcagtgtttgggcaggagtgtcccgtttttttcaggtacagactatgatggcttcccttgggtaggaaagggaaatcccccgaccccttgtgcctcccaggtgaggcgacaccccgccctgcttcggcgcactctccatgggctgcacccatgtgcatcccatgagaagaaccaggtacctcagttggaaatgcagaaatcacctgtcttctgcatcgatctcactgggagctgcagagtagagctgttcccatttggccatcttggaagcaaaaacccctagggtttttaagatcacctccaatgagaagcacttggagagcctcaagaatgcaggcagcctcctgcgggctctggagcggctggcccctgggagtggttcatttgccgacagtgcggtggctcccttggccctggaaatcctccaagccgttgggcactaggcaagaaggtgcttagcacaagcccgccctgtggccccagccctcggatgcataagcaaggtcagctcccagacacctttgccacatcccctcacagctgtctttggacctaataaagtcagcttaacccagaacctggtggcccaagtgctcactaaccccagggcctagaaaactgactcagaatggacttccttggttcctgtggaatgcatctgggaagcccaggtttgttagctgttctcagaaatgttctttccctctctgtgtgggccaggtgggctaaggttagcactgcctgtggtaataaagcagtggatgcaaagcac

SEQ ID NO: 3741 - protein, 51 aa, Homo sapiens
MRSTWRASRMQAASCGLWSGWPLGVVHLPTVRWLPWPWKSSKPLGTRQEGA

SEQ ID NO: 3742 - DNA, 3659 bp, Homo sapiens
tcgactccgtttttcctaggctggttggagaaaccagactctatggaatttgaaccctgaaacttctaatgcttagttatcagactgtttcattctgtaccatttaatgcttctgaattgtttctttttatcttgctgtctaaaagaggttaatagcatacaaaaatgaaataataaaatataaaatgatttcaaaggtacatgtgtaccttgtaaaatctgctatgtgtaattgggacatgtcttgggaatttttcatggtaaatcatgttaaagtagagttttaacatttatgttttttaaagattgacttggacaaggctactgcagcattcattttggaagaaagcttttgctggagcagatcaggaatcaagcgtcgaagatctcagtctcagcagaaacactatggagtgttctgggccacaagattccaaggagcttttgcagaactctcagagtagacaagcaaaagggcacaagagtggtcaaccactaggtcactctttcagactagaaaatccaactgagtttcggcctaagagtactcttgagggtcaattgaatgaatccatgtttcttctcagttctcgtcctactcccagaactagcactgcagtggaagtaagtcctggtgaggatatgactcactgttcaccacagaagacttctcctctgaccaagattacaagtggacacctgagtcagcaggacctggaatcccagatgagagagcttatctacacggactcagatcttgttgtcacccccattatcgacaatccaaagataatgaaacagccaccagttaaatttgatgcaaaaatattgcatctaccaacatattcagtggataagttattatttctgaaagatcaagattggaatgactttttgcaacaagtgtgctcgcagatcgactccactgagaagagcatgggggcctcccgagccaagctgaatctcctttgctatttgtgcgtggtggctggtcaccaggaggtggccaccaggctcctccattcccccctgttccaattgctaatccagcatttgcggatagctccaaactgggatatacgggccaaggttgctcacgtaattggtttactggcttcgcacacagctgagctccaggaaaatacacctgttgttgaggcaattgttctcttaactgaattaattagggaaaacttcaggaacagcaaattaaaacagtgccttttaccaacccttggggagctgatctatcttgtagccacccaggaagaaaaaaaaaagaaccctagagagtgctgggctgttcccttggctgcatacacagtgctaatgaggtgccttcgggaaggggaagagcgtgttgtgaatcacatggcagcaaaaattattgaaaatgtctgtaccaccttttctgctcagtcccagggctttattacaggagaaataggacccattttgtggtacctattcagacactccactgctgattctcttaggataacagcagtatcggccttgtgtagaatcactcgccattctcctactgccttccagaatgttattgaaaaggtgggactgaactcagtaataaactccctggcctctgccatctgcaaagttcagcagtacatgttgaccttattcgctgccatgttgtcctgtgggattcatcttcaaagactaatccaagaaaagggttttgtctccacaattatccgtttacttgacagcccctcaacatgcattagagcaaaagccttcctggttcttctatatattttgatttataaccgtgagatgttgctgctcagttgccaagcaagactggtgatgtacatcgagagagacagcagaaagaccactccaggcaaggagcagcaaagtggcaatgaatacctgtccaaatgcctggatcttctcatctgtcacattgtgcaggagctgccacgaatcctgggtgacattcttaactccttggctaatgtttctggacgtaaacacccatcaacagttcaagtgaaacagctgaagttgtgtctccccctgatgcctgtagtgcttcacctcgtaacttcacaggtatttcgacctcaagttgtgacagaagagtttcttttcagctatggaactattcttagtcatattaaatctgtagactcaggagaaacgaacatagatggagccataggactgacagcatcagaagaatttatcaagatcacattgtcagcttttgaagcaataatacagtatcctattttattgaaagactatcgctccacggttgttgactatatactgccacccttggtgtccttggttcaaagccaaaatgtggagtggagactctttagcttgcggttgctctcagaaaccacatctctactcgtgaaccaggagtttggggatggcaaggagaaggccagtgttgattctgacagcaatcttctggctctcattcgagatgtcttacttccccagtatgagcacattcttttagaacctgacccagtaccagcatatgctctgaaactgctagtcgcgatgactgaacacaacccaactttcacaagacttgtggaagaaagcaaactgatcccactcatttttgaagtaactctggaacatcaggagagcattctgggtaataccatgcaaagtgtgattgcattactcagcaatctagttgcctgcaaagattcgaatatggaactactttatgaacaaggacttgtcagtcacatctgtaacctgctcactgaaactgccacactgtgcttggatgtggacaataaaaacaacaatgagatggcagctccactgctcttttccctgcttgatattttgcacagcatgctgacctatacctccggtattgtacggctggctttgcaggcccagaagtctggctcaggagaggaccctcaggctgcagaagacctgctgctgctcaacagacctctgacagacctgattagcctgctcattccactgcttcctaatgaagatcctgagatttttgatgtttcatccaagtgcctgtctatactggttcagctgtatggaggggaaaacccggacagcctctctcctgaaaatgtggaaatttttgctcatttactgacatccaaggaggacccaaaggagcagaagcttctgttaaggattctcagaagaatgatcacctccaatgagaagcacttggagagcctcaagaatgcaggcagcctcctgcgggctctggagcggctggcccctgggagtggttcatttgccgacagtgcggtggctcccttggccctggaaatcctccaagccgttgggcactaggcaagaaggtgcttagcacaagcccgccctgtggccccagccctcggatgcataagcaaggtcagctcccagacacctttgccacatcccctcacagctgtctttggacctaataaagtcagcttaacccagaacctggtggcccaagtgctcactaaccccagggcctagaaaactgactcagaatggacttccttggttcctgtggaatgcatctgggaagcccaggtttgttagctgttctcagaaatgttctttccctctctgtgtgggccaggtgggctaaggttagcactgcctgtggtaataaagcagtggatgcaaagcac

SEQ ID NO: 3743 - protein, 973 aa, Homo sapiens
MECSGPQDSKELLQNSQSRQAKGHKSGQPLGHSFRLENPTEFRPKSTLEGQLNESMFLLSSRPTPRTSTAVEVSPGEDMTHCSPQKTSPLTKITSGHLSQQDLESQMRELIYTDSDLVVTPIIDNPKIMKQPPVKFDAKILHLPTYSVDKLLFLKDQDWNDFLQQVCSQIDSTEKSMGASRAKLNLLCYLCVVAGHQEVATRLLHSPLFQLLIQHLRIAPNWDIRAKVAHVIGLLASHTAELQENTPVVEAIVLLTELIRENFRNSKLKQCLLPTLGELIYLVATQEEKKKNPRECWAVPLAAYTVLMRCLREGEERVVNHMAAKIIENVCTTFSAQSQGFITGEIGPILWYLFRHSTADSLRITAVSALCRITRHSPTAFQNVIEKVGLNSVINSLASAICKVQQYMLTLFAAMLSCGIHLQRLIQEKGFVSTIIRLLDSPSTCIRAKAFLVLLYILIYNREMLLLSCQARLVMYIERDSRKTTPGKEQQSGNEYLSKCLDLLICHIVQELPRILGDILNSLANVSGRKHPSTVQVKQLKLCLPLMPVVLHLVTSQVFRPQVVTEEFLFSYGTILSHIKSVDSGETNIDGAIGLTASEEFIKITLSAFEAIIQYPILLKDYRSTVVDYILPPLVSLVQSQNVEWRLFSLRLLSETTSLLVNQEFGDGKEKASVDSDSNLLALIRDVLLPQYEHILLEPDPVPAYALKLLVAMTEHNPTFTRLVEESKLIPLIFEVTLEHQESILGNTMQSVIALLSNLVACKDSNMELLYEQGLVSHICNLLTETATLCLDVDNKNNNEMAAPLLFSLLDILHSMLTYTSGIVRLALQAQKSGSGEDPQAAEDLLLLNRPLTDLISLLIPLLPNEDPEIFDVSSKCLSILVQLYGGENPDSLSPENVEIFAHLLTSKEDPKEQKLLLRILRRMITSNEKHLESLKNAGSLLRALERLAPGSGSFADSAVAPLALEILQAVGH

SEQ ID NO: 3744 - DNA, 4552 bp, Homo sapiens
cgcctggccgccctctctccttctgccagtggaccccgtaccccctgcgctcccctgctttgcgctcgtgttaaaaaagccgcccgtttttatccgggcgttagttaagggcacacgggacgcctcttctaggacctgggtgcagcggggagagagagtgcttgtgtgtttcggcttgggagatgtgctttatggacgccatctcttaacttcccagagcggaccgcgtcttcaccgccctgcagcgcttcctaggctcccagccggtctcgcggactgatgcctacggacgtagcgaggccgcgaaagccgccgattcgcccgccgcgattttgtttacttcttaggagctagagatgctgttattctattgtatgtgagaagtcggcccagagatggaaaactttattctgtatgaggagatcggaagaggaagcaagactgttgtctataaagggcgacggaagggaacaatcaattttgtagccattctttgtactgataagtgcaaaaggcctgaaataaccaactgggtccgtctcacccgtgaaataaaacacaagaatattgtaacttttcatgaatggtatgaaacaagcaaccacctctggctagtggtggaactctgcacaggtggttccttaaaaacagttattgctcaagatgaaaacctcccagaagatgttgtgagagaatttggaattgacctgattagtggattacatcatcttcataaacttggcattctcttttgtgacatttctcctaggaagatactcttggaagggcctggcacactgaagtttagcaacttttgcttggcaaaagtggaaggtgaaaatttggaagagttctttgctttggtggcagcagaggaaggaggaggtgataatggggaaaatgtcctgaagaaaagcatgaaaagtagagtcaaaggatctcctgtatatacagcaccagaagttgtgaggggtgctgacttttccatctccagtgacctctggtctttgggctgtctgctttatgaaatgttttcaggaaaacctccattcttctcagaaagtatttcagaattaactgaaaagatcttatgtgaagatcctttgccacctattccgaaagattcttctcgtcctaaagcttcttcagattttattaatttgcttgatgggttacttcaaagagatcctcagaaaagattgacttggacaaggctactgcagcattcattttggaagaaagcttttgctggagcagatcaggaatcaagcgtcgaagatctcagtctcagcagaaacactatggagtgttctgggccacaagattccaaggagcttttgcagaactctcagagtagacaagcaaaagggcacaagagtggtcaaccactaggtcactctttcagactagaaaatccaactgagtttcggcctaagagtactcttgagggtcaattgaatgaatccatgtttcttctcagttctcgtcctactcccagaactagcactgcagtggaagtaagtcctggtgaggatatgactcactgttcaccacagaagacttctcctctgaccaagattacaagtggacacctgagtcagcaggacctggaatcccagatgagagagcttatctacacggactcagatcttgttgtcacccccattatcgacaatccaaagataatgaaacagccaccagttaaatttgatgcaaaaatattgcatctaccaacatattcagtggataagttattatttctgaaagatcaagattggaatgactttttgcaacaagtgtgctcgcagatcgactccactgagaagagcatgggggcctcccgagccaagctgaatctcctttgctatttgtgcgtggtggctggtcaccaggaggtggccaccaggctcctccattcccccctgttccaattgctaatccagcatttgcggatagctccaaactgggatatacgggccaaggttgctcacgtaattggtttactggcttcgcacacagctgagctccaggaaaatacacctgttgttgaggcaattgttctcttaactgaattaattagggaaaacttcaggaacagcaaattaaaacagtgccttttaccaacccttggggagctgatctatcttgtagccacccaggaagaaaaaaaaaagaaccctagagagtgctgggctgttcccttggctgcatacacagtgctaatgaggtgccttcgggaaggggaagagcgtgttgtgaatcacatggcagcaaaaattattgaaaatgtctgtaccaccttttctgctcagtcccagggctttattacaggagaaataggacccattttgtggtacctattcagacactccactgctgattctcttaggataacagcagtatcggccttgtgtagaatcactcgccattctcctactgccttccagaatgttattgaaaaggtgggactgaactcagtaataaactccctggcctctgccatctgcaaagttcagcagtacatgttgaccttattcgctgccatgttgtcctgtgggattcatcttcaaagactaatccaagaaaagggttttgtctccacaattatccgtttacttgacagcccctcaacatgcattagagcaaaagccttcctggttcttctatatattttgatttataaccgtgagatgttgctgctcagttgccaagcaagactggtgatgtacatcgagagagacagcagaaagaccactccaggcaaggagcagcaaagtggcaatgaatacctgtccaaatgcctggatcttctcatctgtcacattgtgcaggagctgccacgaatcctgggtgacattcttaactccttggctaatgtttctggacgtaaacacccatcaacagttcaagtgaaacagctgaagttgtgtctccccctgatgcctgtagtgcttcacctcgtaacttcacaggtatttcgacctcaagttgtgacagaagagtttcttttcagctatggaactattcttagtcatattaaatctgtagactcaggagaaacgaacatagatggagccataggactgacagcatcagaagaatttatcaagatcacattgtcagcttttgaagcaataatacagtatcctattttattgaaagactatcgctccacggttgttgactatatactgccacccttggtgtccttggttcaaagccaaaatgtggagtggagactctttagcttgcggttgctctcagaaaccacatctctactcgtgaaccaggagtttggggatggcaaggagaaggccagtgttgattctgacagcaatcttctggctctcattcgagatgtcttacttccccagtatgagcacattcttttagaacctgacccagtaccagcatatgctctgaaactgctagtcgcgatgactgaacacaacccaactttcacaagacttgtggaagaaagcaaactgatcccactcatttttgaagtaactctggaacatcaggagagcattctgggtaataccatgcaaagtgtgattgcattactcagcaatctagttgcctgcaaagattcgaatatggaactactttatgaacaaggacttgtcagtcacatctgtaacctgctcactgaaactgccacactgtgcttggatgtggacaataaaaacaacaatgagatggcagctccactgctcttttccctgcttgatattttgcacagcatgctgacctatacctccggtattgtacggctggctttgcaggcccagaagtctggctcaggagaggaccctcaggctgcagaagacctgctgctgctcaacagacctctgacagacctgattagcctgctcattccactgcttcctaatgaagatcctgagatttttgatgtttcatccaagtgcctgtctatactggttcagctgtatggaggggaaaacccggacagcctctctcctgaaaatgtggaaatttttgctcatttactgacatccaaggaggacccaaaggagcagaagcttctgttaaggattctcagaagaatgatcacctccaatgagaagcacttggagagcctcaagaatgcaggcagcctcctgcgggctctggagcggctggcccctgggagtggttcatttgccgacagtgcggtggctcccttggccctggaaatcctccaagccgttgggcactaggcaagaaggtgcttagcacaagcccgccctgtggccccagccctcggatgcataagcaaggtcagctcccagacacctttgccacatcccctcacagctgtctttggacctaataaagtcagcttaacccagaacctggtggcccaagtgctcactaaccccagggcctagaaaactgactcagaatggacttccttggttcctgtggaatgcatctgggaagcccaggtttgttagctgttctcagaaatgttctttccctctctgtgtgggccaggtgggctaaggttagcactgcctgtggtaataaagcagtggatgcaaagcac

SEQ ID NO: 3745 - protein, 1275 aa, Homo sapiens
MENFILYEEIGRGSKTVVYKGRRKGTINFVAILCTDKCKRPEITNWVRLTREIKHKNIVTFHEWYETSNHLWLVVELCTGGSLKTVIAQDENLPEDVVREFGIDLISGLHHLHKLGILFCDISPRKILLEGPGTLKFSNFCLAKVEGENLEEFFALVAAEEGGGDNGENVLKKSMKSRVKGSPVYTAPEVVRGADFSISSDLWSLGCLLYEMFSGKPPFFSESISELTEKILCEDPLPPIPKDSSRPKASSDFINLLDGLLQRDPQKRLTWTRLLQHSFWKKAFAGADQESSVEDLSLSRNTMECSGPQDSKELLQNSQSRQAKGHKSGQPLGHSFRLENPTEFRPKSTLEGQLNESMFLLSSRPTPRTSTAVEVSPGEDMTHCSPQKTSPLTKITSGHLSQQDLESQMRELIYTDSDLVVTPIIDNPKIMKQPPVKFDAKILHLPTYSVDKLLFLKDQDWNDFLQQVCSQIDSTEKSMGASRAKLNLLCYLCVVAGHQEVATRLLHSPLFQLLIQHLRIAPNWDIRAKVAHVIGLLASHTAELQENTPVVEAIVLLTELIRENFRNSKLKQCLLPTLGELIYLVATQEEKKKNPRECWAVPLAAYTVLMRCLREGEERVVNHMAAKIIENVCTTFSAQSQGFITGEIGPILWYLFRHSTADSLRITAVSALCRITRHSPTAFQNVIEKVGLNSVINSLASAICKVQQYMLTLFAAMLSCGIHLQRLIQEKGFVSTIIRLLDSPSTCIRAKAFLVLLYILIYNREMLLLSCQARLVMYIERDSRKTTPGKEQQSGNEYLSKCLDLLICHIVQELPRILGDILNSLANVSGRKHPSTVQVKQLKLCLPLMPVVLHLVTSQVFRPQVVTEEFLFSYGTILSHIKSVDSGETNIDGAIGLTASEEFIKITLSAFEAIIQYPILLKDYRSTVVDYILPPLVSLVQSQNVEWRLFSLRLLSETTSLLVNQEFGDGKEKASVDSDSNLLALIRDVLLPQYEHILLEPDPVPAYALKLLVAMTEHNPTFTRLVEESKLIPLIFEVTLEHQESILGNTMQSVIALLSNLVACKDSNMELLYEQGLVSHICNLLTETATLCLDVDNKNNNEMAAPLLFSLLDILHSMLTYTSGIVRLALQAQKSGSGEDPQAAEDLLLLNRPLTDLISLLIPLLPNEDPEIFDVSSKCLSILVQLYGGENPDSLSPENVEIFAHLLTSKEDPKEQKLLLRILRRMITSNEKHLESLKNAGSLLRALERLAPGSGSFADSAVAPLALEILQAVGH

SEQ ID NO: 3746 - DNA, 3888 bp, Homo sapiens
cgcctggccgccctctctccttctgccagtggaccccgtaccccctgcgctcccctgctttgcgctcgtgttaaaaaagccgcccgtttttatccgggcgttagttaagggcacacgggacgcctcttctaggacctgggtgcagcggggagagagagtgcttgtgtgtttcggcttgggagatgtgctttatggacgccatctcttaacttcccagagcggaccgcgtcttcaccgccctgcagcgcttcctaggctcccagccggtctcgcggactgatgcctacggacgtagcgaggccgcgaaagccgccgattcgcccgccgcgattttgtttacttcttaggagctagagatgctgttattctattgtatgtgagaagtcggcccagagatggaaaactttattctgtatgaggagatcggaagaggaagcaagactgttgtctataaagggcgacggaagggaacaatcaattttgtagccattctttgtactgataagtgcaaaaggcctgaaataaccaactgggtccgtctcacccgtgaaataaaacacaagaatattgtaacttttcatgaatggtatgaaacaagcaaccacctctggctagtggtggaactctgcacaggtggttccttaaaaacagttattgctcaagatgaaaacctcccagaagatgttgtgagagaatttggaattgacctgattagtggattacatcatcttcataaacttggcattctcttttgtgacatttctcctaggaagatactcttggaagggcctggcacactgaagtttagcaacttttgcttggcaaaagtggaaggtgaaaatttggaagagttctttgctttggtggcagcagaggaaggaggaggtgataatggggaaaatgtcctgaagaaaagcatgaaaagtagagtcaaaggatctcctgtatatacagcaccagaagttgtgaggggtgctgacttttccatctccagtgacctctggtctttgggctgtctgctttatgaaatgttttcaggaaaacctccattcttctcagaaagtatttcagaattaactgaaaagatcttatgtgaagatcctttgccacctattccgaaagattcttctcgtcctaaagcttcttcagattttattaatttgcttgatgggttacttcaaagagatcctcagaaaagattgacttggacaaggctactgcagcattcattttggaagaaagcttttgctggagcagatcaggaatcaagcgtcgaagatctcagtctcagcagaaacactatggagtgttctgggccacaagattccaaggagcttttgcagaactctcagagtagacaagcaaaagggcacaagagtggtcaaccactaggtcactctttcagactagaaaatccaactgagtttcggcctaagagtactcttgagggtcaattgaatgaatccatgtttcttctcagttctcgtcctactcccagaactagcactgcagtggaagtaagtcctggtgaggatatgactcactgttcaccacagaagacttctcctctgaccaagattacaagtggacacctgagtcagcaggacctggaatcccagatgagagagcttatctacacggactcagatcttgttgtcacccccattatcgacaatccaaagataatgaaacagccaccagttaaatttgatgcaaaaatattgcatctaccaacatattcagtggataagttattatttctgaaagatcaagattggaatgactttttgcaacaagtgtgctcgcagatcgactccactgagaagagcatgggggcctcccgagccaagctgaatctcctttgctatttgtgcgtggtggctggtcaccaggaggtggccaccaggctcctccattcccccctgttccaattgctaatccagcatttgcggatagctccaaactgggatatacgggccaaggttgctcacgtaattggtttactggcttcgcacacagctgagctccaggaaaatacacctgttgttgaggcaattgttctcttaactgaattaattagggaaaacttcaggaacagcaaattaaaacagtgccttttaccaacccttggggagctgatctatcttgtagccacccaggaagaaaaaaaaaagaaccctagagagtgctgggctgttcccttggctgcatacacagtgctaatgaggtgccttcgggaaggggaagagcgtgttgtgaatcacatggcagcaaaaattattgaaaatgtctgtaccaccttttctgctcagtcccagggctttattacaggagaaataggacccattttgtggtacctattcagacactccactgctgattctcttaggataacagcagtatcggccttgtgtagaatcactcgccattctcctactgccttccagaatgttattgaaaaggtgggactgaactcagtaataaactccctggcctctgccatctgcaaagttcagcagtacatgttgaccttattcgctgccatgttgtcctgtgggattcatcttcaaagactaatccaagaaaagggttttgtctccacaattatccgtttacttgacagcccctcaacatgcattagagcaaaagccttcctggttcttctatatattttgatttataaccgtgagatgttgctgctcagttgccaagcaagactggtgatgtacatcgagagagacagcagaaagaccactccaggcaaggagcagcaaagtggcaatgaatacctgtccaaatgcctggatcttctcatctgtcacattgtgcaggagctgccacgaatcctgggtgacattcttaactccttggctaatgtttctggacgtaaacacccatcaacagttcaagtgaaacagctgaagttgtgtctccccctgatgcctgtagtgcttcacctcgtaacttcacaggtatttcgacctcaagttgtgacagaagagtttcttttcagctatggaactattcttagtcatattaaatctgtagactcaggagaaacgaacatagatggagccataggactgacagcatcagaagaatttatcaagatcacattgtcagcttttgaagcaataatacagtatcctattttattgaaagactatcgctccacggttgttgactatatactgccacccttggtgtccttggttcaaagccaaaatgtggagtggagactctttagcttgcggttgctctcagaaaccacatctctactcgtgaaccaggagtttggggatggcaaggagaaggccagtgttgattctgacagcaatcttctggctctcattcgagatgtcttacttccccagtatgagcacattcttttagaacctgacccagtaccagcatatgctctgaaactgctagtcgcgatgactgaacacaacccaactttcacaagacttgtggaagaaagcaaactgatcccactcatttttgaagtaactctggaacatcaggagagcattctgggtaataccatgcaaagtgtgattgcattactcagcaatctagttgcctgcaaagattcgaatatggaactactttatgaacaaggacttgtcagtcacatctgtaacctgctcactgaaactgccacactgtgcttggatgtggacaataaaaacaacaatgagatggcagctccactgctcttttccctgcttgatattttgcacagcatgctgacctatacctccggtattgtacggctggctttgcagccccagccctcggatgcataagcaaggtcagctcccagacacctttgccacatcccctcacagctgtctttggacctaataaagtcagcttaacccagaa

SEQ ID NO: 3747 - protein, 1137 aa, Homo sapiens
MENFILYEEIGRGSKTVVYKGRRKGTINFVAILCTDKCKRPEITNWVRLTREIKHKNIVTFHEWYETSNHLWLVVELCTGGSLKTVIAQDENLPEDVVREFGIDLISGLHHLHKLGILFCDISPRKILLEGPGTLKFSNFCLAKVEGENLEEFFALVAAEEGGGDNGENVLKKSMKSRVKGSPVYTAPEVVRGADFSISSDLWSLGCLLYEMFSGKPPFFSESISELTEKILCEDPLPPIPKDSSRPKASSDFINLLDGLLQRDPQKRLTWTRLLQHSFWKKAFAGADQESSVEDLSLSRNTMECSGPQDSKELLQNSQSRQAKGHKSGQPLGHSFRLENPTEFRPKSTLEGQLNESMFLLSSRPTPRTSTAVEVSPGEDMTHCSPQKTSPLTKITSGHLSQQDLESQMRELIYTDSDLVVTPIIDNPKIMKQPPVKFDAKILHLPTYSVDKLLFLKDQDWNDFLQQVCSQIDSTEKSMGASRAKLNLLCYLCVVAGHQEVATRLLHSPLFQLLIQHLRIAPNWDIRAKVAHVIGLLASHTAELQENTPVVEAIVLLTELIRENFRNSKLKQCLLPTLGELIYLVATQEEKKKNPRECWAVPLAAYTVLMRCLREGEERVVNHMAAKIIENVCTTFSAQSQGFITGEIGPILWYLFRHSTADSLRITAVSALCRITRHSPTAFQNVIEKVGLNSVINSLASAICKVQQYMLTLFAAMLSCGIHLQRLIQEKGFVSTIIRLLDSPSTCIRAKAFLVLLYILIYNREMLLLSCQARLVMYIERDSRKTTPGKEQQSGNEYLSKCLDLLICHIVQELPRILGDILNSLANVSGRKHPSTVQVKQLKLCLPLMPVVLHLVTSQVFRPQVVTEEFLFSYGTILSHIKSVDSGETNIDGAIGLTASEEFIKITLSAFEAIIQYPILLKDYRSTVVDYILPPLVSLVQSQNVEWRLFSLRLLSETTSLLVNQEFGDGKEKASVDSDSNLLALIRDVLLPQYEHILLEPDPVPAYALKLLVAMTEHNPTFTRLVEESKLIPLIFEVTLEHQESILGNTMQSVIALLSNLVACKDSNMELLYEQGLVSHICNLLTETATLCLDVDNKNNNEMAAPLLFSLLDILHSMLTYTSGIVRLALQPQPSDA

SEQ ID NO: 3748 - DNA, 767 bp, Homo sapiens
cctggcccctgtgtttacctactcaagcctcagcaatgacggacacccctcccccaaccgggctgcagccttacaggttgatcccagactgctgcgctagcagtgagctaggctctgtgggcgtgggacctaccgagccaggcacgggagggaatctcctggtctgctggctgctaagactgtgggaaaagtgcagtgtttgggcaggagtgtcccgtttttttcaggtacagactatgatggcttcccttgggtaggaaagggaaatcccccgaccccttgtgcctcccaggtgaggcgacaccccgccctgcttcggcgcactctccatgggctgcacccatgtgcatcccatgagaagaaccaggtacctcagttggaaatgcagaaatcacctgtcttctgcatcgatctcactgggagctgcagagtagagctgttcccatttggccatcttggaagcaaaaacccctagggtttttaagatcacctccaatgagaagcacttggagagcctcaagaatgcaggcagcctcctgcgggctctggagcggctggcccctgggagtggttcatttgccgacagtgcggtggctcccttggccctggaaatcctccaagccgttgggcactaggcaagaaggtgcttagcacaagcccgccctgtggccccagccctcggatgcataagcaaggtcagctcccagacacctttgccacatcccctcacagctgtctttggacctaataaagtcagcttaacccag

SEQ ID NO: 3749 - protein, 51 aa, Homo sapiens; identical to SEQ ID NO: 3741

SEQ ID NO: 3750 - DNA, 4355 bp, Homo sapiens
cgcctggccgccctctctccttctgccagtggaccccgtaccccctgcgctcccctgctttgcgctcgtgttaaaaaagccgcccgtttttatccgggcgttagttaagggcacacgggacgcctcttctaggacctgggtgcagcggggagagagagtgcttgtgtgtttcggcttgggagatgtgctttatggacgccatctcttaacttcccagagcggaccgcgtcttcaccgccctgcagcgcttcctaggctcccagccggtctcgcggactgatgcctacggacgtagcgaggccgcgaaagccgccgattcgcccgccgcgattttgtttacttcttaggagctagagatgctgttattctattgtatgtgagaagtcggcccagagatggaaaactttattctgtatgaggagatcggaagaggaagcaagactgttgtctataaagggcgacggaagggaacaatcaattttgtagccattctttgtactgataagtgcaaaaggcctgaaataaccaactgggtccgtctcacccgtgaaataaaacacaagaatattgtaacttttcatgaatggtatgaaacaagcaaccacctctggctagtggtggaactctgcacaggtggttccttaaaaacagttattgctcaagatgaaaacctcccagaagatgttgtgagagaatttggaattgacctgattagtggattacatcatcttcataaacttggcattctcttttgtgacatttctcctaggaagatactcttggaagggcctggcacactgaagtttagcaacttttgcttggcaaaagtggaaggtgaaaatttggaagagttctttgctttggtggcagcagaggaaggaggaggtgataatggggaaaatgtcctgaagaaaagcatgaaaagtagagtcaaaggatctcctgtatatacagcaccagaagttgtgaggggtgctgacttttccatctccagtgacctctggtctttgggctgtctgctttatgaaatgttttcaggaaaacctccattcttctcagaaagtatttcagaattaactgaaaagatcttatgtgaagatcctttgccacctattccgaaagattcttctcgtcctaaagcttcttcagattttattaatttgcttgatgggttacttcaaagagatcctcagaaaagattgacttggacaaggctactgcagcattcattttggaagaaagcttttgctggagcagatcaggaatcaagcgtcgaagatctcagtctcagcagaaacactatggagtgttctgggccacaagattccaaggagcttttgcagaactctcagagtagacaagcaaaagggcacaagagtggtcaaccactaggtcactctttcagactagaaaatccaactgagtttcggcctaagagtactcttgagggtcaattgaatgaatccatgtttcttctcagttctcgtcctactcccagaactagcactgcagtggaagtaagtcctggtgaggatatgactcactgttcaccacagaagacttctcctctgaccaagattacaagtggacacctgagtcagcaggacctggaatcccagatgagagagcttatctacacggactcagatcttgttgtcacccccattatcgacaatccaaagataatgaaacagccaccagttaaatttgatgcaaaaatattgcatctaccaacatattcagtggataagttattatttctgaaagatcaagattggaatgactttttgcaacaagtgtgctcgcagatcgactccactgagaagagcatgggggcctcccgagccaagctgaatctcctttgctatttgtgcgtggtggctggtcaccaggaggtggccaccaggctcctccattcccccctgttccaattgctaatccagcatttgcggatagctccaaactgggatatacgggccaaggttgctcacgtaattggtttactggcttcgcacacagctgagctccaggaaaatacacctgttgttgaggcaattgttctcttaactgaattaattagggaaaacttcaggaacagcaaattaaaacagtgccttttaccaacccttggggagctgatctatcttgtagccacccaggaagaaaaaaaaaagaaccctagagagtgctgggctgttcccttggctgcatacacagtgctaatgaggtgccttcgggaaggggaagagcgtgttgtgaatcacatggcagcaaaaattattgaaaatgtctgtaccaccttttctgctcagtcccagggctttattacaggagaaataggacccattttgtggtacctattcagacactccactgctgattctcttaggataacagcagtatcggccttgtgtagaatcactcgccattctcctactgccttccagaatgttattgaaaaggtgggactgaactcagtaataaactccctggcctctgccatctgcaaagttcagcagtacatgttgaccttattcgctgccatgttgtcctgtgggattcatcttcaaagactaatccaagaaaagggttttgtctccacaattatccgtttacttgacagcccctcaacatgcattagagcaaaagccttcctggttcttctatatattttgatttataaccgtgagatgttgctgctcagttgccaagcaagactggtgatgtacatcgagagagacagcagaaagaccactccaggcaaggagcagcaaagtggcaatgaatacctgtccaaatgcctggatcttctcatctgtcacattgtgcaggagctgccacgaatcctgggtgacattcttaactccttggctaatgtttctggacgtaaacacccatcaacagttcaagtgaaacagctgaagttgtgtctccccctgatgcctgtagtgcttcacctcgtaacttcacaggtatttcgacctcaagttgtgacagaagagtttcttttcagctatggaactattcttagtcatattaaatctgtagactcaggagaaacgaacatagatggagccataggactgacagcatcagaagaatttatcaagatcacattgtcagcttttgaagcaataatacagtatcctattttattgaaagactatcgctccacggttgttgactatatactgccacccttggtgtccttggttcaaagccaaaatgtggagtggagactctttagcttgcggttgctctcagaaaccacatctctactcgtgaaccaggagtttggggatggcaaggagaaggccagtgttgattctgacagcaatcttctggctctcattcgagatgtcttacttccccagtatgagcacattcttttagaacctgacccagtaccagcatatgctctgaaactgctagtcgcgatgactgaacacaacccaactttcacaagacttgtggaagaaagcaaactgatcccactcatttttgaagtaactctggaacatcaggagagcattctgggtaataccatgcaaagtgtgattgcattactcagcaatctagttgcctgcaaagattcgaatatggaactactttatgaacaaggacttgtcagtcacatctgtaacctgctcactgaaactgccacactgtgcttggatgtggacaataaaaacaacaatgagatggcagctccactgctcttttccctgcttgatattttgcacagcatgctgacctatacctccggtattgtacggctggctttgcaggcccagaagtctggctcaggagaggaccctcaggctgcagaagacctgctgctgctcaacagacctctgacagacctgattagcctgctcattccactgcttcctaatgaagatcctgagatttttgatgtttcatccaagtgcctgtctatactggttcagctgtatggaggggaaaacccggacagcctctctcctgaaaatgtggaaatttttgctcatttactgacatccaaggaggacccaaaggagcagaagcttctgttaaggattctcagaagaatgatcacctccaatgagaagcacttggagagcctcaagaatgcaggcagcctcctgcgggctctggagcggctggcccctgggagtggttcatttgccgacagtgcggtggctcccttggccctggaaatcctccaagccgttgggcactaggcaagaaggtgcttagcacaagcccgccctgtggccccagccctcggatgcataagcaaggtcagctcccagacacctttgccacatcccctcacagctgtctttggacctaataaagtcagcttaacccag

SEQ ID NO: 3751 - protein, 1275 aa, Homo sapiens; identical to SEQ ID NO: 3745

SEQ ID NO: 3752 - DNA, 2335 bp, Homo sapiens
atcccgcgtcgctgttgtcgctgttgcagccgagttcagccgggagcagagcgaaccgcaccggcccgagcggagcgccgcacgttcccaaccgcgaggccagacatctgactgttggtgtgagaccagtgctcctggtggtgtgccctgagccatggaggcgcctttgcagacagagatggtggagctggtgcccaatggcaaacactcagaggggctgctcccggtcatcacccccatggcaggcaaccagaggtcgaggaccctgcacggagctgtatggagggcaagagcttcctacagaaaagtcccagcaaggagccacacttcactgacttcgaggggaagacatcattcgggatgtcagtgttcaacctcagcaatgccatcatgggcagcggcatcctgggactcgcctatgccatggccaatacgggcattatccttttcctgttcctgttgacagctgtcgccttgctctccagctactccatccacctgctactcaagtcctcaggggtcgtgggcatccgtgcctatgagcagctgggctaccgtgcctttgggaccccaggaaagctggcagcagccctggccatcacgctccagaacatcggagccatgtccagctacctgtacatcatcaagtctgagctgccacttgtcatacagaccttcctgaacctggaggagaaaacctcggactggtacatgaacgggaactacctggtaatccttgtctctgtcaccatcattctgcccctggcactgatgcggcagcttggctacctgggctactccagcggcttctctcttagctgcatggtgttcttcctaattgcagtcatctacaaaaagttccacgtgccctgcccactgccccccaacttcaacaacaccacaggcaacttcagccacgtggagatcgtgaaggagaaggtgcagctgcaggtcgagcctgaggcttcagccttctgcactcccagctacttcacgctcaactcacagacagcatacaccatccccatcatggccttcgccttcgtctgccaccccgaggtgctgcccatctatactgagctcaaggacccctccaagaagaagatgcagcacatctccaacctgtccatcgctgtcatgtacatcatgtacttcctggctgccctcttcggctacctcaccttctacaacggggtggagtcggagctgctgcacacctacagcaaggtggacccgtttgacgtcctgatcctgtgtgtgcgcgtggccgtgctgacagcagtcacgctcacagtgcccatcgttctgttcccggtgcgccgcgccatccagcagatgctgtttccaaaccaggagttcagctggctgcggcatgtgcttattgccgttggcctgctcacttgtatcaacctgctggtcatctttgcccccaacatcctgggcatctttggggtcatcggtgccacatctgccccattcctcatcttcatcttccctgccatcttctacttccgaatcatgcccacggagaaggagcctgcaagatccacccccaaaatcctggccctgtgttttgctatgcttggcttcttgctgatgaccatgagcttgagcttcatcatcattgactgggcctcagggaccagccggcatggaggaaaccactagggtgaccctcatcctgttctgtctactcaccctagcagccctgcccagactcttcagcccctgctcccatccagtggccagtcgggggaggagaaagacgcgattaacactgtggcattcagccaggccccatgtcctctctgtggaaggtttttgttcaagagccaggaccaaggcccttgggccactaccctgctaggctctggagctgtagaggcttcctgaactgggagcagggtagggctgtcgtgctgctaggccacggtctgcgccctggggcctcatctcccccagcccacttgttttccccccttttattccctaggcccttttcagactcctgggcccttggatactcttctcccatctcccttcacaggatgacaccctcccataccccatagctggggccagcaggttctgctgagggtggggctggtgtagggacccccaagagacccctgtcctgtcccttcaccagtcctggggaggctgggactccccctgccacaagcctgggccacagctcacattccactgctgggagaagaaacaggccgaggcccagagtggcctgcccccgggagccaaagaccccagtggccacactgggatagggtggggaggctggcagccctcttttataaatattatacataagaccagc

SEQ ID NO: 3753 - protein, 462 aa, Homo sapiens
MEGKSFLQKSPSKEPHFTDFEGKTSFGMSVFNLSNAIMGSGILGLAYAMANTGIILFLFLLTAVALLSSYSIHLLLKSSGVVGIRAYEQLGYRAFGTPGKLAAALAITLQNIGAMSSYLYIIKSELPLVIQTFLNLEEKTSDWYMNGNYLVILVSVTIILPLALMRQLGYLGYSSGFSLSCMVFFLIAVIYKKFHVPCPLPPNFNNTTGNFSHVEIVKEKVQLQVEPEASAFCTPSYFTLNSQTAYTIPIMAFAFVCHPEVLPIYTELKDPSKKKMQHISNLSIAVMYIMYFLAALFGYLTFYNGVESELLHTYSKVDPFDVLILCVRVAVLTAVTLTVPIVLFPVRRAIQQMLFPNQEFSWLRHVLIAVGLLTCINLLVIFAPNILGIFGVIGATSAPFLIFIFPAIFYFRIMPTEKEPARSTPKILALCFAMLGFLLMTMSLSFIIIDWASGTSRHGGNH

SEQ ID NO: 3754 - DNA, 1343 bp, Homo sapiens
gtcgctgttgcagccgagttcagccgggagcagagcgaaccgcaccggcccgagcggagcgccgcacgttcccaaccgcgaggccagacatctgactgttggtgtgagaccagtgctcctggtggtgtgccctgagccatggaggcgcctttgcagacagagatggtggagctggtgcccaatggcaaacactcagaggggctgctcccggtcatcacccccatggcaggcaaccagaggtcgaggaccctgcacggagctgtatggagggcaagagcttcctacagaaaagtcccagcaaggagccacacttcactgacttcgaggggaagacatcattcgggatgtcagtgttcaacctcagcaatgccatcatgggcagcggcatcctgggactcgcctatgccatggccaatacgggcattatccttttcctgccctgtgttttgctatgcttggcttcttgctgatgaccatgagcttgagcttcatcatcattgactgggcctcagggaccagccggcatggaggaaaccactagggtgaccctcatcctgttctgtctactcaccctagcagccctgcccagactcttcagcccctgctcccatccagtggccagtcgggggaggagaaagacgcgattaacactgtggcattcagccaggccccatgtcctctctgtggaaggtttttgttcaagagccaggaccaaggcccttgggccactaccctgctaggctctggagctgtagaggcttcctgaactgggagcagggtagggctgtcgccttagatcccgcccaagcccctcattccctccttgcacagatgcatacactggggcccagcagctgcctcctgaggtgacacagcctgtaggaacatacacagctgggatcagcctgcagccatcccccgaccctgctgctaggccacggtctgcgccctggggcctcatctcccccagcccacttgttttccccccttttattccctaggcccttttcagactcctgggcccttggatactcttctcccatctcccttcacaggatgacaccctcccataccccatagctggggccagcaggttctgctgagggtggggctggtgtagggacccccaagagacccctgtcctgtcccttcaccagtcctggggaggctgggactccccctgccacaagcctgggccacagctcacattccactgctgggagaagaaacaggccgaggcccagagtggcctgcccccgggagccaaagaccccagtggccacactgggatagggtggggaggctggcagccctcttttataaatattatacataagaccagc

SEQ ID NO: 3755 - protein, 120 aa, Homo sapiens
MEAPLQTEMVELVPNGKHSEGLLPVITPMAGNQRSRTLHGAVWRARASYRKVPARSHTSLTSRGRHHSGCQCSTSAMPSWAAASWDSPMPWPIRALSFSCPVFCYAWLLADDHELELHHH

SEQ ID NO: 3756 - DNA, 562 bp, Homo sapiens
cgagttcagccgggagcagagcgaaccgcaccggcccgagcggagcgccgcacgttcccaaccgcgaggccagacatctgactgttggtgtgagaccagtgctcctggtggtgtgccctgagccatggaggcgcctttgcagacagagatggtggagctggtgcccaatggcaaacactcagaggggctgctcccggtcatcacccccatggcaggcaaccagaggtcgaggaccctgcacggagctgtatggagggcaagagcttcctacagaaaagtcccagcaaggagccacacttcactgacttcgaggggaagacatcattcgggatgtcagtgttcaacctcagcaatgccatcatgggcagcggcatcctgggactcgcctatgccatggccaatacgggcattatccttttcctgtgagtgccctcagagaaacttctaaagataggggccctaagcaagccaccaatcatgacctcccaggacccgccagttccctgtcccagcatccaggctgcagtgggtgggcacttcttacactaacaaaccgcggctg

SEQ ID NO: 3757 - protein, 107 aa, Homo sapiens
MEAPLQTEMVELVPNGKHSEGLLPVITPMAGNQRSRTLHGAVWRARASYRKVPARSHTSLTSRGRHHSGCQCSTSAMPSWAAASWDSPMPWPIRALSFSCECPQRNF

SEQ ID NO: 3758 - DNA, 2388 bp, Homo sapiens
acacgttgcccagccgtgtggctgggatggtcggtacccatggccgtgcggtcgagccttgatgctccaggacagtcctggaaggcttcctggcagatccgtgggaagaaagccgacagaagggcgggaggcgggaggggaaaggtcccccgggatgggtagggcctcaacgctgggcatcggcgcaggtgtgtactgcagggagccagccagaccccccacggactgcctgaccttgggggaagcccggagtagaggaagaggccggacccccagacccgccattgactatgtccgccattgactatgtgttctgagagaaatttttttttttttttttgagactgagtctcactctttcgcccaggccggagtgcagtggcgcgatctcggctcactgcaagctccgcctcccgggttcacgccattctcctgcctcagcctcccgagtagctgggactacaggcgcccgctaccgcgcccggctaattttttgtatttttaatagagacggggtttcaccgtgttagccaggatggtctcgatctcctgacctcgtgatccgcccgccttggcctcccagagtgctgggatgacaggcgtgagcctctgagagcaaattttacccagttcctctctatcctcccgatgactctgaaatcaaactcagcaagtcatccgagcccccacggcgcagcggccctaggctggcatgggcgatgcggagctactccgccctcaggaagcaggcgaggtgcccagcgggagaatcacccacatcaccgtctaatctctgctgtgaagtggaagcgcgagaaggagggagcgtctcatgacggagggtgtgaagacgctaggctggacgaagcagaaaggcgggtgtcactggggacgttctgagggtgctggggagtcagggaagagcaccatcgtcaagcagatgaagatcatccacgaggatggctactccgaggaggaatgccggcagtaccgggcggttgtctacagcaacaccatccagtccatcatggccattgtcaaagccatgggcaacctgcagatcgactttgccgacccctccagagcggacgacgccaggcagctatttgcactgtcctgcaccgccgaggagcaaggcgtgctccctgatgacctgtccggcgtcatccggaggctctgggctgaccatggtgtgcaggcctgctttggccgctcaagggaataccagctcaacgactcagctgcctactacctgaacgacctggagcgtattgcacagagtgactacatccccacacagcaagatgtgctacggacccgcgtaaagaccacggggatcgtggagacacacttcaccttcaaggacctacacttcaagatgtttgatgtgggtggtcagcggtctgagcggaagaagtggatccactgctttgagggcgtcacagccatcatcttctgcgtagccttgagcgcctatgacttggtgctagctgaggacgaggagatgaaccgcatgcatgagagcatgaagctattcgatagcatctgcaacaacaagtggttcacagacacgtccatcatcctcttcctcaacaagaaggacctgtttgaggagaagatcacacacagtcccctgaccatctgcttccctgagtacacaggggccaacaaatatgatgaggcagccagctacatccagagtaagtttgaggacctgaataagcgcaaagacaccaaggagatctacacgcacttcacgtgcgccaccgacaccaagaacgtgcagttcgtgtttgacgccgtcaccgatgtcatcatcaagaacaacctgaaggactgcggcctcttctgaggggcagcggggcctggcgggatgggccaccgccgactttgtaccccccaacccctgaggaagatgggggcaagaagatcacgctccccgcctgttcccccgccgcttttctcctctttcctctctttgttctcagctccccctgtcccctcagctccagacgtaggggaggggttgccacaggcctccctgtttgaagcctgcccttgtctgagatgctggtaatggccatggtacccccttctgggcatctgttctggtttttaaccattgtcttgttctgtgatgaggggaggggggcacatgctgagtctcccaaggctgcgtctggaggggcccctgcttctccagcctggacccccagctttgcccaacaccagcccctgccccagcccaagtccaaatgtttacagggagcctcctgcccagtcccccaaccccagccgctcggaggccccaaaggaaaaagcacaagaagcgtgagacgccaccattcctggaaaccacagtccacctgctcattctcgtagcttttt

SEQ ID NO: 3759 - protein, 339 aa, Homo sapiens
MTEGVKTLGWTKQKGGCHWGRSEGAGESGKSTIVKQMKIIHEDGYSEEECRQYRAVVYSNTIQSIMAIVKAMGNLQIDFADPSRADDARQLFALSCTAEEQGVLPDDLSGVIRRLWADHGVQACFGRSREYQLNDSAAYYLNDLERIAQSDYIPTQQDVLRTRVKTTGIVETHFTFKDLHFKMFDVGGQRSERKKWIHCFEGVTAIIFCVALSAYDLVLAEDEEMNRMHESMKLFDSICNNKWFTDTSIILFLNKKDLFEEKITHSPLTICFPEYTGANKYDEAASYIQSKFEDLNKRKDTKEIYTHFTCATDTKNVQFVFDAVTDVIIKNNLKDCGLF

SEQ ID NO: 3760 - DNA, 2423 bp, Homo sapiens
acacgttgcccagccgtgtggctgggatggtcggtacccatggccgtgcggtcgagccttgatgctccaggacagtcctggaaggcttcctggcagatccgtgggaagaaagccgacagaagggcgggaggcgggaggggaaaggtcccccgggatgggtagggcctcaacgctgggcatcggcgcaggtgtgtactgcagggagccagccagaccccccacggactgcctgaccttgggggaagcccggagtagaggaagaggccggacccccagacccgccattgactatgtccgccattgactatgtgttctgagagaaatttttttttttttttttgagactgagtctcactctttcgcccaggccggagtgcagtggcgcgatctcggctcactgcaagctccgcctcccgggttcacgccattctcctgcctcagcctcccgagtagctgggactacaggcgcccgctaccgcgcccggctaattttttgtatttttaatagagacggggtttcaccgtgttagccaggatggtctcgatctcctgacctcgtgatccgcccgccttggcctcccagagtgctgggatgacaggcgtgagcctctgagagcaaattttacccagttcctctctatcctcccgatgactctgaaatcaaactcagcaagtcatccgagcccccacggcgcagcggccctaggctggcatgggcgatgcggagctactccgccctcaggaagcaggcgaggtgcccagcgggagaatcacccacatcaccgtctaatctctgctgtgaagtggaagcgcgagaaggagggagcgtctcatgacggagggtgtgaagacgctaggctggacgaagcagaaaggcgggtgtcactggggacgttctgagggtgctggggagtcagggaagagcaccatcgtcaagcagatgaagatcatccacgaggatggctactccgaggaggaatgccggcagtaccgggcggttgtctacagcaacaccatccagtccatcatggccattgtcaaagccatgggcaacctgcagatcgactttgccgacccctccagagcggacgacgccaggcagctatttgcactgtcctgcaccgccgaggagcaaggcgtgctccctgatgacctgtccggcgtcatccggaggctctgggctgaccatggtgtgcaggcctgctttggccgctcaagggaataccagctcaacgactcagctgcctactacctgaacgacctggagcgtattgcacagagtgactacatccccacacagcaagatgtgctacggacccgcgtaaagaccacggggatcgtggagacacacttcaccttcaaggacctacacttcaagatgtttgatgtgggtggtcagcggtctgagcggaagaagtggatccactgctttgagggcgtcacagccatcatcttctgcgtagccttgagcgcctatgacttggtgctagctgaggacgaggagatgaaccgcatgcatgagagcatgaagctattcgatagcatctgcaacaacaagtggttcacagacacgtccatcatcctcttcctcaacaagaaggacctgtttgaggagaagatcacacacagtcccctgaccatctgcttccctgagtacacaggggccaacaaatatgatgaggcagccagctacatccagagtaagtttgaggacctgaataagcgcaaagacaccaaggagatctacacgcacttcacgtgcgccaccgacaccaagaacgtgcagttcgtgtttgacgccgtcaccgatgtcatcatcaagaacaacctgaaggactgcggcctcttctgaggggcagcggggcctggcgggatgggccaccgccgactttgtaccccccaacccctgaggaagatgggggcaagaagatcacgctccccgcctgttcccccgccgcttttctcctctttcctctctttgttctcagctccccctgtcccctcagctccagacgtaggggaggggttgccacaggcctccctgtttgaagcctgcccttgtctgagatgctggtaatggccatggtacccccttctgggcatctgttctggtttttaaccattgtcttgttctgtgatgaggggaggggggcacatgctgagtctcccaaggctgcgtctggaggggcccctgcttctccagcctggacccccagctttgcccaacaccagcccctgccccagcccaagtccaaatgtttacagggagcctcctgcccagtcccccaaccccagccgctcggaggccccaaaggaaaaagcacaagaagcgtgagacgccaccattcctggaaaccacagtccacctgctcattctcgtagctttttaaaaaaatgaaagtaaaggaaaaaaaaaaaactgc

SEQ ID NO: 3761 - protein, 339 aa, Homo sapiens; identical to SEQ ID NO: 3759

SEQ ID NO: 3762 - DNA, 2547 bp, Homo sapiens
acacgttgcccagccgtgtggctgggatggtcggtacccatggccgtgcggtcgagccttgatgctccaggacagtcctggaaggcttcctggcagatccgtgggaagaaagccgacagaagggcgggaggcgggaggggaaaggtcccccgggatgggtagggcctcaacgctgggcatcggcgcaggtgtgtactgcagggagccagccagaccccccacggactgcctgaccttgggggaagcccggagtagaggaagaggccggacccccagacccgccattgactatgtccgccattgactatgtgttctgagagaaatttttttttttttttttgagactgagtctcactctttcgcccaggccggagtgcagtggcgcgatctcggctcactgcaagctccgcctcccgggttcacgccattctcctgcctcagcctcccgagtagctgggactacaggcgcccgctaccgcgcccggctaattttttgtatttttaatagagacggggtttcaccgtgttagccaggatggtctcgatctcctgacctcgtgatccgcccgccttggcctcccagagtgctgggatgacaggcgtgagcctctgagagcaaattttacccagttcctctctatcctcccgatgactctgaaatcaaactcagcaagtcatccgagcccccacggcgcagcggccctaggctggcatgggcgatgcggagctactccgccctcaggaagcaggcgaggtgcccagcgggagaatcacccacatcaccgtctaatctctgctgtgaagtggaagcgcgagaaggagggagcgtctcatgacggagggtgtgaagacgctaggctggacgaagcagaaaggcgggtgtcactggggacgttctgagggcccctggttgctaaggctcagtgtggggagaagaagggctgctaccctgttggatggagtatgcagggcatcttcctgccagctctgcccagggcaccatattggcatgcaccagctgcacaggtgctggggagtcagggaagagcaccatcgtcaagcagatgaagatcatccacgaggatggctactccgaggaggaatgccggcagtaccgggcggttgtctacagcaacaccatccagtccatcatggccattgtcaaagccatgggcaacctgcagatcgactttgccgacccctccagagcggacgacgccaggcagctatttgcactgtcctgcaccgccgaggagcaaggcgtgctccctgatgacctgtccggcgtcatccggaggctctgggctgaccatggtgtgcaggcctgctttggccgctcaagggaataccagctcaacgactcagctgcctactacctgaacgacctggagcgtattgcacagagtgactacatccccacacagcaagatgtgctacggacccgcgtaaagaccacggggatcgtggagacacacttcaccttcaaggacctacacttcaagatgtttgatgtgggtggtcagcggtctgagcggaagaagtggatccactgctttgagggcgtcacagccatcatcttctgcgtagccttgagcgcctatgacttggtgctagctgaggacgaggagatgaaccgcatgcatgagagcatgaagctattcgatagcatctgcaacaacaagtggttcacagacacgtccatcatcctcttcctcaacaagaaggacctgtttgaggagaagatcacacacagtcccctgaccatctgcttccctgagtacacaggggccaacaaatatgatgaggcagccagctacatccagagtaagtttgaggacctgaataagcgcaaagacaccaaggagatctacacgcacttcacgtgcgccaccgacaccaagaacgtgcagttcgtgtttgacgccgtcaccgatgtcatcatcaagaacaacctgaaggactgcggcctcttctgaggggcagcggggcctggcgggatgggccaccgccgactttgtaccccccaacccctgaggaagatgggggcaagaagatcacgctccccgcctgttcccccgccgcttttctcctctttcctctctttgttctcagctccccctgtcccctcagctccagacgtaggggaggggttgccacaggcctccctgtttgaagcctgcccttgtctgagatgctggtaatggccatggtacccccttctgggcatctgttctggtttttaaccattgtcttgttctgtgatgaggggaggggggcacatgctgagtctcccaaggctgcgtctggaggggcccctgcttctccagcctggacccccagctttgcccaacaccagcccctgccccagcccaagtccaaatgtttacagggagcctcctgcccagtcccccaaccccagccgctcggaggccccaaaggaaaaagcacaagaagcgtgagacgccaccattcctggaaaccacagtccacctgctcattctcgtagctttttaaaaaaatgaaagtaaaggaaaaaaaaaaaactgc

SEQ ID NO: 3763 - protein, 339 aa, Homo sapiens
MEYAGHLPASSAQGTILACTSCTGAGESGKSTIVKQMKIIHEDGYSEEECRQYRAVVYSNTIQSIMAIVKAMGNLQIDFADPSRADDARQLFALSCTAEEQGVLPDDLSGVIRRLWADHGVQACFGRSREYQLNDSAAYYLNDLERIAQSDYIPTQQDVLRTRVKTTGIVETHFTFKDLHFKMFDVGGQRSERKKWIHCFEGVTAIIFCVALSAYDLVLAEDEEMNRMHESMKLFDSICNNKWFTDTSIILFLNKKDLFEEKITHSPLTICFPEYTGANKYDEAASYIQSKFEDLNKRKDTKEIYTHFTCATDTKNVQFVFDAVTDVIIKNNLKDCGLF

SEQ ID NO: 3764 - DNA, 2990 bp, Homo sapiens
acacgttgcccagccgtgtggctgggatggtcggtacccatggccgtgcggtcgagccttgatgctccaggacagtcctggaaggcttcctggcagatccgtgggaagaaagccgacagaagggcgggaggcgggaggggaaaggtcccccgggatgggtagggcctcaacgctgggcatcggcgcaggtgtgtactgcagggagccagccagaccccccacggactgcctgaccttgggggaagcccggagtagaggaagaggccggacccccagacccgccattgactatgtccgccattgactatgtgttctgagagaaatttttttttttttttttgagactgagtctcactctttcgcccaggccggagtgcagtggcgcgatctcggctcactgcaagctccgcctcccgggttcacgccattctcctgcctcagcctcccgagtagctgggactacaggcgcccgctaccgcgcccggctaattttttgtatttttaatagagacggggtttcaccgtgttagccaggatggtctcgatctcctgacctcgtgatccgcccgccttggcctcccagagtgctgggatgacaggcgtgagcctctgagagcaaattttacccagttcctctctatcctcccgatgactctgaaatcaaactcagcaagtcatccgagcccccacggcgcagcggccctaggctggcatgggcgatgcggagctactccgccctcaggaagcaggcgaggtgcccagcgggagaatcacccacatcaccgtctaatctctgctgtgaagtggaagcgcgagaaggagggagcgtctcatgacggagggtgtgaagacgctaggctggacgaagcagaaaggcgggtgtcactggggacgttctgagggcccctggttgctaaggctcagtgtggggagaagaagggctgctaccctgttggatggagtatgcagggcatcttcctgccagctctgcccagggcaccatattggcatgcaccagctgcacaggtgctggggagtcagggaagagcaccatcgtcaagcagatgaagatcatccacgaggatggctactccgaggaggaatgccggcagtaccgggcggttgtctacagcaacaccatccagtccatcatggccattgtcaaagccatgggcaacctgcagatcgactttgccgacccctccagagcggacgacgccaggcagctatttgcactgtcctgcaccgccgaggagcaaggcgtgctccctgatgacctgtccggcgtcatccggaggctctgggctgaccatggtgtgcaggcctgctttggccgctcaagggaataccagctcaacgactcagctgcctactacctgaacgacctggagcgtattgcacagagtgactacatccccacacagcaagatgtgctacggacccgcgtaaagaccacggggatcgtggagacacacttcaccttcaaggacctacacttcaagatgtttgatgtgggtggtcagcggtctgagcggaagaagtggatccactgctttgagggcgtcacagccatcatcttctgcgtagccttgagcgcctatgacttggtgctagctgaggacgaggagatgaaccgcatgcatgagagcatgaagctattcgatagcatctgcaacaacaagtggttcacagacacgtccatcatcctcttcctcaacaagaaggacctgtttgaggagaagatcacacacagtcccctgaccatctgcttccctgagtacacaggggccaacaaatatgatgaggcagccagctacatccagagtaagtttgaggacctgaataagcgcaaagacaccaaggagatctacacgcacttcacgtgcgccaccgacaccaagaacgtgcagttcgtgtttgacgccgtcaccgatgtcatcatcaagaacaacctgaaggactgcggcctcttctgaggggcagcggggcctggcgggatgggccaccgccgactttgtaccccccaacccctgaggaagatgggggcaagaagatcacgctccccgcctgttcccccgccgcttttctcctctttcctctctttgttctcagctccccctgtcccctcagctccagacgtaggggaggggttgccacaggcctccctgtttgaagcctgcccttgtctgagatgctggtaatggccatggtacccccttctgggcatctgttctggtttttaaccattgtcttgttctgtgatgaggggaggggggcacatgctgagtctcccaaggctgcgtctggaggggcccctgcttctccagcctggacccccagctttgcccaacaccagcccctgccccagcccaagtccaaatgtttacagggagcctcctgcccagtcccccaaccccagccgctcggaggccccaaaggaaaaagcacaagaagcgtgagacgccaccattcctggaaaccacagtccacctgctcattctcgtagctttttaaaaaaatgaaagtaaaggaaaaaaaaaaaactgcaaatctagaaaactttttagagaaaaactatttaaaactgtcagatcctgaccagcaagcccccccccagccccccttccaagtgactccgtgccttgagtgtgtctgcgtgtttacacccgtccctctgctggccgcccccgtgcgagcggcacccctgccctgccctccacagaattgggttccaagggctgttccagacaactgccaacgtcactgagggccctgccccagcggccctggccccaggctctattaacctaaaatgtagctccctagcgctaacctaggaaccgccgctgcctgctggggggccacgcccctcatgcccttgtcccaggcccggggccttcagcgttgaacacttccttgcttttttcacatgttttatggaattgttcacctggtttgaaataataaaatgtagaaagaaaaaaaatacc

SEQ ID NO: 3765 - protein, 339 aa, Homo sapiens; identical to SEQ ID NO: 3763

SEQ ID NO: 3766 - DNA, 2866 bp, Homo sapiens
acacgttgcccagccgtgtggctgggatggtcggtacccatggccgtgcggtcgagccttgatgctccaggacagtcctggaaggcttcctggcagatccgtgggaagaaagccgacagaagggcgggaggcgggaggggaaaggtcccccgggatgggtagggcctcaacgctgggcatcggcgcaggtgtgtactgcagggagccagccagaccccccacggactgcctgaccttgggggaagcccggagtagaggaagaggccggacccccagacccgccattgactatgtccgccattgactatgtgttctgagagaaatttttttttttttttttgagactgagtctcactctttcgcccaggccggagtgcagtggcgcgatctcggctcactgcaagctccgcctcccgggttcacgccattctcctgcctcagcctcccgagtagctgggactacaggcgcccgctaccgcgcccggctaattttttgtatttttaatagagacggggtttcaccgtgttagccaggatggtctcgatctcctgacctcgtgatccgcccgccttggcctcccagagtgctgggatgacaggcgtgagcctctgagagcaaattttacccagttcctctctatcctcccgatgactctgaaatcaaactcagcaagtcatccgagcccccacggcgcagcggccctaggctggcatgggcgatgcggagctactccgccctcaggaagcaggcgaggtgcccagcgggagaatcacccacatcaccgtctaatctctgctgtgaagtggaagcgcgagaaggagggagcgtctcatgacggagggtgtgaagacgctaggctggacgaagcagaaaggcgggtgtcactggggacgttctgagggtgctggggagtcagggaagagcaccatcgtcaagcagatgaagatcatccacgaggatggctactccgaggaggaatgccggcagtaccgggcggttgtctacagcaacaccatccagtccatcatggccattgtcaaagccatgggcaacctgcagatcgactttgccgacccctccagagcggacgacgccaggcagctatttgcactgtcctgcaccgccgaggagcaaggcgtgctccctgatgacctgtccggcgtcatccggaggctctgggctgaccatggtgtgcaggcctgctttggccgctcaagggaataccagctcaacgactcagctgcctactacctgaacgacctggagcgtattgcacagagtgactacatccccacacagcaagatgtgctacggacccgcgtaaagaccacggggatcgtggagacacacttcaccttcaaggacctacacttcaagatgtttgatgtgggtggtcagcggtctgagcggaagaagtggatccactgctttgagggcgtcacagccatcatcttctgcgtagccttgagcgcctatgacttggtgctagctgaggacgaggagatgaaccgcatgcatgagagcatgaagctattcgatagcatctgcaacaacaagtggttcacagacacgtccatcatcctcttcctcaacaagaaggacctgtttgaggagaagatcacacacagtcccctgaccatctgcttccctgagtacacaggggccaacaaatatgatgaggcagccagctacatccagagtaagtttgaggacctgaataagcgcaaagacaccaaggagatctacacgcacttcacgtgcgccaccgacaccaagaacgtgcagttcgtgtttgacgccgtcaccgatgtcatcatcaagaacaacctgaaggactgcggcctcttctgaggggcagcggggcctggcgggatgggccaccgccgactttgtaccccccaacccctgaggaagatgggggcaagaagatcacgctccccgcctgttcccccgccgcttttctcctctttcctctctttgttctcagctccccctgtcccctcagctccagacgtaggggaggggttgccacaggcctccctgtttgaagcctgcccttgtctgagatgctggtaatggccatggtacccccttctgggcatctgttctggtttttaaccattgtcttgttctgtgatgaggggaggggggcacatgctgagtctcccaaggctgcgtctggaggggcccctgcttctccagcctggacccccagctttgcccaacaccagcccctgccccagcccaagtccaaatgtttacagggagcctcctgcccagtcccccaaccccagccgctcggaggccccaaaggaaaaagcacaagaagcgtgagacgccaccattcctggaaaccacagtccacctgctcattctcgtagctttttaaaaaaatgaaagtaaaggaaaaaaaaaaaactgcaaatctagaaaactttttagagaaaaactatttaaaactgtcagatcctgaccagcaagcccccccccagccccccttccaagtgactccgtgccttgagtgtgtctgcgtgtttacacccgtccctctgctggccgcccccgtgcgagcggcacccctgccctgccctccacagaattgggttccaagggctgttccagacaactgccaacgtcactgagggccctgccccagcggccctggccccaggctctattaacctaaaatgtagctccctagcgctaacctaggaaccgccgctgcctgctggggggccacgcccctcatgcccttgtcccaggcccggggccttcagcgttgaacacttccttgcttttttcacatgttttatggaattgttcacctggtttgaaataataaaatgtagaaagaaaaaaaatacc

SEQ ID NO: 3767 - protein, 339 aa, Homo sapiens; identical to SEQ ID NO: 3759

SEQ ID NO: 3768 - DNA, 3898 bp, Homo sapiens
attaaattaaattccaggaagcagtgctaatgacagccctaacgagtcacgggagaggctaccagccccagcctttggaaagcatggcaaggaggactaggcaataacatgaacaaagcagtagctcctgggaatagaattgattatcatttcccaggccccccaaggaccctgggcttcccaggggaggtggcctttggagactgcctatgcaacaggcacagtggcaggttgtaccatgaactcttcaaggacaaagaaaaggagggaggttaagtttaggccttggccccaaagccctgagagctcctgagttccctgcagggcttgggtagctcctccccagtcatacaggaacaccctgaatgccagaaccagttgggtttgtagggctaggtgtggatcactggcttggagatgttggtgcccctacctcagcatcccctggagactttggaaccccctgtgtggcttgttcctccatgatgcctcatggcagtcccctctcacaccagtcttctcttgctctcgctattctggcccggctggactcctctctggtttgggagcatccagctccttcccaacccagggcccttgcacttgctgctgcctctgtcgtcactctcttctggcttgttacaagactggtccttccacatgattcaaagatcccctcctcagactatcttctcctgcacatacctcccagtggctctagtgtcaccctgttgatttcctctgaaatggtgaagttcatttccctgtttgtttggtgtgtgttcctcaaggacagggcccagctgcctcttttaccatagggttctcagcacattggcaggcaatatgttcagggaacagtggttgaacagatgaccccttcctctggatcctcccgcactgccccccagccgccacccctgtgtcaggttgggcccccttgcctaatccagaagcttatggggaaggggtgctggggcctgaattctccaggtcaaagccaatgatctgtgaagagggtggatgaccagaaagggggactttgggatccaggacccccaggcttttgagttttcctcctggacgaagagaggcctgggaagaggggtctgcaagggagcagggagggagggcaggatggctgactccagtttcagaacttccactgggctaagaagcaggaaggggaaagcgcaggagttgaaccaggaagtagaacctgccccagggcagtaaggcgggagcaagctgtagccacgaggtctacaagcagtagctgcaaggctgtgattgagttggtcacaggtccttggccagggactccctgtcatctgggagccgtggaggtagggtggtcaggatcctgaactctgggcatccctgtggggtcctacctagtcctggactctgggcagggacaggcacacccaccccgaaactgcctttggggaagtgctagcagcttccccttcctagagcctgcaggcaagcatgtcacagcccactgagagggtcttcattcctcaacctgctcagggctactgctcgataggaactcaggccaagctggacctgctgtgctgcctgtggtgagccccaagactattctggcagtaggggtgaaccagcagctgccacttctccattccagctgaggggccaccctcaactctgctgatgtcattccattgtcctttatggtctagtccaagcggtgctgggcctggtgggcatggggtcaagtcatgcctcctctggtgctcgtgaggccctggctaggcagctgccctctgcccccaaaatgaactctcctgaaaggactcctggattcctgagtatgaagaaactgagatgcccacgatgtacctcactgatgactgtgactggctcctggcccactctggacctcagctgactcagctgcaaagcaaggggtgctggggagtcagggaagagcaccatcgtcaagcagatgaagatcatccacgaggatggctactccgaggaggaatgccggcagtaccgggcggttgtctacagcaacaccatccagtccatcatggccattgtcaaagccatgggcaacctgcagatcgactttgccgacccctccagagcggacgacgccaggcagctatttgcactgtcctgcaccgccgaggagcaaggcgtgctccctgatgacctgtccggcgtcatccggaggctctgggctgaccatggtgtgcaggcctgctttggccgctcaagggaataccagctcaacgactcagctgcctactacctgaacgacctggagcgtattgcacagagtgactacatccccacacagcaagatgtgctacggacccgcgtaaagaccacggggatcgtggagacacacttcaccttcaaggacctacacttcaagatgtttgatgtgggtggtcagcggtctgagcggaagaagtggatccactgctttgagggcgtcacagccatcatcttctgcgtagccttgagcgcctatgacttggtgctagctgaggacgaggagatgaaccgcatgcatgagagcatgaagctattcgatagcatctgcaacaacaagtggttcacagacacgtccatcatcctcttcctcaacaagaaggacctgtttgaggagaagatcacacacagtcccctgaccatctgcttccctgagtacacaggggccaacaaatatgatgaggcagccagctacatccagagtaagtttgaggacctgaataagcgcaaagacaccaaggagatctacacgcacttcacgtgcgccaccgacaccaagaacgtgcagttcgtgtttgacgccgtcaccgatgtcatcatcaagaacaacctgaaggactgcggcctcttctgaggggcagcggggcctggcgggatgggccaccgccgactttgtaccccccaacccctgaggaagatgggggcaagaagatcacgctccccgcctgttcccccgccgcttttctcctctttcctctctttgttctcagctccccctgtcccctcagctccagacgtaggggaggggttgccacaggcctccctgtttgaagcctgcccttgtctgagatgctggtaatggccatggtacccccttctgggcatctgttctggtttttaaccattgtcttgttctgtgatgaggggaggggggcacatgctgagtctcccaaggctgcgtctggaggggcccctgcttctccagcctggacccccagctttgcccaacaccagcccctgccccagcccaagtccaaatgtttacagggagcctcctgcccagtcccccaaccccagccgctcggaggccccaaaggaaaaagcacaagaagcgtgagacgccaccattcctggaaaccacagtccacctgctcattctcgtagctttttaaaaaaatgaaagtaaaggaaaaaaaaaaaactgcaaatctagaaaactttttagagaaaaactatttaaaactgtcagatcctgaccagcaagcccccccccagccccccttccaagtgactccgtgccttgagtgtgtctgcgtgtttacacccgtccctctgctggccgcccccgtgcgagcggcacccctgccctgccctccacagaattgggttccaagggctgttccagacaactgccaacgtcactgagggccctgccccagcggccctggccccaggctctattaacctaaaatgtagctccctagcgctaacctaggaaccgccgctgcctgctggggggccacgcccctcatgcccttgtcccaggcccggggccttcagcgttgaacacttccttgcttttttcacatgttttatggaattgttcacctggtttgaaataataaaatgtagaaagaaaaaaaatacc

SEQ ID NO: 3769 - protein, 303 aa, Homo sapiens
MKIIHEDGYSEEECRQYRAVVYSNTIQSIMAIVKAMGNLQIDFADPSRADDARQLFALSCTAEEQGVLPDDLSGVIRRLWADHGVQACFGRSREYQLNDSAAYYLNDLERIAQSDYIPTQQDVLRTRVKTTGIVETHFTFKDLHFKMFDVGGQRSERKKWIHCFEGVTAIIFCVALSAYDLVLAEDEEMNRMHESMKLFDSICNNKWFTDTSIILFLNKKDLFEEKITHSPLTICFPEYTGANKYDEAASYIQSKFEDLNKRKDTKEIYTHFTCATDTKNVQFVFDAVTDVIIKNNLKDCGLF

SEQ ID NO: 3770 - DNA, 284 bp, Homo sapiens
atgcctcctctggtgctcgtgaggccctggctaggcagctgccctctgcccccaaaatgaactctcctgaaaggactcctggattcctgagtatgaagaaactgagatgcccacgatgtacctcactgatgactgtgactggctcctggcccactctggacctcagctgactcagctgcaaagcaagggattggagtccaggatggctgcctgccgaagaatgcctcccggtagattggggaaggatggatatgagaagccacccagctaaaggagacagccta

SEQ ID NO: 3771 - protein, 54 aa, Homo sapiens
MPTMYLTDDCDWLLAHSGPQLTQLQSKGLESRMAACRRMPPGRLGKDGYEKPPS

SEQ ID NO: 3772 - DNA, 1988 bp, Homo sapiens
agtgccgggtcccggggtttggaaccacccctattgccttttctccgcgtggccccgcctgcagcccaggcccgagcctgggctgcgcctaacttcccccttcgctccgccctcgagccaatcaacagcctctaatctcctctggccccgcctgcaagcccgccccggcccagtcacaggcttggttcgcccaggccccacccccggcccgccccgccgtcggtgcgcggcggtagggaaggcgcctcccgcagtcgctcggaactgccgacccgagtgcttcccgcagagggctggtggtgggagcggagtgggtcgggcggggccgagccgggccgtgggccgtgtgggggccgggcggcggccgggccggcggacggcgggatgggctgcaccgtgagcgccgaggacaaggcggcggccgagcgctctaagatgatcgacaagaacctgcgggaggacggagagaaggcggcgcgggaggtgaagttgctgctgttgggtgctggggagtcagggaagagcaccatcgtcaagcagatgaagatcatccacgaggatggctactccgaggaggaatgccggcagtaccgggcggttgtctacagcaacaccatccagtccatcatggccattgtcaaagccatgggcaacctgcagatcgactttgccgacccctccagagcggacgacgccaggcagctatttgcactgtcctgcaccgccgaggagcaaggcgtgctccctgatgacctgtccggcgtcatccggaggctctgggctgaccatggtgtgcaggcctgctttggccgctcaagggaataccagctcaacgactcagctgcctactacctgaacgacctggagcgtattgcacagagtgactacatccccacacagcaagatgtgctacggacccgcgtaaagaccacggggatcgtggagacacacttcaccttcaaggacctacacttcaagatgtttgatgtgggtggtcagcggtctgagcggaagaagtggatccactgctttgagggcgtcacagccatcatcttctgcgtagccttgagcgcctatgacttggtgctagctgaggacgaggagatgaaccgcatgcatgagagcatgaagctattcgatagcatctgcaacaacaagtggttcacagacacgtccatcatcctcttcctcaacaagaaggacctgtttgaggagaagatcacacacagtcccctgaccatctgcttccctgagtacacaggggccaacaaatatgatgaggcagccagctacatccagagtaagtttgaggacctgaataagcgcaaagacaccaaggagatctacacgcacttcacgtgcgccaccgacaccaagaacgtgcagttcgtgtttgacgccgtcaccgatgtcatcatcaagaacaacctgaaggactgcggcctcttctgaggggcagcggggcctggcgggatgggccaccgccgactttgtaccccccaacccctgaggaagatgggggcaagaagatcacgctccccgcctgttcccccgccgcttttctcctctttcctctctttgttctcagctccccctgtcccctcagctccagacgtaggggaggggttgccacaggcctccctgtttgaagcctgcccttgtctgagatgctggtaatggccatggtacccccttctgggcatctgttctggtttttaaccattgtcttgttctgtgatgaggggaggggggcacatgctgagtctcccaaggctgcgtctggaggggcccctgcttctccagcctggacccccagctttgcccaacaccagcccctgccccagcccaagtccaaatgtttacagggagcctcctgcccagtcccccaaccccagccgctcggaggccccaaaggaaaaagcacaagaagcgtgagacgccaccattcctggaaaccacagtccacctgctcattctcgtagcttttt

SEQ ID NO: 3773 - protein, 355 aa, Homo sapiens; identical to SEQ ID NO: 365

SEQ ID NO: 3774 - DNA, 2641 bp, Homo sapiens
agtgccgggtcccggggtttggaaccacccctattgccttttctccgcgtggccccgcctgcagcccaggcccgagcctgggctgcgcctaacttcccccttcgctccgccctcgagccaatcaacagcctctaatctcctctggccccgcctgcaagcccgccccggcccagtcacaggcttggttcgcccaggccccacccccggcccgccccgccgtcggtgcgcggcggtagggaaggcgcctcccgcagtcgctcggaactgccgacccgagtgcttcccgcagagggctggtggtgggagcggagtgggtcgggcggggccgagccgggccgtgggccgtgtgggggccgggcggcggccgggccggcggacggcgggatgggctgcaccgtgagcgccgaggacaaggcggcggccgagcgctctaagatgatcgacaagaacctgcgggaggacggagagaaggcggcgcgggaggtgaagttgctgctgttgggtgctggggagtcagggaagagcaccatcgtcaagcagatgaagatcatccacgaggatggctactccgaggaggaatgccggcagtaccgggcggttgtctacagcaacaccatccagtccatcatggccattgtcaaagccatgggcaacctgcagatcgactttgccgacccctccagagcggacgacgccaggcagctatttgcactgtcctgcaccgccgaggagcaaggcgtgctccctgatgacctgtccggcgtcatccggaggctctgggctgaccatggtgtgcaggcctgctttggccgctcaagggaataccagctcaacgactcagctgcctactacctgaacgacctggagcgtattgcacagagtgactacatccccacacagcaagatgtgctacggacccgcgtaaagaccacggggatcgtggagacacacttcaccttcaaggacctacacttcaagatgtttgatgtgggtggtcagcggtctgagcggaagaagtggatccactgctttgagggcgtcacagccatcatcttctgcgtagccttgagcgcctatgacttggtgctagctgaggacgaggagatgaaccgcatgcatgagagcatgaagctattcgatagcatctgcaacaacaagtggttcacagacacgtccatcatcctcttcctcaacaagaaggacctgtttgaggagaagatcacacacagtcccctgaccatctgcttccctgagtacacaggggccaacaaatatgatgaggcagccagctacatccagagtaagtttgaggacctgaataagcgcaaagacaccaaggagatctacacgcacttcacgtgcgccaccgacaccaagaacgtgcagttcgtgtttgacgccgtcaccgatgtcatcatcaagaacaacctgaaggactgcggcctcttctgaggggcagcggggcctggcgggatggtgagccagaggggctgtggcagggtgctggggaagaactaagcgggcctggagccccagcagggggttctgggggtgggtaggggggtgaacctggagggggaggggcaataggtgaccaggggacaagggaggagaaggcccagggtgtgaatcaggaggtcaagtgagtgaggtgcagggcatggaggaggtcatacaagcaggcctggcccagtggtccagacagaagggcctggccttgccctgggacagaaccagaggccatcctgatgttccctggagaaatctcacctcctcacccaccaggccattggcccagcctgccggaagctgcatgccagcggagcccagccctgctgcccactaccaccagctccatgtgcacctccagctcttgccctctgacttgtctgagcgtcccgggcttaggctggccccactggccctggtggaggtggggatgactctcccagtgccacagactcccctcccccacgtaacccagcaacagaaactggctcctgggcggcaactgtgtccctggtaacaaatgggtaggaaaaatagagaagggtcattgtctagggaggcgggagagaggcacgccctggctgcttcccgatccatgctctgctttcccccacctccagggccaccgccgactttgtaccccccaacccctgaggaagatgggggcaagaagatcacgctccccgcctgttcccccgccgcttttctcctctttcctctctttgttctcagctccccctgtcccctcagctccagacgtaggggaggggttgccacaggcctccctgtttgaagcctgcccttgtctgagatgctggtaatggccatggtacccccttctgggcatctgttctggtttttaaccattgtcttgttctgtgatgaggggaggggggcacatgctgagtctcccaaggctgcgtctggaggggcccctgcttctccagcctggacccccagctttgcccaacaccagcccctgccccagcccaagtccaaatgtttacagggagcctcctgcccagtcccccaaccccagccgctcggaggccccaaaggaaaaagcacaagaagcgtgagacgccaccattcctggaaaccacagtccacctgctcattctcgtagcttttt

SEQ ID NO: 3775 - protein, 355 aa, Homo sapiens; identical to SEQ ID NO: 365

SEQ ID NO: 3776 - DNA, 2023 bp, Homo sapiens
agtgccgggtcccggggtttggaaccacccctattgccttttctccgcgtggccccgcctgcagcccaggcccgagcctgggctgcgcctaacttcccccttcgctccgccctcgagccaatcaacagcctctaatctcctctggccccgcctgcaagcccgccccggcccagtcacaggcttggttcgcccaggccccacccccggcccgccccgccgtcggtgcgcggcggtagggaaggcgcctcccgcagtcgctcggaactgccgacccgagtgcttcccgcagagggctggtggtgggagcggagtgggtcgggcggggccgagccgggccgtgggccgtgtgggggccgggcggcggccgggccggcggacggcgggatgggctgcaccgtgagcgccgaggacaaggcggcggccgagcgctctaagatgatcgacaagaacctgcgggaggacggagagaaggcggcgcgggaggtgaagttgctgctgttgggtgctggggagtcagggaagagcaccatcgtcaagcagatgaagatcatccacgaggatggctactccgaggaggaatgccggcagtaccgggcggttgtctacagcaacaccatccagtccatcatggccattgtcaaagccatgggcaacctgcagatcgactttgccgacccctccagagcggacgacgccaggcagctatttgcactgtcctgcaccgccgaggagcaaggcgtgctccctgatgacctgtccggcgtcatccggaggctctgggctgaccatggtgtgcaggcctgctttggccgctcaagggaataccagctcaacgactcagctgcctactacctgaacgacctggagcgtattgcacagagtgactacatccccacacagcaagatgtgctacggacccgcgtaaagaccacggggatcgtggagacacacttcaccttcaaggacctacacttcaagatgtttgatgtgggtggtcagcggtctgagcggaagaagtggatccactgctttgagggcgtcacagccatcatcttctgcgtagccttgagcgcctatgacttggtgctagctgaggacgaggagatgaaccgcatgcatgagagcatgaagctattcgatagcatctgcaacaacaagtggttcacagacacgtccatcatcctcttcctcaacaagaaggacctgtttgaggagaagatcacacacagtcccctgaccatctgcttccctgagtacacaggggccaacaaatatgatgaggcagccagctacatccagagtaagtttgaggacctgaataagcgcaaagacaccaaggagatctacacgcacttcacgtgcgccaccgacaccaagaacgtgcagttcgtgtttgacgccgtcaccgatgtcatcatcaagaacaacctgaaggactgcggcctcttctgaggggcagcggggcctggcgggatgggccaccgccgactttgtaccccccaacccctgaggaagatgggggcaagaagatcacgctccccgcctgttcccccgccgcttttctcctctttcctctctttgttctcagctccccctgtcccctcagctccagacgtaggggaggggttgccacaggcctccctgtttgaagcctgcccttgtctgagatgctggtaatggccatggtacccccttctgggcatctgttctggtttttaaccattgtcttgttctgtgatgaggggaggggggcacatgctgagtctcccaaggctgcgtctggaggggcccctgcttctccagcctggacccccagctttgcccaacaccagcccctgccccagcccaagtccaaatgtttacagggagcctcctgcccagtcccccaaccccagccgctcggaggccccaaaggaaaaagcacaagaagcgtgagacgccaccattcctggaaaccacagtccacctgctcattctcgtagctttttaaaaaaatgaaagtaaaggaaaaaaaaaaaactgc

SEQ ID NO: 3777 - protein, 355 aa, Homo sapiens; identical to SEQ ID NO: 365

SEQ ID NO: 3778 - DNA, 2676 bp, Homo sapiens
agtgccgggtcccggggtttggaaccacccctattgccttttctccgcgtggccccgcctgcagcccaggcccgagcctgggctgcgcctaacttcccccttcgctccgccctcgagccaatcaacagcctctaatctcctctggccccgcctgcaagcccgccccggcccagtcacaggcttggttcgcccaggccccacccccggcccgccccgccgtcggtgcgcggcggtagggaaggcgcctcccgcagtcgctcggaactgccgacccgagtgcttcccgcagagggctggtggtgggagcggagtgggtcgggcggggccgagccgggccgtgggccgtgtgggggccgggcggcggccgggccggcggacggcgggatgggctgcaccgtgagcgccgaggacaaggcggcggccgagcgctctaagatgatcgacaagaacctgcgggaggacggagagaaggcggcgcgggaggtgaagttgctgctgttgggtgctggggagtcagggaagagcaccatcgtcaagcagatgaagatcatccacgaggatggctactccgaggaggaatgccggcagtaccgggcggttgtctacagcaacaccatccagtccatcatggccattgtcaaagccatgggcaacctgcagatcgactttgccgacccctccagagcggacgacgccaggcagctatttgcactgtcctgcaccgccgaggagcaaggcgtgctccctgatgacctgtccggcgtcatccggaggctctgggctgaccatggtgtgcaggcctgctttggccgctcaagggaataccagctcaacgactcagctgcctactacctgaacgacctggagcgtattgcacagagtgactacatccccacacagcaagatgtgctacggacccgcgtaaagaccacggggatcgtggagacacacttcaccttcaaggacctacacttcaagatgtttgatgtgggtggtcagcggtctgagcggaagaagtggatccactgctttgagggcgtcacagccatcatcttctgcgtagccttgagcgcctatgacttggtgctagctgaggacgaggagatgaaccgcatgcatgagagcatgaagctattcgatagcatctgcaacaacaagtggttcacagacacgtccatcatcctcttcctcaacaagaaggacctgtttgaggagaagatcacacacagtcccctgaccatctgcttccctgagtacacaggggccaacaaatatgatgaggcagccagctacatccagagtaagtttgaggacctgaataagcgcaaagacaccaaggagatctacacgcacttcacgtgcgccaccgacaccaagaacgtgcagttcgtgtttgacgccgtcaccgatgtcatcatcaagaacaacctgaaggactgcggcctcttctgaggggcagcggggcctggcgggatggtgagccagaggggctgtggcagggtgctggggaagaactaagcgggcctggagccccagcagggggttctgggggtgggtaggggggtgaacctggagggggaggggcaataggtgaccaggggacaagggaggagaaggcccagggtgtgaatcaggaggtcaagtgagtgaggtgcagggcatggaggaggtcatacaagcaggcctggcccagtggtccagacagaagggcctggccttgccctgggacagaaccagaggccatcctgatgttccctggagaaatctcacctcctcacccaccaggccattggcccagcctgccggaagctgcatgccagcggagcccagccctgctgcccactaccaccagctccatgtgcacctccagctcttgccctctgacttgtctgagcgtcccgggcttaggctggccccactggccctggtggaggtggggatgactctcccagtgccacagactcccctcccccacgtaacccagcaacagaaactggctcctgggcggcaactgtgtccctggtaacaaatgggtaggaaaaatagagaagggtcattgtctagggaggcgggagagaggcacgccctggctgcttcccgatccatgctctgctttcccccacctccagggccaccgccgactttgtaccccccaacccctgaggaagatgggggcaagaagatcacgctccccgcctgttcccccgccgcttttctcctctttcctctctttgttctcagctccccctgtcccctcagctccagacgtaggggaggggttgccacaggcctccctgtttgaagcctgcccttgtctgagatgctggtaatggccatggtacccccttctgggcatctgttctggtttttaaccattgtcttgttctgtgatgaggggaggggggcacatgctgagtctcccaaggctgcgtctggaggggcccctgcttctccagcctggacccccagctttgcccaacaccagcccctgccccagcccaagtccaaatgtttacagggagcctcctgcccagtcccccaaccccagccgctcggaggccccaaaggaaaaagcacaagaagcgtgagacgccaccattcctggaaaccacagtccacctgctcattctcgtagctttttaaaaaaatgaaagtaaaggaaaaaaaaaaaactgc

SEQ ID NO: 3779 - protein, 355 aa, Homo sapiens; identical to SEQ ID NO: 365

SEQ ID NO: 3780 - DNA, 2466 bp, Homo sapiens
agtgccgggtcccggggtttggaaccacccctattgccttttctccgcgtggccccgcctgcagcccaggcccgagcctgggctgcgcctaacttcccccttcgctccgccctcgagccaatcaacagcctctaatctcctctggccccgcctgcaagcccgccccggcccagtcacaggcttggttcgcccaggccccacccccggcccgccccgccgtcggtgcgcggcggtagggaaggcgcctcccgcagtcgctcggaactgccgacccgagtgcttcccgcagagggctggtggtgggagcggagtgggtcgggcggggccgagccgggccgtgggccgtgtgggggccgggcggcggccgggccggcggacggcgggatgggctgcaccgtgagcgccgaggacaaggcggcggccgagcgctctaagatgatcgacaagaacctgcgggaggacggagagaaggcggcgcgggaggtgaagttgctgctgttgggtgctggggagtcagggaagagcaccatcgtcaagcagatgaagatcatccacgaggatggctactccgaggaggaatgccggcagtaccgggcggttgtctacagcaacaccatccagtccatcatggccattgtcaaagccatgggcaacctgcagatcgactttgccgacccctccagagcggacgacgccaggcagctatttgcactgtcctgcaccgccgaggagcaaggcgtgctccctgatgacctgtccggcgtcatccggaggctctgggctgaccatggtgtgcaggcctgctttggccgctcaagggaataccagctcaacgactcagctgcctactacctgaacgacctggagcgtattgcacagagtgactacatccccacacagcaagatgtgctacggacccgcgtaaagaccacggggatcgtggagacacacttcaccttcaaggacctacacttcaagatgtttgatgtgggtggtcagcggtctgagcggaagaagtggatccactgctttgagggcgtcacagccatcatcttctgcgtagccttgagcgcctatgacttggtgctagctgaggacgaggagatgaaccgcatgcatgagagcatgaagctattcgatagcatctgcaacaacaagtggttcacagacacgtccatcatcctcttcctcaacaagaaggacctgtttgaggagaagatcacacacagtcccctgaccatctgcttccctgagtacacaggggccaacaaatatgatgaggcagccagctacatccagagtaagtttgaggacctgaataagcgcaaagacaccaaggagatctacacgcacttcacgtgcgccaccgacaccaagaacgtgcagttcgtgtttgacgccgtcaccgatgtcatcatcaagaacaacctgaaggactgcggcctcttctgaggggcagcggggcctggcgggatgggccaccgccgactttgtaccccccaacccctgaggaagatgggggcaagaagatcacgctccccgcctgttcccccgccgcttttctcctctttcctctctttgttctcagctccccctgtcccctcagctccagacgtaggggaggggttgccacaggcctccctgtttgaagcctgcccttgtctgagatgctggtaatggccatggtacccccttctgggcatctgttctggtttttaaccattgtcttgttctgtgatgaggggaggggggcacatgctgagtctcccaaggctgcgtctggaggggcccctgcttctccagcctggacccccagctttgcccaacaccagcccctgccccagcccaagtccaaatgtttacagggagcctcctgcccagtcccccaaccccagccgctcggaggccccaaaggaaaaagcacaagaagcgtgagacgccaccattcctggaaaccacagtccacctgctcattctcgtagctttttaaaaaaatgaaagtaaaggaaaaaaaaaaaactgcaaatctagaaaactttttagagaaaaactatttaaaactgtcagatcctgaccagcaagcccccccccagccccccttccaagtgactccgtgccttgagtgtgtctgcgtgtttacacccgtccctctgctggccgcccccgtgcgagcggcacccctgccctgccctccacagaattgggttccaagggctgttccagacaactgccaacgtcactgagggccctgccccagcggccctggccccaggctctattaacctaaaatgtagctccctagcgctaacctaggaaccgccgctgcctgctggggggccacgcccctcatgcccttgtcccaggcccggggccttcagcgttgaacacttccttgcttttttcacatgttttatggaattgttcacctggtttgaaataataaaatgtagaaagaaaaaaaatacc

SEQ ID NO: 3781 - protein, 355 aa, Homo sapiens; identical to SEQ ID NO: 365

SEQ ID NO: 3782 - DNA, 3119 bp, Homo sapiens
agtgccgggtcccggggtttggaaccacccctattgccttttctccgcgtggccccgcctgcagcccaggcccgagcctgggctgcgcctaacttcccccttcgctccgccctcgagccaatcaacagcctctaatctcctctggccccgcctgcaagcccgccccggcccagtcacaggcttggttcgcccaggccccacccccggcccgccccgccgtcggtgcgcggcggtagggaaggcgcctcccgcagtcgctcggaactgccgacccgagtgcttcccgcagagggctggtggtgggagcggagtgggtcgggcggggccgagccgggccgtgggccgtgtgggggccgggcggcggccgggccggcggacggcgggatgggctgcaccgtgagcgccgaggacaaggcggcggccgagcgctctaagatgatcgacaagaacctgcgggaggacggagagaaggcggcgcgggaggtgaagttgctgctgttgggtgctggggagtcagggaagagcaccatcgtcaagcagatgaagatcatccacgaggatggctactccgaggaggaatgccggcagtaccgggcggttgtctacagcaacaccatccagtccatcatggccattgtcaaagccatgggcaacctgcagatcgactttgccgacccctccagagcggacgacgccaggcagctatttgcactgtcctgcaccgccgaggagcaaggcgtgctccctgatgacctgtccggcgtcatccggaggctctgggctgaccatggtgtgcaggcctgctttggccgctcaagggaataccagctcaacgactcagctgcctactacctgaacgacctggagcgtattgcacagagtgactacatccccacacagcaagatgtgctacggacccgcgtaaagaccacggggatcgtggagacacacttcaccttcaaggacctacacttcaagatgtttgatgtgggtggtcagcggtctgagcggaagaagtggatccactgctttgagggcgtcacagccatcatcttctgcgtagccttgagcgcctatgacttggtgctagctgaggacgaggagatgaaccgcatgcatgagagcatgaagctattcgatagcatctgcaacaacaagtggttcacagacacgtccatcatcctcttcctcaacaagaaggacctgtttgaggagaagatcacacacagtcccctgaccatctgcttccctgagtacacaggggccaacaaatatgatgaggcagccagctacatccagagtaagtttgaggacctgaataagcgcaaagacaccaaggagatctacacgcacttcacgtgcgccaccgacaccaagaacgtgcagttcgtgtttgacgccgtcaccgatgtcatcatcaagaacaacctgaaggactgcggcctcttctgaggggcagcggggcctggcgggatggtgagccagaggggctgtggcagggtgctggggaagaactaagcgggcctggagccccagcagggggttctgggggtgggtaggggggtgaacctggagggggaggggcaataggtgaccaggggacaagggaggagaaggcccagggtgtgaatcaggaggtcaagtgagtgaggtgcagggcatggaggaggtcatacaagcaggcctggcccagtggtccagacagaagggcctggccttgccctgggacagaaccagaggccatcctgatgttccctggagaaatctcacctcctcacccaccaggccattggcccagcctgccggaagctgcatgccagcggagcccagccctgctgcccactaccaccagctccatgtgcacctccagctcttgccctctgacttgtctgagcgtcccgggcttaggctggccccactggccctggtggaggtggggatgactctcccagtgccacagactcccctcccccacgtaacccagcaacagaaactggctcctgggcggcaactgtgtccctggtaacaaatgggtaggaaaaatagagaagggtcattgtctagggaggcgggagagaggcacgccctggctgcttcccgatccatgctctgctttcccccacctccagggccaccgccgactttgtaccccccaacccctgaggaagatgggggcaagaagatcacgctccccgcctgttcccccgccgcttttctcctctttcctctctttgttctcagctccccctgtcccctcagctccagacgtaggggaggggttgccacaggcctccctgtttgaagcctgcccttgtctgagatgctggtaatggccatggtacccccttctgggcatctgttctggtttttaaccattgtcttgttctgtgatgaggggaggggggcacatgctgagtctcccaaggctgcgtctggaggggcccctgcttctccagcctggacccccagctttgcccaacaccagcccctgccccagcccaagtccaaatgtttacagggagcctcctgcccagtcccccaaccccagccgctcggaggccccaaaggaaaaagcacaagaagcgtgagacgccaccattcctggaaaccacagtccacctgctcattctcgtagctttttaaaaaaatgaaagtaaaggaaaaaaaaaaaactgcaaatctagaaaactttttagagaaaaactatttaaaactgtcagatcctgaccagcaagcccccccccagccccccttccaagtgactccgtgccttgagtgtgtctgcgtgtttacacccgtccctctgctggccgcccccgtgcgagcggcacccctgccctgccctccacagaattgggttccaagggctgttccagacaactgccaacgtcactgagggccctgccccagcggccctggccccaggctctattaacctaaaatgtagctccctagcgctaacctaggaaccgccgctgcctgctggggggccacgcccctcatgcccttgtcccaggcccggggccttcagcgttgaacacttccttgcttttttcacatgttttatggaattgttcacctggtttgaaataataaaatgtagaaagaaaaaaaatacc

SEQ ID NO: 3783 - protein, 355 aa, Homo sapiens; identical to SEQ ID NO: 365

SEQ ID NO: 3784 - DNA, 1004 bp, Homo sapiens
cgagcctgggctgcgcctaacttcccccttcgctccgccctcgagccaatcaacagcctctaatctcctctggccccgcctgcaagcccgccccggcccagtcacaggcttggttcgcccaggccccacccccggcccgccccgccgtcggtgcgcggcggtagggaaggcgcctcccgcagtcgctcggaactgccgacccgagtgcttcccgcagagggctggtggtgggagcggagtgggtcgggcggggccgagccgggccgtgggccgtgtgggggccgggcggcggccgggccggcggacggcgggatgggctgcaccgtgagcgccgaggacaaggcggcggccgagcgctctaagatgatcgacaagaacctgcgggaggacggagagaaggcggcgcgggaggtgaagttgctgctgttgggtgctggggagtcagggaagagcaccatcgtcaagcagatgaagatcatccacgaggatggctactccgaggaggaatgccggcagtaccgggcggttgtctacagcaacaccatccagtccatcatggccattgtcaaagccatgggcaacctgcagatcgactttgccgacccctccagagcggtatgtgccctccgccccaccctctcccacctcccaaaaggtttcggggtggctggttgtggtggctcatgcctataaatcccagcactttgggacgccgaggcgggtggatcacctgaggtcaggaccagcctggccaacttggtgaaaccgcgtctctactaaaaatacaaaaattagccgagcatggtggcacgtgcctgtaatcccagctacttgggaggctgaagcaggagaattgcttgaacccgggaggcagaggatgcagtgagccaagatcgccccattgcactctagccttggtgacagagctagactccgtcacagaaaaaagtaaacaacaacaacaaaaaggttttagggcaagtctcatcctagggaatccaaga

SEQ ID NO: 3785 - protein, 126 aa, Homo sapiens
MGCTVSAEDKAAAERSKMIDKNLREDGEKAAREVKLLLLGAGESGKSTIVKQMKIIHEDGYSEEECRQYRAVVYSNTIQSIMAIVKAMGNLQIDFADPSRAVCALRPTLSHLPKGFGVAGCGGSCL

SEQ ID NO: 3786 - DNA, 1170 bp, Homo sapiens
cgagcctgggctgcgcctaacttcccccttcgctccgccctcgagccaatcaacagcctctaatctcctctggccccgcctgcaagcccgccccggcccagtcacaggcttggttcgcccaggccccacccccggcccgccccgccgtcggtgcgcggcggtagggaaggcgcctcccgcagtcgctcggaactgccgacccgagtgcttcccgcagagggctggtggtgggagcggagtgggtcgggcggggccgagccgggccgtgggccgtgtgggggccgggcggcggccgggccggcggacggcgggatgggctgcaccgtgagcgccgaggacaaggcggcggccgagcgctctaagatgatcgacaagaacctgcgggaggacggagagaaggcggcgcgggaggtgaagttgctgctgttgggtgtctcccccaggggccaacaaatatgatgaggcagccagctacatccagagtaagtttgaggacctgaataagcgcaaagacaccaaggagatctacacgcacttcacgtgcgccaccgacaccaagaacgtgcagttcgtgtttgacgccgtcaccgatgtcatcatcaagaacaacctgaaggactgcggcctcttctgaggggcagcggggcctggcgggatgggccaccgccgactttgtaccccccaacccctgaggaagatgggggcaagaagatcacgctccccgcctgttcccccgccgcttttctcctctttcctctctttgttctcagctccccctgtcccctcagctccagacgtaggggaggggttgccacaggcctccctgtttgaagcctgcccttgtctgagatgctggtaatggccatggtacccccttctgggcatctgttctggtttttaaccattgtcttgttctgtgatgaggggaggggggcacatgctgagtctcccaaggctgcgtctggaggggcccctgcttctccagcctggacccccagctttgcccaacaccagcccctgccccagcccaagtccaaatgtttacagggagcctcctgcccagtcccccaaccccagccgctcggaggccccaaaggaaaaagcacaagaagcgtgagacgccaccattcctggaaaccacagtccacctgctcattctcgtagcttttt

SEQ ID NO: 3787 - protein, 67 aa, Homo sapiens
MGHRRLCTPQPLRKMGARRSRSPPVPPPLFSSFLSLFSAPPVPSAPDVGEGLPQASLFEACPCLRCW

SEQ ID NO: 3788 - DNA, 1205 bp, Homo sapiens
cgagcctgggctgcgcctaacttcccccttcgctccgccctcgagccaatcaacagcctctaatctcctctggccccgcctgcaagcccgccccggcccagtcacaggcttggttcgcccaggccccacccccggcccgccccgccgtcggtgcgcggcggtagggaaggcgcctcccgcagtcgctcggaactgccgacccgagtgcttcccgcagagggctggtggtgggagcggagtgggtcgggcggggccgagccgggccgtgggccgtgtgggggccgggcggcggccgggccggcggacggcgggatgggctgcaccgtgagcgccgaggacaaggcggcggccgagcgctctaagatgatcgacaagaacctgcgggaggacggagagaaggcggcgcgggaggtgaagttgctgctgttgggtgtctcccccaggggccaacaaatatgatgaggcagccagctacatccagagtaagtttgaggacctgaataagcgcaaagacaccaaggagatctacacgcacttcacgtgcgccaccgacaccaagaacgtgcagttcgtgtttgacgccgtcaccgatgtcatcatcaagaacaacctgaaggactgcggcctcttctgaggggcagcggggcctggcgggatgggccaccgccgactttgtaccccccaacccctgaggaagatgggggcaagaagatcacgctccccgcctgttcccccgccgcttttctcctctttcctctctttgttctcagctccccctgtcccctcagctccagacgtaggggaggggttgccacaggcctccctgtttgaagcctgcccttgtctgagatgctggtaatggccatggtacccccttctgggcatctgttctggtttttaaccattgtcttgttctgtgatgaggggaggggggcacatgctgagtctcccaaggctgcgtctggaggggcccctgcttctccagcctggacccccagctttgcccaacaccagcccctgccccagcccaagtccaaatgtttacagggagcctcctgcccagtcccccaaccccagccgctcggaggccccaaaggaaaaagcacaagaagcgtgagacgccaccattcctggaaaccacagtccacctgctcattctcgtagctttttaaaaaaatgaaagtaaaggaaaaaaaaaaaactgc

SEQ ID NO: 3789 - protein, 67 aa, Homo sapiens; identical to SEQ ID NO: 3787

SEQ ID NO: 3790 - DNA, 851 bp, Homo sapiens
cgagcctgggctgcgcctaacttcccccttcgctccgccctcgagccaatcaacagcctctaatctcctctggccccgcctgcaagcccgccccggcccagtcacaggcttggttcgcccaggccccacccccggcccgccccgccgtcggtgcgcggcggtagggaaggcgcctcccgcagtcgctcggaactgccgacccgagtgcttcccgcagagggctggtggtgggagcggagtgggtcgggcggggccgagccgggccgtgggccgtgtgggggccgggcggcggccgggccggcggacggcgggatgggctgcaccgtgagcgccgaggacaaggcggcggccgagcgcttcattctcgtagctttttaaaaaaatgaaagtaaaggaaaaaaaaaaaactgcaaatctagaaaactttttagagaaaaactatttaaaactgtcagatcctgaccagcaagcccccccccagccccccttccaagtgactccgtgccttgagtgtgtctgcgtgtttacacccgtccctctgctggccgcccccgtgcgagcggcacccctgccctgccctccacagaattgggttccaagggctgttccagacaactgccaacgtcactgagggccctgccccagcggccctggccccaggctctattaacctaaaatgtagctccctagcgctaacctaggaaccgccgctgcctgctggggggccacgcccctcatgcccttgtcccaggcccggggccttcagcgttgaacacttccttgcttttttcacatgttttatggaattgttcacctggtttgaaataataaaatgtagaaagaaaaaaaat

SEQ ID NO: 3791 - protein, 82 aa, Homo sapiens
MKVKEKKKTANLENFLEKNYLKLSDPDQQAPPQPPFQVTPCLECVCVFTPVPLLAAPVRAAPLPCPPQNWVPRAVPDNCQRH

SEQ ID NO: 3792 - DNA, 1048 bp, Homo sapiens
cgagcctgggctgcgcctaacttcccccttcgctccgccctcgagccaatcaacagcctctaatctcctctggccccgcctgcaagcccgccccggcccagtcacaggcttggttcgcccaggccccacccccggcccgccccgccgtcggtgcgcggcggtagggaaggcgcctcccgcagtcgctcggaactgccgacccgagtgcttcccgcagagggctggtggtgggagcggagtgggtcgggcggggccgagccgggccgtgggccgtgtgggggccgggcggcggccgggccggcggacggcgggatgggctgcaccgtgagcgccgaggacaaggcggcggccgagcgctctaagatgatcgacaagaacctgcgggaggacggagagaaggcggcgcgggaggtgaagttgctgccccagcccaagtccaaatgtttacagggagcctcctgcccagtcccccaaccccagccgctcggaggccccaaaggaaaaagcacaagaagcgtgagacgccaccattcctggaaaccacagtccacctgctcattctcgtagctttttaaaaaaatgaaagtaaaggaaaaaaaaaaaactgcaaatctagaaaactttttagagaaaaactatttaaaactgtcagatcctgaccagcaagcccccccccagccccccttccaagtgactccgtgccttgagtgtgtctgcgtgtttacacccgtccctctgctggccgcccccgtgcgagcggcacccctgccctgccctccacagaattgggttccaagggctgttccagacaactgccaacgtcactgagggccctgccccagcggccctggccccaggctctattaacctaaaatgtagctccctagcgctaacctaggaaccgccgctgcctgctggggggccacgcccctcatgcccttgtcccaggcccggggccttcagcgttgaacacttccttgcttttttcacatgttttatggaattgttcacctggtttgaaataataaaatgtagaaagaaaaaaaat

SEQ ID NO: 3793 - protein, 84 aa, Homo sapiens
MGCTVSAEDKAAAERSKMIDKNLREDGEKAAREVKLLPQPKSKCLQGASCPVPQPQPLGGPKGKSTRSVRRHHSWKPQSTCSFS

SEQ ID NO: 3794 - DNA, 1648 bp, Homo sapiens
cgagcctgggctgcgcctaacttcccccttcgctccgccctcgagccaatcaacagcctctaatctcctctggccccgcctgcaagcccgccccggcccagtcacaggcttggttcgcccaggccccacccccggcccgccccgccgtcggtgcgcggcggtagggaaggcgcctcccgcagtcgctcggaactgccgacccgagtgcttcccgcagagggctggtggtgggagcggagtgggtcgggcggggccgagccgggccgtgggccgtgtgggggccgggcggcggccgggccggcggacggcgggatgggctgcaccgtgagcgccgaggacaaggcggcggccgagcgctctaagatgatcgacaagaacctgcgggaggacggagagaaggcggcgcgggaggtgaagttgctgctgttgggtgtctcccccaggggccaacaaatatgatgaggcagccagctacatccagagtaagtttgaggacctgaataagcgcaaagacaccaaggagatctacacgcacttcacgtgcgccaccgacaccaagaacgtgcagttcgtgtttgacgccgtcaccgatgtcatcatcaagaacaacctgaaggactgcggcctcttctgaggggcagcggggcctggcgggatgggccaccgccgactttgtaccccccaacccctgaggaagatgggggcaagaagatcacgctccccgcctgttcccccgccgcttttctcctctttcctctctttgttctcagctccccctgtcccctcagctccagacgtaggggaggggttgccacaggcctccctgtttgaagcctgcccttgtctgagatgctggtaatggccatggtacccccttctgggcatctgttctggtttttaaccattgtcttgttctgtgatgaggggaggggggcacatgctgagtctcccaaggctgcgtctggaggggcccctgcttctccagcctggacccccagctttgcccaacaccagcccctgccccagcccaagtccaaatgtttacagggagcctcctgcccagtcccccaaccccagccgctcggaggccccaaaggaaaaagcacaagaagcgtgagacgccaccattcctggaaaccacagtccacctgctcattctcgtagctttttaaaaaaatgaaagtaaaggaaaaaaaaaaaactgcaaatctagaaaactttttagagaaaaactatttaaaactgtcagatcctgaccagcaagcccccccccagccccccttccaagtgactccgtgccttgagtgtgtctgcgtgtttacacccgtccctctgctggccgcccccgtgcgagcggcacccctgccctgccctccacagaattgggttccaagggctgttccagacaactgccaacgtcactgagggccctgccccagcggccctggccccaggctctattaacctaaaatgtagctccctagcgctaacctaggaaccgccgctgcctgctggggggccacgcccctcatgcccttgtcccaggcccggggccttcagcgttgaacacttccttgcttttttcacatgttttatggaattgttcacctggtttgaaataataaaatgtagaaagaaaaaaaatacc

SEQ ID NO: 3795 - protein, 67 aa, Homo sapiens; identical to SEQ ID NO: 3787

SEQ ID NO: 3796 - DNA, 2351 bp, Homo sapiens
cgagcctgggctgcgcctaacttcccccttcgctccgccctcgagccaatcaacagcctctaatctcctctggccccgcctgcaagcccgccccggcccagtcacaggcttggttcgcccaggccccacccccggcccgccccgccgtcggtgcgcggcggtagggaaggcgcctcccgcagtcgctcggaactgccgacccgagtgcttcccgcagagggctggtggtgggagcggagtgggtcgggcggggccgagccgggccgtgggccgtgtgggggccgggcggcggccgggccggcggacggcgggatgggctgcaccgtgagcgccgaggacaaggcggcggccgagcgctctaagatgatcgacaagaacctgcgggaggacggagagaaggcggcgcgggaggtgaagttgctgctgttgggatcatccacgaggatggctactccgaggaggaatgccggcagtaccgggcggttgtctacagcaacaccatccagtccatcatggccattgtcaaagccatgggcaacctgcagatcgactttgccgacccctccagagcggacgacgccaggcagctatttgcactgtcctgcaccgccgaggagcaaggcgtgctccctgatgacctgtccggcgtcatccggaggctctgggctgaccatggtgtgcaggcctgctttggccgctcaagggaataccagctcaacgactcagctgcctactacctgaacgacctggagcgtattgcacagagtgactacatccccacacagcaagatgtgctacggacccgcgtaaagaccacggggatcgtggagacacacttcaccttcaaggacctacacttcaagatgtttgatgtgggtggtcagcggtctgagcggaagaagtggatccactgctttgagggcgtcacagccatcatcttctgcgtagccttgagcgcctatgacttggtgctagctgaggacgaggagatgaaccgcatgcatgagagcatgaagctattcgatagcatctgcaacaacaagtggttcacagacacgtccatcatcctcttcctcaacaagaaggacctgtttgaggagaagatcacacacagtcccctgaccatctgcttccctgagtacacaggggccaacaaatatgatgaggcagccagctacatccagagtaagtttgaggacctgaataagcgcaaagacaccaaggagatctacacgcacttcacgtgcgccaccgacaccaagaacgtgcagttcgtgtttgacgccgtcaccgatgtcatcatcaagaacaacctgaaggactgcggcctcttctgaggggcagcggggcctggcgggatgggccaccgccgactttgtaccccccaacccctgaggaagatgggggcaagaagatcacgctccccgcctgttcccccgccgcttttctcctctttcctctctttgttctcagctccccctgtcccctcagctccagacgtaggggaggggttgccacaggcctccctgtttgaagcctgcccttgtctgagatgctggtaatggccatggtacccccttctgggcatctgttctggtttttaaccattgtcttgttctgtgatgaggggaggggggcacatgctgagtctcccaaggctgcgtctggaggggcccctgcttctccagcctggacccccagctttgcccaacaccagcccctgccccagcccaagtccaaatgtttacagggagcctcctgcccagtcccccaaccccagccgctcggaggccccaaaggaaaaagcacaagaagcgtgagacgccaccattcctggaaaccacagtccacctgctcattctcgtagctttttaaaaaaatgaaagtaaaggaaaaaaaaaaaactgcaaatctagaaaactttttagagaaaaactatttaaaactgtcagatcctgaccagcaagcccccccccagccccccttccaagtgactccgtgccttgagtgtgtctgcgtgtttacacccgtccctctgctggccgcccccgtgcgagcggcacccctgccctgccctccacagaattgggttccaagggctgttccagacaactgccaacgtcactgagggccctgccccagcggccctggccccaggctctattaacctaaaatgtagctccctagcgctaacctaggaaccgccgctgcctgctggggggccacgcccctcatgcccttgtcccaggcccggggccttcagcgttgaacacttccttgcttttttcacatgttttatggaattgttcacctggtttgaaataataaaatgtagaaagaaaaaaaatacc

SEQ ID NO: 3797 - protein, 274 aa, Homo sapiens
MAIVKAMGNLQIDFADPSRADDARQLFALSCTAEEQGVLPDDLSGVIRRLWADHGVQACFGRSREYQLNDSAAYYLNDLERIAQSDYIPTQQDVLRTRVKTTGIVETHFTFKDLHFKMFDVGGQRSERKKWIHCFEGVTAIIFCVALSAYDLVLAEDEEMNRMHESMKLFDSICNNKWFTDTSIILFLNKKDLFEEKITHSPLTICFPEYTGANKYDEAASYIQSKFEDLNKRKDTKEIYTHFTCATDTKNVQFVFDAVTDVIIKNNLKDCGLF

SEQ ID NO: 3798 - DNA, 2444 bp, Homo sapiens
tgtgagtgcggcagcggcagtgagtgggtgtcgacgcggcggaatgcccgtcgctgctgctgctgctgcccgacgggcctggggagggcacttccggtaccgctgcctcccagtgcccagccaggagtctctagacagcctctccccaggcgattgcagttactgtggtggccgaggaaatgcaagactggaccatagagctgggggaacgcagggcttctggctagttttgtgtcccgacaccagaagggtcccccatcccaccaggcctgctccttggagcccagctcaccttttgggctaaggtgctggggagtcagggaagagcaccatcgtcaagcagatgaagatcatccacgaggatggctactccgaggaggaatgccggcagtaccgggcggttgtctacagcaacaccatccagtccatcatggccattgtcaaagccatgggcaacctgcagatcgactttgccgacccctccagagcggacgacgccaggcagctatttgcactgtcctgcaccgccgaggagcaaggcgtgctccctgatgacctgtccggcgtcatccggaggctctgggctgaccatggtgtgcaggcctgctttggccgctcaagggaataccagctcaacgactcagctgcctactacctgaacgacctggagcgtattgcacagagtgactacatccccacacagcaagatgtgctacggacccgcgtaaagaccacggggatcgtggagacacacttcaccttcaaggacctacacttcaagatgtttgatgtgggtggtcagcggtctgagcggaagaagtggatccactgctttgagggcgtcacagccatcatcttctgcgtagccttgagcgcctatgacttggtgctagctgaggacgaggagatgaaccgcatgcatgagagcatgaagctattcgatagcatctgcaacaacaagtggttcacagacacgtccatcatcctcttcctcaacaagaaggacctgtttgaggagaagatcacacacagtcccctgaccatctgcttccctgagtacacaggggccaacaaatatgatgaggcagccagctacatccagagtaagtttgaggacctgaataagcgcaaagacaccaaggagatctacacgcacttcacgtgcgccaccgacaccaagaacgtgcagttcgtgtttgacgccgtcaccgatgtcatcatcaagaacaacctgaaggactgcggcctcttctgaggggcagcggggcctggcgggatggtgagccagaggggctgtggcagggtgctggggaagaactaagcgggcctggagccccagcagggggttctgggggtgggtaggggggtgaacctggagggggaggggcaataggtgaccaggggacaagggaggagaaggcccagggtgtgaatcaggaggtcaagtgagtgaggtgcagggcatggaggaggtcatacaagcaggcctggcccagtggtccagacagaagggcctggccttgccctgggacagaaccagaggccatcctgatgttccctggagaaatctcacctcctcacccaccaggccattggcccagcctgccggaagctgcatgccagcggagcccagccctgctgcccactaccaccagctccatgtgcacctccagctcttgccctctgacttgtctgagcgtcccgggcttaggctggccccactggccctggtggaggtggggatgactctcccagtgccacagactcccctcccccacgtaacccagcaacagaaactggctcctgggcggcaactgtgtccctggtaacaaatgggtaggaaaaatagagaagggtcattgtctagggaggcgggagagaggcacgccctggctgcttcccgatccatgctctgctttcccccacctccagggccaccgccgactttgtaccccccaacccctgaggaagatgggggcaagaagatcacgctccccgcctgttcccccgccgcttttctcctctttcctctctttgttctcagctccccctgtcccctcagctccagacgtaggggaggggttgccacaggcctccctgtttgaagcctgcccttgtctgagatgctggtaatggccatggtacccccttctgggcatctgttctggtttttaaccattgtcttgttctgtgatgaggggaggggggcacatgctgagtctcccaaggctgcgtctggaggggcccctgcttctccagcctggacccccagctttgcccaacaccagcccctgccccagcccaagtccaaatgtttacagggagcctcctgcccagtcccccaaccccagccgctcggaggccccaaaggaaaaagcacaagaagcgtgagacgccaccattcctggaaaccacagtccacctgctcattctcgtagcttttt

SEQ ID NO: 3799 - protein, 303 aa, Homo sapiens; identical to SEQ ID NO: 3769

SEQ ID NO: 3800 - DNA, 2479 bp, Homo sapiens
tgtgagtgcggcagcggcagtgagtgggtgtcgacgcggcggaatgcccgtcgctgctgctgctgctgcccgacgggcctggggagggcacttccggtaccgctgcctcccagtgcccagccaggagtctctagacagcctctccccaggcgattgcagttactgtggtggccgaggaaatgcaagactggaccatagagctgggggaacgcagggcttctggctagttttgtgtcccgacaccagaagggtcccccatcccaccaggcctgctccttggagcccagctcaccttttgggctaaggtgctggggagtcagggaagagcaccatcgtcaagcagatgaagatcatccacgaggatggctactccgaggaggaatgccggcagtaccgggcggttgtctacagcaacaccatccagtccatcatggccattgtcaaagccatgggcaacctgcagatcgactttgccgacccctccagagcggacgacgccaggcagctatttgcactgtcctgcaccgccgaggagcaaggcgtgctccctgatgacctgtccggcgtcatccggaggctctgggctgaccatggtgtgcaggcctgctttggccgctcaagggaataccagctcaacgactcagctgcctactacctgaacgacctggagcgtattgcacagagtgactacatccccacacagcaagatgtgctacggacccgcgtaaagaccacggggatcgtggagacacacttcaccttcaaggacctacacttcaagatgtttgatgtgggtggtcagcggtctgagcggaagaagtggatccactgctttgagggcgtcacagccatcatcttctgcgtagccttgagcgcctatgacttggtgctagctgaggacgaggagatgaaccgcatgcatgagagcatgaagctattcgatagcatctgcaacaacaagtggttcacagacacgtccatcatcctcttcctcaacaagaaggacctgtttgaggagaagatcacacacagtcccctgaccatctgcttccctgagtacacaggggccaacaaatatgatgaggcagccagctacatccagagtaagtttgaggacctgaataagcgcaaagacaccaaggagatctacacgcacttcacgtgcgccaccgacaccaagaacgtgcagttcgtgtttgacgccgtcaccgatgtcatcatcaagaacaacctgaaggactgcggcctcttctgaggggcagcggggcctggcgggatggtgagccagaggggctgtggcagggtgctggggaagaactaagcgggcctggagccccagcagggggttctgggggtgggtaggggggtgaacctggagggggaggggcaataggtgaccaggggacaagggaggagaaggcccagggtgtgaatcaggaggtcaagtgagtgaggtgcagggcatggaggaggtcatacaagcaggcctggcccagtggtccagacagaagggcctggccttgccctgggacagaaccagaggccatcctgatgttccctggagaaatctcacctcctcacccaccaggccattggcccagcctgccggaagctgcatgccagcggagcccagccctgctgcccactaccaccagctccatgtgcacctccagctcttgccctctgacttgtctgagcgtcccgggcttaggctggccccactggccctggtggaggtggggatgactctcccagtgccacagactcccctcccccacgtaacccagcaacagaaactggctcctgggcggcaactgtgtccctggtaacaaatgggtaggaaaaatagagaagggtcattgtctagggaggcgggagagaggcacgccctggctgcttcccgatccatgctctgctttcccccacctccagggccaccgccgactttgtaccccccaacccctgaggaagatgggggcaagaagatcacgctccccgcctgttcccccgccgcttttctcctctttcctctctttgttctcagctccccctgtcccctcagctccagacgtaggggaggggttgccacaggcctccctgtttgaagcctgcccttgtctgagatgctggtaatggccatggtacccccttctgggcatctgttctggtttttaaccattgtcttgttctgtgatgaggggaggggggcacatgctgagtctcccaaggctgcgtctggaggggcccctgcttctccagcctggacccccagctttgcccaacaccagcccctgccccagcccaagtccaaatgtttacagggagcctcctgcccagtcccccaaccccagccgctcggaggccccaaaggaaaaagcacaagaagcgtgagacgccaccattcctggaaaccacagtccacctgctcattctcgtagctttttaaaaaaatgaaagtaaaggaaaaaaaaaaaactgc

SEQ ID NO: 3801 - protein, 303 aa, Homo sapiens; identical to SEQ ID NO: 3769

SEQ ID NO: 3802 - DNA, 2922 bp, Homo sapiens
tgtgagtgcggcagcggcagtgagtgggtgtcgacgcggcggaatgcccgtcgctgctgctgctgctgcccgacgggcctggggagggcacttccggtaccgctgcctcccagtgcccagccaggagtctctagacagcctctccccaggcgattgcagttactgtggtggccgaggaaatgcaagactggaccatagagctgggggaacgcagggcttctggctagttttgtgtcccgacaccagaagggtcccccatcccaccaggcctgctccttggagcccagctcaccttttgggctaaggtgctggggagtcagggaagagcaccatcgtcaagcagatgaagatcatccacgaggatggctactccgaggaggaatgccggcagtaccgggcggttgtctacagcaacaccatccagtccatcatggccattgtcaaagccatgggcaacctgcagatcgactttgccgacccctccagagcggacgacgccaggcagctatttgcactgtcctgcaccgccgaggagcaaggcgtgctccctgatgacctgtccggcgtcatccggaggctctgggctgaccatggtgtgcaggcctgctttggccgctcaagggaataccagctcaacgactcagctgcctactacctgaacgacctggagcgtattgcacagagtgactacatccccacacagcaagatgtgctacggacccgcgtaaagaccacggggatcgtggagacacacttcaccttcaaggacctacacttcaagatgtttgatgtgggtggtcagcggtctgagcggaagaagtggatccactgctttgagggcgtcacagccatcatcttctgcgtagccttgagcgcctatgacttggtgctagctgaggacgaggagatgaaccgcatgcatgagagcatgaagctattcgatagcatctgcaacaacaagtggttcacagacacgtccatcatcctcttcctcaacaagaaggacctgtttgaggagaagatcacacacagtcccctgaccatctgcttccctgagtacacaggggccaacaaatatgatgaggcagccagctacatccagagtaagtttgaggacctgaataagcgcaaagacaccaaggagatctacacgcacttcacgtgcgccaccgacaccaagaacgtgcagttcgtgtttgacgccgtcaccgatgtcatcatcaagaacaacctgaaggactgcggcctcttctgaggggcagcggggcctggcgggatggtgagccagaggggctgtggcagggtgctggggaagaactaagcgggcctggagccccagcagggggttctgggggtgggtaggggggtgaacctggagggggaggggcaataggtgaccaggggacaagggaggagaaggcccagggtgtgaatcaggaggtcaagtgagtgaggtgcagggcatggaggaggtcatacaagcaggcctggcccagtggtccagacagaagggcctggccttgccctgggacagaaccagaggccatcctgatgttccctggagaaatctcacctcctcacccaccaggccattggcccagcctgccggaagctgcatgccagcggagcccagccctgctgcccactaccaccagctccatgtgcacctccagctcttgccctctgacttgtctgagcgtcccgggcttaggctggccccactggccctggtggaggtggggatgactctcccagtgccacagactcccctcccccacgtaacccagcaacagaaactggctcctgggcggcaactgtgtccctggtaacaaatgggtaggaaaaatagagaagggtcattgtctagggaggcgggagagaggcacgccctggctgcttcccgatccatgctctgctttcccccacctccagggccaccgccgactttgtaccccccaacccctgaggaagatgggggcaagaagatcacgctccccgcctgttcccccgccgcttttctcctctttcctctctttgttctcagctccccctgtcccctcagctccagacgtaggggaggggttgccacaggcctccctgtttgaagcctgcccttgtctgagatgctggtaatggccatggtacccccttctgggcatctgttctggtttttaaccattgtcttgttctgtgatgaggggaggggggcacatgctgagtctcccaaggctgcgtctggaggggcccctgcttctccagcctggacccccagctttgcccaacaccagcccctgccccagcccaagtccaaatgtttacagggagcctcctgcccagtcccccaaccccagccgctcggaggccccaaaggaaaaagcacaagaagcgtgagacgccaccattcctggaaaccacagtccacctgctcattctcgtagctttttaaaaaaatgaaagtaaaggaaaaaaaaaaaactgcaaatctagaaaactttttagagaaaaactatttaaaactgtcagatcctgaccagcaagcccccccccagccccccttccaagtgactccgtgccttgagtgtgtctgcgtgtttacacccgtccctctgctggccgcccccgtgcgagcggcacccctgccctgccctccacagaattgggttccaagggctgttccagacaactgccaacgtcactgagggccctgccccagcggccctggccccaggctctattaacctaaaatgtagctccctagcgctaacctaggaaccgccgctgcctgctggggggccacgcccctcatgcccttgtcccaggcccggggccttcagcgttgaacacttccttgcttttttcacatgttttatggaattgttcacctggtttgaaataataaaatgtagaaagaaaaaaaatacc

SEQ ID NO: 3803 - protein, 303 aa, Homo sapiens; identical to SEQ ID NO: 3769

SEQ ID NO: 3804 - DNA, 2321 bp, Homo sapiens
agtagctctgactcctgtcccaggttatgctgagtcccagcagggaaccaccacagctctgaatcagcctgttagccgctgtccattgctcttcatctgctctttatctgaaaatcttcagaagctttccttcaaatgagatgaccacagcagtcttctctgcaggttgcaggaaatgagaggtgctggggagtcagggaagagcaccatcgtcaagcagatgaagatcatccacgaggatggctactccgaggaggaatgccggcagtaccgggcggttgtctacagcaacaccatccagtccatcatggccattgtcaaagccatgggcaacctgcagatcgactttgccgacccctccagagcggacgacgccaggcagctatttgcactgtcctgcaccgccgaggagcaaggcgtgctccctgatgacctgtccggcgtcatccggaggctctgggctgaccatggtgtgcaggcctgctttggccgctcaagggaataccagctcaacgactcagctgcctactacctgaacgacctggagcgtattgcacagagtgactacatccccacacagcaagatgtgctacggacccgcgtaaagaccacggggatcgtggagacacacttcaccttcaaggacctacacttcaagatgtttgatgtgggtggtcagcggtctgagcggaagaagtggatccactgctttgagggcgtcacagccatcatcttctgcgtagccttgagcgcctatgacttggtgctagctgaggacgaggagatgaaccgcatgcatgagagcatgaagctattcgatagcatctgcaacaacaagtggttcacagacacgtccatcatcctcttcctcaacaagaaggacctgtttgaggagaagatcacacacagtcccctgaccatctgcttccctgagtacacaggggccaacaaatatgatgaggcagccagctacatccagagtaagtttgaggacctgaataagcgcaaagacaccaaggagatctacacgcacttcacgtgcgccaccgacaccaagaacgtgcagttcgtgtttgacgccgtcaccgatgtcatcatcaagaacaacctgaaggactgcggcctcttctgaggggcagcggggcctggcgggatggtgagccagaggggctgtggcagggtgctggggaagaactaagcgggcctggagccccagcagggggttctgggggtgggtaggggggtgaacctggagggggaggggcaataggtgaccaggggacaagggaggagaaggcccagggtgtgaatcaggaggtcaagtgagtgaggtgcagggcatggaggaggtcatacaagcaggcctggcccagtggtccagacagaagggcctggccttgccctgggacagaaccagaggccatcctgatgttccctggagaaatctcacctcctcacccaccaggccattggcccagcctgccggaagctgcatgccagcggagcccagccctgctgcccactaccaccagctccatgtgcacctccagctcttgccctctgacttgtctgagcgtcccgggcttaggctggccccactggccctggtggaggtggggatgactctcccagtgccacagactcccctcccccacgtaacccagcaacagaaactggctcctgggcggcaactgtgtccctggtaacaaatgggtaggaaaaatagagaagggtcattgtctagggaggcgggagagaggcacgccctggctgcttcccgatccatgctctgctttcccccacctccagggccaccgccgactttgtaccccccaacccctgaggaagatgggggcaagaagatcacgctccccgcctgttcccccgccgcttttctcctctttcctctctttgttctcagctccccctgtcccctcagctccagacgtaggggaggggttgccacaggcctccctgtttgaagcctgcccttgtctgagatgctggtaatggccatggtacccccttctgggcatctgttctggtttttaaccattgtcttgttctgtgatgaggggaggggggcacatgctgagtctcccaaggctgcgtctggaggggcccctgcttctccagcctggacccccagctttgcccaacaccagcccctgccccagcccaagtccaaatgtttacagggagcctcctgcccagtcccccaaccccagccgctcggaggccccaaaggaaaaagcacaagaagcgtgagacgccaccattcctggaaaccacagtccacctgctcattctcgtagcttttt

SEQ ID NO: 3805 - protein, 318 aa, Homo sapiens
MRGAGESGKSTIVKQMKIIHEDGYSEEECRQYRAVVYSNTIQSIMAIVKAMGNLQIDFADPSRADDARQLFALSCTAEEQGVLPDDLSGVIRRLWADHGVQACFGRSREYQLNDSAAYYLNDLERIAQSDYIPTQQDVLRTRVKTTGIVETHFTFKDLHFKMFDVGGQRSERKKWIHCFEGVTAIIFCVALSAYDLVLAEDEEMNRMHESMKLFDSICNNKWFTDTSIILFLNKKDLFEEKITHSPLTICFPEYTGANKYDEAASYIQSKFEDLNKRKDTKEIYTHFTCATDTKNVQFVFDAVTDVIIKNNLKDCGLF

SEQ ID NO: 3806 - DNA, 2356 bp, Homo sapiens
agtagctctgactcctgtcccaggttatgctgagtcccagcagggaaccaccacagctctgaatcagcctgttagccgctgtccattgctcttcatctgctctttatctgaaaatcttcagaagctttccttcaaatgagatgaccacagcagtcttctctgcaggttgcaggaaatgagaggtgctggggagtcagggaagagcaccatcgtcaagcagatgaagatcatccacgaggatggctactccgaggaggaatgccggcagtaccgggcggttgtctacagcaacaccatccagtccatcatggccattgtcaaagccatgggcaacctgcagatcgactttgccgacccctccagagcggacgacgccaggcagctatttgcactgtcctgcaccgccgaggagcaaggcgtgctccctgatgacctgtccggcgtcatccggaggctctgggctgaccatggtgtgcaggcctgctttggccgctcaagggaataccagctcaacgactcagctgcctactacctgaacgacctggagcgtattgcacagagtgactacatccccacacagcaagatgtgctacggacccgcgtaaagaccacggggatcgtggagacacacttcaccttcaaggacctacacttcaagatgtttgatgtgggtggtcagcggtctgagcggaagaagtggatccactgctttgagggcgtcacagccatcatcttctgcgtagccttgagcgcctatgacttggtgctagctgaggacgaggagatgaaccgcatgcatgagagcatgaagctattcgatagcatctgcaacaacaagtggttcacagacacgtccatcatcctcttcctcaacaagaaggacctgtttgaggagaagatcacacacagtcccctgaccatctgcttccctgagtacacaggggccaacaaatatgatgaggcagccagctacatccagagtaagtttgaggacctgaataagcgcaaagacaccaaggagatctacacgcacttcacgtgcgccaccgacaccaagaacgtgcagttcgtgtttgacgccgtcaccgatgtcatcatcaagaacaacctgaaggactgcggcctcttctgaggggcagcggggcctggcgggatggtgagccagaggggctgtggcagggtgctggggaagaactaagcgggcctggagccccagcagggggttctgggggtgggtaggggggtgaacctggagggggaggggcaataggtgaccaggggacaagggaggagaaggcccagggtgtgaatcaggaggtcaagtgagtgaggtgcagggcatggaggaggtcatacaagcaggcctggcccagtggtccagacagaagggcctggccttgccctgggacagaaccagaggccatcctgatgttccctggagaaatctcacctcctcacccaccaggccattggcccagcctgccggaagctgcatgccagcggagcccagccctgctgcccactaccaccagctccatgtgcacctccagctcttgccctctgacttgtctgagcgtcccgggcttaggctggccccactggccctggtggaggtggggatgactctcccagtgccacagactcccctcccccacgtaacccagcaacagaaactggctcctgggcggcaactgtgtccctggtaacaaatgggtaggaaaaatagagaagggtcattgtctagggaggcgggagagaggcacgccctggctgcttcccgatccatgctctgctttcccccacctccagggccaccgccgactttgtaccccccaacccctgaggaagatgggggcaagaagatcacgctccccgcctgttcccccgccgcttttctcctctttcctctctttgttctcagctccccctgtcccctcagctccagacgtaggggaggggttgccacaggcctccctgtttgaagcctgcccttgtctgagatgctggtaatggccatggtacccccttctgggcatctgttctggtttttaaccattgtcttgttctgtgatgaggggaggggggcacatgctgagtctcccaaggctgcgtctggaggggcccctgcttctccagcctggacccccagctttgcccaacaccagcccctgccccagcccaagtccaaatgtttacagggagcctcctgcccagtcccccaaccccagccgctcggaggccccaaaggaaaaagcacaagaagcgtgagacgccaccattcctggaaaccacagtccacctgctcattctcgtagctttttaaaaaaatgaaagtaaaggaaaaaaaaaaaactgc

SEQ ID NO: 3807 - protein, 318 aa, Homo sapiens; identical to SEQ ID NO: 3805

SEQ ID NO: 3808 - DNA, 2799 bp, Homo sapiens
agtagctctgactcctgtcccaggttatgctgagtcccagcagggaaccaccacagctctgaatcagcctgttagccgctgtccattgctcttcatctgctctttatctgaaaatcttcagaagctttccttcaaatgagatgaccacagcagtcttctctgcaggttgcaggaaatgagaggtgctggggagtcagggaagagcaccatcgtcaagcagatgaagatcatccacgaggatggctactccgaggaggaatgccggcagtaccgggcggttgtctacagcaacaccatccagtccatcatggccattgtcaaagccatgggcaacctgcagatcgactttgccgacccctccagagcggacgacgccaggcagctatttgcactgtcctgcaccgccgaggagcaaggcgtgctccctgatgacctgtccggcgtcatccggaggctctgggctgaccatggtgtgcaggcctgctttggccgctcaagggaataccagctcaacgactcagctgcctactacctgaacgacctggagcgtattgcacagagtgactacatccccacacagcaagatgtgctacggacccgcgtaaagaccacggggatcgtggagacacacttcaccttcaaggacctacacttcaagatgtttgatgtgggtggtcagcggtctgagcggaagaagtggatccactgctttgagggcgtcacagccatcatcttctgcgtagccttgagcgcctatgacttggtgctagctgaggacgaggagatgaaccgcatgcatgagagcatgaagctattcgatagcatctgcaacaacaagtggttcacagacacgtccatcatcctcttcctcaacaagaaggacctgtttgaggagaagatcacacacagtcccctgaccatctgcttccctgagtacacaggggccaacaaatatgatgaggcagccagctacatccagagtaagtttgaggacctgaataagcgcaaagacaccaaggagatctacacgcacttcacgtgcgccaccgacaccaagaacgtgcagttcgtgtttgacgccgtcaccgatgtcatcatcaagaacaacctgaaggactgcggcctcttctgaggggcagcggggcctggcgggatggtgagccagaggggctgtggcagggtgctggggaagaactaagcgggcctggagccccagcagggggttctgggggtgggtaggggggtgaacctggagggggaggggcaataggtgaccaggggacaagggaggagaaggcccagggtgtgaatcaggaggtcaagtgagtgaggtgcagggcatggaggaggtcatacaagcaggcctggcccagtggtccagacagaagggcctggccttgccctgggacagaaccagaggccatcctgatgttccctggagaaatctcacctcctcacccaccaggccattggcccagcctgccggaagctgcatgccagcggagcccagccctgctgcccactaccaccagctccatgtgcacctccagctcttgccctctgacttgtctgagcgtcccgggcttaggctggccccactggccctggtggaggtggggatgactctcccagtgccacagactcccctcccccacgtaacccagcaacagaaactggctcctgggcggcaactgtgtccctggtaacaaatgggtaggaaaaatagagaagggtcattgtctagggaggcgggagagaggcacgccctggctgcttcccgatccatgctctgctttcccccacctccagggccaccgccgactttgtaccccccaacccctgaggaagatgggggcaagaagatcacgctccccgcctgttcccccgccgcttttctcctctttcctctctttgttctcagctccccctgtcccctcagctccagacgtaggggaggggttgccacaggcctccctgtttgaagcctgcccttgtctgagatgctggtaatggccatggtacccccttctgggcatctgttctggtttttaaccattgtcttgttctgtgatgaggggaggggggcacatgctgagtctcccaaggctgcgtctggaggggcccctgcttctccagcctggacccccagctttgcccaacaccagcccctgccccagcccaagtccaaatgtttacagggagcctcctgcccagtcccccaaccccagccgctcggaggccccaaaggaaaaagcacaagaagcgtgagacgccaccattcctggaaaccacagtccacctgctcattctcgtagctttttaaaaaaatgaaagtaaaggaaaaaaaaaaaactgcaaatctagaaaactttttagagaaaaactatttaaaactgtcagatcctgaccagcaagcccccccccagccccccttccaagtgactccgtgccttgagtgtgtctgcgtgtttacacccgtccctctgctggccgcccccgtgcgagcggcacccctgccctgccctccacagaattgggttccaagggctgttccagacaactgccaacgtcactgagggccctgccccagcggccctggccccaggctctattaacctaaaatgtagctccctagcgctaacctaggaaccgccgctgcctgctggggggccacgcccctcatgcccttgtcccaggcccggggccttcagcgttgaacacttccttgcttttttcacatgttttatggaattgttcacctggtttgaaataataaaatgtagaaagaaaaaaaatacc

SEQ ID NO: 3809 - protein, 318 aa, Homo sapiens; identical to SEQ ID NO: 3805

SEQ ID NO: 3810 - DNA, 2466 bp, Homo sapiens
cagtatgggcgtgtgtgggtgtgggtgtgtgagatacgccgcaggtctcccagattcatgagtcagtacgcgtgtgtgttacactgtaggtctcctagattctagccttctagcctccatctgctcagggcagacctgagcgcagtgagcagagggcggggcattgggccatgtccagaaagctgaagtgtgacgctgtgctcctgcttaggcccctggttgctaaggctcagtgtggggagaagaagggctgctaccctgttggatggagtatgcagggcatcttcctgccagctctgcccagggcaccatattggcatgcaccagctgcacaggttggcgagcctatgtatgtgagaacagggtggctccttcatggctggccaagtctccagccaagaccccccaggacagtggggagccatggtgggcagcagagcttgtgggaggcaaaggcctgcagagagtctgccatggggcacaggtgctctaggttaccttgaccactgtggccctgccagctgcattcctggtagctcaactgcccaccaggcccagctgcctccatctcacggtgcagctggtgggaaggttagttctgcctcctgggctacaggtgtctgggcatttgttctgtgcctgtggagcccctctgggcctgccccctgaccacctgtgccctctgttccaggtgctggggagtcagggaagagcaccatcgtcaagcagatgaagtaagtgctgtattccagaggcagtgctcaaactccagcttcccctcttcaccctctgggcctgcactgcccccgactacaggcccagccagtcttagccaggcccagaatcttctgagaagcagaaggaccctcaggtcccagtgggtcaggggcagttttcccttctctgaagcaggtcccagtagccccaggcagccgtgggaactcccagtgcccaggggacactaaccttcctggtccctggctatcaggatcatccacgaggatggctactccgaggaggaatgccggcagtaccgggcggttgtctacagcaacaccatccagtccatcatggccattgtcaaagccatgggcaacctgcagatcgactttgccgacccctccagagcggacgacgccaggcagctatttgcactgtcctgcaccgccgaggagcaaggcgtgctccctgatgacctgtccggcgtcatccggaggctctgggctgaccatggtgtgcaggcctgctttggccgctcaagggaataccagctcaacgactcagctgcctactacctgaacgacctggagcgtattgcacagagtgactacatccccacacagcaagatgtgctacggacccgcgtaaagaccacggggatcgtggagacacacttcaccttcaaggacctacacttcaagatgtttgatgtgggtggtcagcggtctgagcggaagaagtggatccactgctttgagggcgtcacagccatcatcttctgcgtagccttgagcgcctatgacttggtgctagctgaggacgaggagatgaaccgcatgcatgagagcatgaagctattcgatagcatctgcaacaacaagtggttcacagacacgtccatcatcctcttcctcaacaagaaggacctgtttgaggagaagatcacacacagtcccctgaccatctgcttccctgagtacacaggggccaacaaatatgatgaggcagccagctacatccagagtaagtttgaggacctgaataagcgcaaagacaccaaggagatctacacgcacttcacgtgcgccaccgacaccaagaacgtgcagttcgtgtttgacgccgtcaccgatgtcatcatcaagaacaacctgaaggactgcggcctcttctgaggggcagcggggcctggcgggatgggccaccgccgactttgtaccccccaacccctgaggaagatgggggcaagaagatcacgctccccgcctgttcccccgccgcttttctcctctttcctctctttgttctcagctccccctgtcccctcagctccagacgtaggggaggggttgccacaggcctccctgtttgaagcctgcccttgtctgagatgctggtaatggccatggtacccccttctgggcatctgttctggtttttaaccattgtcttgttctgtgatgaggggaggggggcacatgctgagtctcccaaggctgcgtctggaggggcccctgcttctccagcctggacccccagctttgcccaacaccagcccctgccccagcccaagtccaaatgtttacagggagcctcctgcccagtcccccaaccccagccgctcggaggccccaaaggaaaaagcacaagaagcgtgagacgccaccattcctggaaaccacagtccacctgctcattctcgtagctttttaaaaaaatgaaagtaaaggaaaaaaaaaaaactgc

SEQ ID NO: 3811 - protein, 274 aa, Homo sapiens; identical to SEQ ID NO: 3797

SEQ ID NO: 3812 - DNA, 2909 bp, Homo sapiens
cagtatgggcgtgtgtgggtgtgggtgtgtgagatacgccgcaggtctcccagattcatgagtcagtacgcgtgtgtgttacactgtaggtctcctagattctagccttctagcctccatctgctcagggcagacctgagcgcagtgagcagagggcggggcattgggccatgtccagaaagctgaagtgtgacgctgtgctcctgcttaggcccctggttgctaaggctcagtgtggggagaagaagggctgctaccctgttggatggagtatgcagggcatcttcctgccagctctgcccagggcaccatattggcatgcaccagctgcacaggttggcgagcctatgtatgtgagaacagggtggctccttcatggctggccaagtctccagccaagaccccccaggacagtggggagccatggtgggcagcagagcttgtgggaggcaaaggcctgcagagagtctgccatggggcacaggtgctctaggttaccttgaccactgtggccctgccagctgcattcctggtagctcaactgcccaccaggcccagctgcctccatctcacggtgcagctggtgggaaggttagttctgcctcctgggctacaggtgtctgggcatttgttctgtgcctgtggagcccctctgggcctgccccctgaccacctgtgccctctgttccaggtgctggggagtcagggaagagcaccatcgtcaagcagatgaagtaagtgctgtattccagaggcagtgctcaaactccagcttcccctcttcaccctctgggcctgcactgcccccgactacaggcccagccagtcttagccaggcccagaatcttctgagaagcagaaggaccctcaggtcccagtgggtcaggggcagttttcccttctctgaagcaggtcccagtagccccaggcagccgtgggaactcccagtgcccaggggacactaaccttcctggtccctggctatcaggatcatccacgaggatggctactccgaggaggaatgccggcagtaccgggcggttgtctacagcaacaccatccagtccatcatggccattgtcaaagccatgggcaacctgcagatcgactttgccgacccctccagagcggacgacgccaggcagctatttgcactgtcctgcaccgccgaggagcaaggcgtgctccctgatgacctgtccggcgtcatccggaggctctgggctgaccatggtgtgcaggcctgctttggccgctcaagggaataccagctcaacgactcagctgcctactacctgaacgacctggagcgtattgcacagagtgactacatccccacacagcaagatgtgctacggacccgcgtaaagaccacggggatcgtggagacacacttcaccttcaaggacctacacttcaagatgtttgatgtgggtggtcagcggtctgagcggaagaagtggatccactgctttgagggcgtcacagccatcatcttctgcgtagccttgagcgcctatgacttggtgctagctgaggacgaggagatgaaccgcatgcatgagagcatgaagctattcgatagcatctgcaacaacaagtggttcacagacacgtccatcatcctcttcctcaacaagaaggacctgtttgaggagaagatcacacacagtcccctgaccatctgcttccctgagtacacaggggccaacaaatatgatgaggcagccagctacatccagagtaagtttgaggacctgaataagcgcaaagacaccaaggagatctacacgcacttcacgtgcgccaccgacaccaagaacgtgcagttcgtgtttgacgccgtcaccgatgtcatcatcaagaacaacctgaaggactgcggcctcttctgaggggcagcggggcctggcgggatgggccaccgccgactttgtaccccccaacccctgaggaagatgggggcaagaagatcacgctccccgcctgttcccccgccgcttttctcctctttcctctctttgttctcagctccccctgtcccctcagctccagacgtaggggaggggttgccacaggcctccctgtttgaagcctgcccttgtctgagatgctggtaatggccatggtacccccttctgggcatctgttctggtttttaaccattgtcttgttctgtgatgaggggaggggggcacatgctgagtctcccaaggctgcgtctggaggggcccctgcttctccagcctggacccccagctttgcccaacaccagcccctgccccagcccaagtccaaatgtttacagggagcctcctgcccagtcccccaaccccagccgctcggaggccccaaaggaaaaagcacaagaagcgtgagacgccaccattcctggaaaccacagtccacctgctcattctcgtagctttttaaaaaaatgaaagtaaaggaaaaaaaaaaaactgcaaatctagaaaactttttagagaaaaactatttaaaactgtcagatcctgaccagcaagcccccccccagccccccttccaagtgactccgtgccttgagtgtgtctgcgtgtttacacccgtccctctgctggccgcccccgtgcgagcggcacccctgccctgccctccacagaattgggttccaagggctgttccagacaactgccaacgtcactgagggccctgccccagcggccctggccccaggctctattaacctaaaatgtagctccctagcgctaacctaggaaccgccgctgcctgctggggggccacgcccctcatgcccttgtcccaggcccggggccttcagcgttgaacacttccttgcttttttcacatgttttatggaattgttcacctggtttgaaataataaaatgtagaaagaaaaaaaatacc

SEQ ID NO: 3813 - protein, 274 aa, Homo sapiens; identical to SEQ ID NO: 3797

SEQ ID NO: 3814 - DNA, 623 bp, Homo sapiens
gccaacaaatatgatgaggcagccagctacatccagagtaagtttgaggacctgaataagcgcaaagacaccaaggagatctacacgcacttcacgtggccaccattcctggaaaccacagtccacctgctcattctcgtagctttttaaaaaaatgaaagtaaaggaaaaaaaaaaaactgcaaatctagaaaactttttagagaaaaactatttaaaactgtcagatcctgaccagcaagcccccccccagccccccttccaagtgactccgtgccttgagtgtgtctgcgtgtttacacccgtccctctgctggccgcccccgtgcgagcggcacccctgccctgccctccacagaattgggttccaagggctgttccagacaactgccaacgtcactgagggccctgccccagcggccctggccccaggctctattaacctaaaatgtagctccctagcgctaacctaggaaccgccgctgcctgctggggggccacgcccctcatgcccttgtcccaggcccggggccttcagcgttgaacacttccttgcttttttcacatgttttatggaattgttcacctggtttgaaataataaaatgtagaaagaaaaaaaat

SEQ ID NO: 3815 - protein, 82 aa, Homo sapiens; identical to SEQ ID NO: 3791

SEQ ID NO: 3816 - DNA, 938 bp, Homo sapiens
gggggaggggcaataggtgaccaggggacaagggaggagaaggcccagggtgtgaatcaggaggtcaagtgagtgaggtgcagggcatggaggaggtcatacaagcaggcctggcccagtggtccagacagaagggcctggccttgccctgggacagaaccagaggccatcctgatgttccctggagaaatctcacctcctcacccaccaggccattggcccagcctgccggaagctgcatgccagcggagcccagccctgctgcccactaccaccagctccatgtgcacctccagctcttgccctctgacttgtctgagcgtcccgggcttaggctggccccactggccctggtggaggtggggatgactctcccagtgccacagactcccctcccccacgtaacccagcaacagaaactggctcctgggcggcaactgtgtccctggtaacaaatgggtaggaaaaatagagaagggtcattgtctagggaggcgggagagaggcacgccctggctgcttcccgatccatgctctgctttcccccacctccagggccaccgccgactttgtaccccccaacccctgaggaagatgggggcaagaagatcacgctccccgcctgttcccccgccgcttttctcctctttcctccctgccctgccctccacagaattgggttccaagggctgttccagacaactgccaacgtcactgagggccctgccccagcggccctggccccaggctctattaacctaaaatgtagctccctagcgctaacctaggaaccgccgctgcctgctggggggccacgcccctcatgcccttgtcccaggcccggggccttcagcgttgaacacttccttgcttttttcacatgttttatggaattgttcacctggtttgaaataataaaatgtagaaagaaaaaaaat

SEQ ID NO: 3817 - protein, 110 aa, Homo sapiens
MGRKNREGSLSREAGERHALAASRSMLCFPPPPGPPPTLYPPTPEEDGGKKITLPACSPAAFLLFPPCPALHRIGFQGLFQTTANVTEGPAPAALAPGSINLKCSSLALT

SEQ ID NO: 3818 - DNA, 358 bp, Homo sapiens
gtaaaggaaaaaaaaaaaactgcaaatctagaaaactttttagagaaaaactatttaaaactgtcagatcctgaccagcaagcccccccccagcccccacagaattgggttccaagggctgttccagacaactgccaacgtcactgagggccctgccccagcggccctggccccaggctctattaacctaaaatgtagctccctagcgctaacctaggaaccgccgctgcctgctggggggccacgcccctcatgcccttgtcccaggcccggggccttcagcgttgaacacttccttgcttttttcacatgttttatggaattgttcacctggtttgaaataataaaatgtagaaag

SEQ ID NO: 3819 - protein, 52 aa, Homo sapiens
NCQILTSKPPPSPHRIGFQGLFQTTANVTEGPAPAALAPGSINLKCSSLALT

SEQ ID NO: 3820 - DNA, 2628 bp, Homo sapiens
ggccggggtcggcgccgcggaggcggggagggagggagggttggagggttgagccagagacccgggaccccgtccccgcacacctgccagtgccccgtagcttcggccgccggcactggcaggagatgaaaggctgctgccgcccggtcggaaggacatcggcgccccccaggcccggtccccgccccagttcctcgggcctttcctgctgcccctgcctgcgagggccgacgacacggagaacaggatcctgcgcccaacccaggtccccgccttctttcagaggcccaggcctggaccccgctgagccgcagatgtgcgagcaggagcgccagagccccgatgcccgcccagcaggaagcgggcgggagatggttccttccttctgtcctgagggggaaccctgcacagagggaccattgagggcctggcattgtctgcctaactcacccagtgcctccctccctgggtgggccatgcggggccttgacaggattgccctggtgccgtcttggcagtgggtctgggtgggatcctgggggcagggcttccctgagtgcagacagctaggcctccacctgccccggcctcccacccaggctcagatttccagggcataaggctccattgtcccagcactggtggaggcggcctgtcaattcagccttgtgtttggtggttgggaaattcccagccatggggggctgcaggcaggaaggggctgcccaggtgtcctgcaccccaactgaagggactccatgaggttggttcctgggcatcccctgctgcctggagctgtcccaggctggacctcaaccattcatcaaccctcaggagcagttgggtgaggagcaccagaaattcaatgctccctggcgctgcatccccagagccctcccagcctaagaagccccatctttctgtctccacgcatggagaactgcagctgtgaggcccaggacccttagcaggacatgcagagctgggcagggacccaggctcatgctcccagcgtggggtgagttgtctccagcctgtggagactgccatgaagttgatctgcctcccagagggcctggcccacttgaaataattgctccggctactgatgtggtgggaactttggtatttttaacccatttggggggtgggggagcagctaggaagagagaggcaagctttcagagtcagagaggcctgagagaggagagtagagggaaactcagtgaggaggagccaggcaggctgcctcggtagttccccaggcctagacaccccccctgtaccaccccctgtcccagcaggtaggtgcagacctagatgccaggtgcagaagggggaaagggccctctccagggttacagcagggatcaccgaggctgcaggggctgccaaggcctggaagaagtcccatgttccagggagccccatggcttctgatgtcaggaaaacttagtcctctcagttccccagaatcatttcaccccaccccacccaaactgagtggcaaaccagttgagtagagaatacaagccctgactccagctgcctggtcagtggcatagccagccaagtcctagcaaccctaggagtcagggagtcagggaggaggcaaggacaagactacagtattgtttggctgagttctgggtctggccccactccccaaaactgaccccaatctctgtgtctgctgccctaaaaagagaccctggggctgggtgtggtggctcacgcctgtaatcctagcactttgggaggccaaggtgggcggatcacttgagatcaggagttcaagaccagcctggccaacatggtgaaaccccgtctctactaaaatacaaaaattagctgggcatgatgacgggtgcctgtaatcccagctactcaggaggctgaaacaggagaatcacttgaacccaggagacggtggttgcagtgagccaagattgtgccactgcactctagcctaggtggctgagcgagactccatctcaaaaaaataaataaaaggagaccctgactggatgtagtggctcatgccttaatcccagcacttttggaggccaaggcaggaggatcacttgaggccaaaagtttgagaccagcctgggcaacatagcaagaccccgtctcttaaaaacaaaagatcctagcggtcctcatctctaccatggactaccagagggaaggcagcacctctcatcacccagggggatggcctccagtcagctgggtggggaacacagagccctgcccagaggcttgaacctggcaccacaggggtctggaattacacagaagacgggtgacagccaaggtggatcatgaacggtgagaagtccagcaggtgacaaggggaagggtctaaagggtggagggcacagcgcaagcaaagtcttggcaacaaaagagctaatgcatcccagaaatggggcaggtggagtactggaagctacaccaagcttcagagtggtcctgtggcctcggtgtggtagctcaggcctataattccaacactttgggaggctgaggcaggaggaggataacttgaacccaggagttcaagatcagcctgggcaacatagtgagacctccatttttacaaaaaatacaaaaattaactgt

SEQ ID NO: 3821 - protein, 37 aa, Homo sapiens
MASSQLGGEHRALPRGLNLAPQGSGITQKTGDSQGGS

SEQ ID NO: 3822 - DNA, 424 bp, Homo sapiens
ctggcaggagatgaaaggctgctgccgcccggtcggaaggacatcggcgccccccaggcccggtccccgccccagttcctcgggcctttcctgctgcccctgcctgcgagggccgacgacacggagaacaggatcctgcgcccaacccaggagcagttgggtgaggagcaccagaaattcaatgctccctggcgctgcatccccagagccctcccagcctaagaagccccatctttctgtctccacgcatggagaactgcagctgtgaggcccaggacccttagcaggacatgcagagctgggcagggacccaggctcatgctcccagcgtggggtgagttgtctccagcctgtggagactgccatgaagttgatctgcctcccagagggcctggcccacttgaaataattgctccggctactg

SEQ ID NO: 3823 - protein, 85 aa, Homo sapiens
MKGCCRPVGRTSAPPRPGPRPSSSGLSCCPCLRGPTTRRTGSCAQPRSSWVRSTRNSMLPGAASPEPSQPKKPHLSVSTHGELQL

SEQ ID NO: 3824 - DNA, 577 bp, Homo sapiens
catgcagagctgggcagggacccaggctcatgctcccagcgtgggtggggaacacagagccctgcccagaggcttgaacctggcaccacaggggtctggaattacacagaagacgggtgacagccaaggtggatcatgaacggtgagaagtccagcaggtgacaaggggaagggtctaaagggtggagggcacagcgcaagcaaagtcttggcaacaaaagagctaatgcatcccagaaatggggcaggtggagtactggaagctacaccaagcttcagagtggtcctgtggcctcggtgtggtagctcaggcctataattccaacactttgggaggctgaggcaggaggaggataacttgaacccaggagttcaagatcagcctgggcaacatagtgagacctccatttttacaaaaaatacaaaaattaactgtgtgttgtggtgtgtgcctggagtcccagctcctcgggaggctgaggtggggggatcacttgagttctggaggtcaaggctgctgtgggccatgatcttgccactgcactccagcctgggtggcaaagcaagatcctgtctc

SEQ ID NO: 3825 - protein, 45 aa, Homo sapiens
MQSWAGTQAHAPSVGGEHRALPRGLNLAPQGSGITQKTGDSQGGS

SEQ ID NO: 3826 - DNA, 337 bp, Homo sapiens
aaccccagctccaggggctcagcaggcaaagggaatcactgagtgggggcaccacccgtggactccaatatctcaacctctccctccacaggttggaggtgggaggaacaacccccaccaaacccagagccgaaaactgagggagttttacagacaggacggagctcctgcacctcggagcctcagttgggaatgacctggggtcttgtcctgaagctgagtctggtgaacgtgccccatttgtaacatgaggggtacttctctggagggactgtatgttgacagtggcagagtggagccctgaagtccacctgagtgaatataccagggcttgaga

SEQ ID NO: 3827 - protein, 64 aa, Homo sapiens
TPAPGAQQAKGITEWGHHPWTPISQPLPPQVGGGRNNPHQTQSRKLREFYRQDGAPAPRSLSWE

SEQ ID NO: 3828 - DNA, 2989 bp, Homo sapiens
acggcgggcggtgcgtggggcggtggctggcctggtgggggcgggggctgcttcttaaaggagccgtcagagggtccccagcggccccagggtgggaaggggccagagtggagagatgctgctgcggaagtcctcggtggagtgtgagaaggcagccagtgttggcctggaagacctctagaacctgagaagaggcagcgatcctggggcagagtccagggcagctcaaggctcctccacacacacacccgctgaaccctgagcaccctgagctgctgagatggggcgggccggggctgccgccgtgatcccgggcctggccctgctctgggcagtggggctggggagtgccgcccccagcccccacgccttcggctctccttccaagagctccaggcctggcatggtctccagactttcagcctggagcgaacctgctgctaccaggccttgctggtggatgaggagcgtggacgcctgtttgtgggtgccgagaaccatgtggcctccctcaacctggacaacatcagcaagcgggccaagaagctggcctggccggcccctgtggaatggcgagaggagtgcaactgggcagggaaggacattggtactgagtgcatgaacttcgtgaagttgctgcatgcctacaaccgcacccatttgctggcctgtggcacgggagccttccacccaacctgtgcctttgtggaagtgggccaccgggcagaggagcccgtcctccggctggacccaggaaggatagaggatggcaaggggaagagtccttatgaccccaggcatcgggctgcctccgtgctggtgggggaggagctatactcaggggtggcagcagacctcatgggacgagactttaccatctttcgcagcctagggcaacgtccaagtctccgaacagagccacacgactcccgctggctcaatgagcccaagtttgtcaaggtattttggatcccggagagcgagaacccagacgacgacaaaatctacttcttctttcgtgagacggcggtagaggcggcgccggcactgggacgcctgtccgtgtcccgcgttggccagatctgccggaacgacgtgggcggccagcgcagcctggtcaacaagtggacgacgttcctgaaggcgcggctggtgtgctcggtgcccggcgtcgagggcgacacccacttcgatcagctccaggatgtgtttctgttgtcctcgcgggaccaccggaccccgctgctctatgccgtcttctccacgtccagcatcttccagggctctgcggtgtgcgtgtacagcatgaacgacgtgcgccgggccttcttgggaccctttgcacacaaggaggggcccatgcaccagtgggtgtcataccagggtcgcgtcccctacccgcggccaggcatgtgccccagcaagacctttggcaccttcagttccaccaaggacttcccagacgatgtcatccagtttgcgcggaaccaccccctcatgtacaactctgtcctgcccactggggggcgccctcttttcctacaagttggagccaattacaccttcactcaaattgccgcggaccgggttgcagccgctgacggacactatgacgtcctcttcattggcacagacgttggcacggtgctgaaggtgatctcggtccccaagggcagtaggcccagcgcagaggggctgctcctggaggagctgcacgtgtttgaggactcggccgctgtcaccagcatgcaaatttcttccaagaggcaccagctgtacgtagcctcgcggagcgcggtggcccagatcgcgttgcaccgctgcgctgcccacggccgcgtctgcaccgaatgctgtctggcgcgtgacccctactgcgcctgggacggggtcgcgtgcacgcgcttccagcccagtgccaagaggcggttccggcggcaagacgtaaggaatggcgaccccagcacgttgtgctccggagactcgtctcgtcccgcgctgctggaacacaaggtgttcggcgtggagggcagcagcgcctttctggagtgtgagccccgctcgctgcaggcgcgcgtggagtggactttccagcgcgcaggggtgacagcccacacccaggtgctggcagaggagcgcaccgagcgcaccgcccggggactactgctgcgcaggctgcggcgccgggactcgggcgtgtacttgtgcgccgccgtcgagcagggctttacgcaaccgctgcgtcgcctgtcgctgcacgtgttgagtgctacgcaggccgaacgactggcgcgggccgaggaggctgcgcccgccgcgccgccgggccccaaactctggtaccgggactttctgcagctggtggagccgggcggaggtggcagcgcgaactccctgcgcatgtgccgcccgcagcctgcgctgcagtcactgcccctggagtcgcggagaaagggccgtaaccggaggacccacgcccctgagcctcgcgctgagcgggggccgcgcagcgcaacgcactggtgaccagactgtccccacgccgggaaccaagcaggagacgacaggcgagagaggagccagacagaccctgaaaagaaggacgggttggggccgggcacattgggggtcaccggccgatggagacaccaaccgacaggccctggctgagggcagctgcgcgggcttatttattaacaggataacccttgaatgtagcagccccgggagggcggcacaggtcgggcgcaggattcagccggagggaagggacggggaagccgagctccagagcaacgaccagggccgaggaggtgcctggagtgcccaccctgggagacagaccccacctccttgggtagtgagcagtgagcagaaagctgtgaacaggctgggctgctggaggtggggcgaggcaggccgactgtactaaagtaacgcaataaacgcattatcagccaaagctggaatggccccagcagaaaacccc

SEQ ID NO: 3829 - protein, 635 aa, Homo sapiens
MNFVKLLHAYNRTHLLACGTGAFHPTCAFVEVGHRAEEPVLRLDPGRIEDGKGKSPYDPRHRAASVLVGEELYSGVAADLMGRDFTIFRSLGQRPSLRTEPHDSRWLNEPKFVKVFWIPESENPDDDKIYFFFRETAVEAAPALGRLSVSRVGQICRNDVGGQRSLVNKWTTFLKARLVCSVPGVEGDTHFDQLQDVFLLSSRDHRTPLLYAVFSTSSIFQGSAVCVYSMNDVRRAFLGPFAHKEGPMHQWVSYQGRVPYPRPGMCPSKTFGTFSSTKDFPDDVIQFARNHPLMYNSVLPTGGRPLFLQVGANYTFTQIAADRVAAADGHYDVLFIGTDVGTVLKVISVPKGSRPSAEGLLLEELHVFEDSAAVTSMQISSKRHQLYVASRSAVAQIALHRCAAHGRVCTECCLARDPYCAWDGVACTRFQPSAKRRFRRQDVRNGDPSTLCSGDSSRPALLEHKVFGVEGSSAFLECEPRSLQARVEWTFQRAGVTAHTQVLAEERTERTARGLLLRRLRRRDSGVYLCAAVEQGFTQPLRRLSLHVLSATQAERLARAEEAAPAAPPGPKLWYRDFLQLVEPGGGGSANSLRMCRPQPALQSLPLESRRKGRNRRTHAPEPRAERGPRSATHW

SEQ ID NO: 3830 - DNA, 325 bp, Homo sapiens
gagaaggcagccagtgttggcctggaagacctctagaacctgagaagaggcagcgatcctggggcagagtccagggcagctcaaggctcctccacacacacacccgctgaaccctgagcaccctgagctgctgagatggggcgggccgaggaggtgcctggagtgcccaccctgggagacagaccccacctccttgggtagtgagcagtgagcagaaagctgtgaacaggctgggctgctggaggtggggcgaggcaggccgactgtactaaagtaacgcaataaacgcattatcagccaaagctggaatggccccagcagaaaa

SEQ ID NO: 3831 - protein, 55 aa, Homo sapiens
EEAAILGQSPGQLKAPPHTHPLNPEHPELLRWGGPRRCLECPPWETDPTSLGSEQ

SEQ ID NO: 3832 - DNA, 3188 bp, Homo sapiens
gtgggtggcacattgtgaattaatgtctgtgagtgtgtatacaagagaggagattactgggaagggtgacgtggtgaggcgggcttgccagtgcagggtgaccctgagggtgtgcccagtggcgtgggtgtgtctgtgattgtggccaggcggggcaccctcggaggggagggttcggaagtggaatgcgaccccccagcctctttcccctaggggctgtaatctgatccctggggactccccccctagcctcccgccctcgccctcactgctgactcctcttccagatcctggggcagagtccagggcagctcaaggctcctccacacacacacccgctgaaccctgagcaccctgagctgctgagatggggcgggccggggctgccgccgtgatcccgggcctggccctgctctgggcagtggggctggggagtgccgcccccagcccccacgccttcggctctccttccaagagctccaggcctggcatggtctccagactttcagcctggagcgaacctgctgctaccaggccttgctggtggatgaggagcgtggacgcctgtttgtgggtgccgagaaccatgtggcctccctcaacctggacaacatcagcaagcgggccaagaagctggcctggccggcccctgtggaatggcgagaggagtgcaactgggcagggaaggacattggtactgagtgcatgaacttcgtgaagttgctgcatgcctacaaccgcacccatttgctggcctgtggcacgggagccttccacccaacctgtgcctttgtggaagtgggccaccgggcagaggagcccgtcctccggctggacccaggaaggatagaggatggcaaggggaagagtccttatgaccccaggcatcgggctgcctccgtgctggtgggggaggagctatactcaggggtggcagcagacctcatgggacgagactttaccatctttcgcagcctagggcaacgtccaagtctccgaacagagccacacgactcccgctggctcaatgagcccaagtttgtcaaggtattttggatcccggagagcgagaacccagacgacgacaaaatctacttcttctttcgtgagacggcggtagaggcggcgccggcactgggacgcctgtccgtgtcccgcgttggccagatctgccggaacgacgtgggcggccagcgcagcctggtcaacaagtggacgacgttcctgaaggcgcggctggtgtgctcggtgcccggcgtcgagggcgacacccacttcgatcagctccgtgagtgcgggagtgggtatggggttggggaggggggcagcggcgcagactccgggagcccccgccgcagcggggctgtgcgccctaccccagctaggccccttccccgcagaggatgtgtttctgttgtcctcgcgggaccaccggaccccgctgctctatgccgtcttctccacgtccagcatcttccagggctctgcggtgtgcgtgtacagcatgaacgacgtgcgccgggccttcttgggaccctttgcacacaaggaggggcccatgcaccagtgggtgtcataccagggtcgcgtcccctacccgcggccaggcatgtgccccagcaagacctttggcaccttcagttccaccaaggacttcccagacgatgtcatccagtttgcgcggaaccaccccctcatgtacaactctgtcctgcccactggggggcgccctcttttcctacaagttggagccaattacaccttcactcaaattgccgcggaccgggttgcagccgctgacggacactatgacgtcctcttcattggcacagacgttggcacggtgctgaaggtgatctcggtccccaagggcagtaggcccagcgcagaggggctgctcctggaggagctgcacgtgtttgaggactcggccgctgtcaccagcatgcaaatttcttccaagaggcaccagctgtacgtagcctcgcggagcgcggtggcccagatcgcgttgcaccgctgcgctgcccacggccgcgtctgcaccgaatgctgtctggcgcgtgacccctactgcgcctgggacggggtcgcgtgcacgcgcttccagcccagtgccaagaggcggttccggcggcaagacgtaaggaatggcgaccccagcacgttgtgctccggagactcgtctcgtcccgcgctgctggaacacaaggtgttcggcgtggagggcagcagcgcctttctggagtgtgagccccgctcgctgcaggcgcgcgtggagtggactttccagcgcgcaggggtgacagcccacacccaggtgctggcagaggagcgcaccgagcgcaccgcccggggactactgctgcgcaggctgcggcgccgggactcgggcgtgtacttgtgcgccgccgtcgagcagggctttacgcaaccgctgcgtcgcctgtcgctgcacgtgttgagtgctacgcaggccgaacgactggcgcgggccgaggaggctgcgcccgccgcgccgccgggccccaaactctggtaccgggactttctgcagctggtggagccgggcggaggtggcagcgcgaactccctgcgcatgtgccgcccgcagcctgcgctgcagtcactgcccctggagtcgcggagaaagggccgtaaccggaggacccacgcccctgagcctcgcgctgagcgggggccgcgcagcgcaacgcactggtgaccagactgtccccacgccgggaaccaagcaggagacgacaggcgagagaggagccagacagaccctgaaaagaaggacgggttggggccgggcacattgggggtcaccggccgatggagacaccaaccgacaggccctggctgagggcagctgcgcgggcttatttattaacaggataacccttgaatgtagcagccccgggagggcggcacaggtcgggcgcaggattcagccggagggaagggacggggaagccgagctccagagcaacgaccagggccgaggaggtgcctggagtgcccaccctgggagacagaccccacctccttgggtagtgagcagtgagcagaaagctgtgaacaggctgggctgctggaggtggggcgaggcaggccgactgtactaaagtaacgcaataaacgcattatcagccaaagctggaatggccccagcagaaaacccc

SEQ ID NO: 3833 - protein, 472 aa, Homo sapiens [sequence omitted]

SEQ ID NO: 3834 - DNA, 3565 bp, Homo sapiens
gtgggtggcacattgtgaattaatgtctgtgagtgtgtatacaagagaggagattactgggaagggtgacgtggtgaggcgggcttgccagtgcagggtgaccctgagggtgtgcccagtggcgtgggtgtgtctgtgattgtggccaggcggggcaccctcggaggggagggttcggaagtggaatgcgaccccccagcctctttcccctaggggctgtaatctgatccctggggactccccccctagcctcccgccctcgccctcactgctgactcctcttccagatcctggggcagagtccagggcagctcaaggctcctccacacacacacccgctgaaccctgagcaccctgagctgctgagatggggcgggccggggctgccgccgtgatcccgggcctggccctgctctgggcagtggggctggggagtgccgcccccagcccccacgccttcggctctccttccaagagctccaggcctggcatggtctccagactttcagcctggagcgaacctgctgctaccaggccttgctggtggatgaggagcgtggacgcctgtttgtgggtgccgagaaccatgtggcctccctcaacctggacaacatcagcaagcgggccaagaagctggcctggccggcccctgtggaatggcgagaggagtgcaactgggcagggaaggacattggtactgagtgcatgaacttcgtgaagttgctgcatgcctacaaccgcacccatttgctggcctgtggcacgggagccttccacccaacctgtgcctttgtggaagtgggccaccgggcagaggagcccgtcctccggctggacccaggaaggatagaggatggcaaggggaagagtccttatgaccccaggcatcgggctgcctccgtgctggtgggggaggagctatactcaggggtggcagcagacctcatgggacgagactttaccatctttcgcagcctagggcaacgtccaagtctccgaacagagccacacgactcccgctggctcaatgagcccaagtttgtcaaggtattttggatcccggagagcgagaacccagacgacgacaaaatctacttcttctttcgtgagacggcggtagaggcggcgccggcactgggacgcctgtccgtgtcccgcgttggccagatctgccggaacgacgtgggcggccagcgcagcctggtcaacaagtggacgacgttcctgaaggcgcggctggtgtgctcggtgcccggcgtcgagggcgacacccacttcgatcagctccgtgagtgcgggagtgggtatggggttggggaggggggcagcggcgcagactccgggagcccccgccgcagcggggctgtgcgccctaccccagctaggccccttccccgcagaggatgtgtttctgttgtcctcgcgggaccaccggaccccgctgctctatgccgtcttctccacgtccagcatcttccagggctctgcggtgtgcgtgtacagcatgaacgacgtgcgccgggccttcttgggaccctttgcacacaaggaggggcccatgcaccagtgggtgtcataccagggtcgcgtcccctacccgcggccaggcatgtgccccagcaagacctttggcaccttcagttccaccaaggacttcccagacgatgtcatccagtttgcgcggaaccaccccctcatgtacaactctgtcctgcccactggggggcgccctcttttcctacaagttggagccaattacaccttcactcaaattgccgcggaccgggttgcagccgctgacggacactatgacgtcctcttcattggcacagacgttggcacggtgctgaaggtgatctcggtccccaagggcagtaggcccagcgcagaggggctgctcctggaggagctgcacgtgtttgaggactcggccgctgtcaccagcatgcaaatttcttccaagaggcaccagctgtacgtagcctcgcggagcgcggtggcccagatcgcgttgcaccgctgcgctgcccacggccgcgtctgcaccgaatgctgtctggcgcgtgacccctactgcgcctgggacggggtcgcgtgcacgcgcttccagcccagtgccaagaggcggttccggcggcaagacgtaaggaatggcgaccccagcacgttgtgctccggagactcgtctcgtcccgcgctgctggaacacaaggtgttcggcgtggagggcagcagcgcctttctggagtgtgagccccgctcgctgcaggcgcgcgtggagtggactttccagcgcgcaggggtgacagcccacacccaggtgctggcagaggagcgcaccgagcgcaccgcccggggactactgctgcgcaggctgcggcgccgggactcgggcgtgtacttgtgcgccgccgtcgagcagggctttacgcaaccgctgcgtcgcctgtcgctgcacgtgttgagtgctacgcaggccgaacgactggcgcgggccgaggaggctgcgcccgccgcgccgccgggccccaaactctggtaccgggactttctgcagctggtggagccgggcggaggtggcagcgcgaactccctgcgcatgtgccgcccgcagcctgcgctgcagtcactgcccctggagtcgcggagaaagggccgtaaccggaggacccacgcccctgagcctcgcgctgagcgggggccgcgcagcgcaacgcactggtgaccagactgtccccacgccgggaaccaagcaggagacgacaggcgagagaggagccagacagaccctgaaaagaaggacgggttggggccgggcacattgggggtcaccggccgatggagacaccaaccgacaggccctggctgagggcagctgcgcgggcttatttattaacaggataacccttgaatgtagcagccccgggagggcggcacaggtcgggcgcaggattcagccggagggaagggacggggaagccgagctccagagcaacgaccagggccgaggaggtgcctggagtgcccaccctgggagacagaccccacctccttgggtagtgagcagtgagcagaaagctgtgaacaggctgggctgctggaggtggggcgaggcaggccgactgtactaaagtaacgcaataaacgcattatcagccaaagctggaatggccccagcagaaaaccccagtcctcggccttgctatgtggtcttgggcaccttactagcggtgtcagggcccgagtttctcctgtccaaggttgcctggtgaggattaaaggtggttccggccaggcgcggtggctcacgcctgtaatcccaacactttcggaggcccaggcggacggatcacgaggtcaggagatggaaaccatcccggctaacacggtgaaaccccgtctgtactaaaaatacaaaaaattagtcgggcgtggtggcgggcgcctgtaatcctagctactcaggaggctgaggcaggagaattgcttgaacctgggaggtggaggttgcaatgagcctagatctcgccgctgcactccagcctgggcgacagagcgagactcc

SEQ ID NO: 3835 - protein, 472 aa, Homo sapiens [sequence omitted]

SEQ ID NO: 3836 - DNA, 3049 bp, Homo sapiens
tgtgagtgtgtatacaagagaggagattactgggaagggtgacgtggtgaggcgggcttgccagtgcagggtgaccctgagggtgtgcccagtggcgtgggtgtgtctgtgattgtggccaggcggggcaccctcggaggggagggttcggaagtggaatgcgaccccccagcctctttcccctaggggctgtaatctgatccctggggactccccccctagcctcccgccctcgccctcactgctgactcctcttccagatcctggggcagagtccagggcagctcaaggctcctccacacacacacccgctgaaccctgagcaccctgagctgctgagatggggcgggccggggctgccgccgtgatcccgggcctggccctgctctgggcagtggggctggggagtgccgcccccagcccccacgccttcggctctccttccaagagctccaggcctggcatggtctccagactttcagcctggagcgaacctgctgctaccaggccttgctggtggatgaggagcgtggacgcctgtttgtgggtgccgagaaccatgtggcctccctcaacctggacaacatcagcaagcgggccaagaagctggcctggccggcccctgtggaatggcgagaggagtgcaactgggcagggaaggacattggtactgagtgcatgaacttcgtgaagttgctgcatgcctacaaccgcacccatttgctggcctgtggcacgggagccttccacccaacctgtgcctttgtggaagtgggccaccgggcagaggagcccgtcctccggctggacccaggaaggatagaggatggcaaggggaagagtccttatgaccccaggcatcgggctgcctccgtgctggtgggggaggagctatactcaggggtggcagcagacctcatgggacgagactttaccatctttcgcagcctagggcaacgtccaagtctccgaacagagccacacgactcccgctggctcaatgagcccaagtttgtcaaggtattttggatcccggagagcgagaacccagacgacgacaaaatctacttcttctttcgtgagacggcggtagaggcggcgccggcactgggacgcctgtccgtgtcccgcgttggccagatctgccggaacgacgtgggcggccagcgcagcctggtcaacaagtggacgacgttcctgaaggcgcggctggtgtgctcggtgcccggcgtcgagggcgacacccacttcgatcagctccaggatgtgtttctgttgtcctcgcgggaccaccggaccccgctgctctatgccgtcttctccacgtccagcatcttccagggctctgcggtgtgcgtgtacagcatgaacgacgtgcgccgggccttcttgggaccctttgcacacaaggaggggcccatgcaccagtgggtgtcataccagggtcgcgtcccctacccgcggccaggcatgtgccccagcaagacctttggcaccttcagttccaccaaggacttcccagacgatgtcatccagtttgcgcggaaccaccccctcatgtacaactctgtcctgcccactggggggcgccctcttttcctacaagttggagccaattacaccttcactcaaattgccgcggaccgggttgcagccgctgacggacactatgacgtcctcttcattggcacagacgttggcacggtgctgaaggtgatctcggtccccaagggcagtaggcccagcgcagaggggctgctcctggaggagctgcacgtgtttgaggactcggccgctgtcaccagcatgcaaatttcttccaagaggcaccagctgtacgtagcctcgcggagcgcggtggcccagatcgcgttgcaccgctgcgctgcccacggccgcgtctgcaccgaatgctgtctggcgcgtgacccctactgcgcctgggacggggtcgcgtgcacgcgcttccagcccagtgccaagaggcggttccggcggcaagacgtaaggaatggcgaccccagcacgttgtgctccggagactcgtctcgtcccgcgctgctggaacacaaggtgttcggcgtggagggcagcagcgcctttctggagtgtgagccccgctcgctgcaggcgcgcgtggagtggactttccagcgcgcaggggtgacagcccacacccaggtgctggcagaggagcgcaccgagcgcaccgcccggggactactgctgcgcaggctgcggcgccgggactcgggcgtgtacttgtgcgccgccgtcgagcagggctttacgcaaccgctgcgtcgcctgtcgctgcacgtgttgagtgctacgcaggccgaacgactggcgcgggccgaggaggctgcgcccgccgcgccgccgggccccaaactctggtaccgggactttctgcagctggtggagccgggcggaggtggcagcgcgaactccctgcgcatgtgccgcccgcagcctgcgctgcagtcactgcccctggagtcgcggagaaagggccgtaaccggaggacccacgcccctgagcctcgcgctgagcgggggccgcgcagcgcaacgcactggtgaccagactgtccccacgccgggaaccaagcaggagacgacaggcgagagaggagccagacagaccctgaaaagaaggacgggttggggccgggcacattgggggtcaccggccgatggagacaccaaccgacaggccctggctgagggcagctgcgcgggcttatttattaacaggataacccttgaatgtagcagccccgggagggcggcacaggtcgggcgcaggattcagccggagggaagggacggggaagccgagctccagagcaacgaccagggccgaggaggtgcctggagtgcccaccctgggagacagaccccacctccttgggtagtgagcagtgagcagaaagctgtgaacaggctgggctgctggaggtggggcgaggcaggccgactgtactaaagtaacgcaataaacgcattatcagccaaagctggaatggccccagcagaaaacccc

SEQ ID NO: 3837 - protein, 635 aa, Homo sapiens; identical to SEQ ID NO: 3829

SEQ ID NO: 3838 - DNA, 3426 bp, Homo sapiens
tgtgagtgtgtatacaagagaggagattactgggaagggtgacgtggtgaggcgggcttgccagtgcagggtgaccctgagggtgtgcccagtggcgtgggtgtgtctgtgattgtggccaggcggggcaccctcggaggggagggttcggaagtggaatgcgaccccccagcctctttcccctaggggctgtaatctgatccctggggactccccccctagcctcccgccctcgccctcactgctgactcctcttccagatcctggggcagagtccagggcagctcaaggctcctccacacacacacccgctgaaccctgagcaccctgagctgctgagatggggcgggccggggctgccgccgtgatcccgggcctggccctgctctgggcagtggggctggggagtgccgcccccagcccccacgccttcggctctccttccaagagctccaggcctggcatggtctccagactttcagcctggagcgaacctgctgctaccaggccttgctggtggatgaggagcgtggacgcctgtttgtgggtgccgagaaccatgtggcctccctcaacctggacaacatcagcaagcgggccaagaagctggcctggccggcccctgtggaatggcgagaggagtgcaactgggcagggaaggacattggtactgagtgcatgaacttcgtgaagttgctgcatgcctacaaccgcacccatttgctggcctgtggcacgggagccttccacccaacctgtgcctttgtggaagtgggccaccgggcagaggagcccgtcctccggctggacccaggaaggatagaggatggcaaggggaagagtccttatgaccccaggcatcgggctgcctccgtgctggtgggggaggagctatactcaggggtggcagcagacctcatgggacgagactttaccatctttcgcagcctagggcaacgtccaagtctccgaacagagccacacgactcccgctggctcaatgagcccaagtttgtcaaggtattttggatcccggagagcgagaacccagacgacgacaaaatctacttcttctttcgtgagacggcggtagaggcggcgccggcactgggacgcctgtccgtgtcccgcgttggccagatctgccggaacgacgtgggcggccagcgcagcctggtcaacaagtggacgacgttcctgaaggcgcggctggtgtgctcggtgcccggcgtcgagggcgacacccacttcgatcagctccaggatgtgtttctgttgtcctcgcgggaccaccggaccccgctgctctatgccgtcttctccacgtccagcatcttccagggctctgcggtgtgcgtgtacagcatgaacgacgtgcgccgggccttcttgggaccctttgcacacaaggaggggcccatgcaccagtgggtgtcataccagggtcgcgtcccctacccgcggccaggcatgtgccccagcaagacctttggcaccttcagttccaccaaggacttcccagacgatgtcatccagtttgcgcggaaccaccccctcatgtacaactctgtcctgcccactggggggcgccctcttttcctacaagttggagccaattacaccttcactcaaattgccgcggaccgggttgcagccgctgacggacactatgacgtcctcttcattggcacagacgttggcacggtgctgaaggtgatctcggtccccaagggcagtaggcccagcgcagaggggctgctcctggaggagctgcacgtgtttgaggactcggccgctgtcaccagcatgcaaatttcttccaagaggcaccagctgtacgtagcctcgcggagcgcggtggcccagatcgcgttgcaccgctgcgctgcccacggccgcgtctgcaccgaatgctgtctggcgcgtgacccctactgcgcctgggacggggtcgcgtgcacgcgcttccagcccagtgccaagaggcggttccggcggcaagacgtaaggaatggcgaccccagcacgttgtgctccggagactcgtctcgtcccgcgctgctggaacacaaggtgttcggcgtggagggcagcagcgcctttctggagtgtgagccccgctcgctgcaggcgcgcgtggagtggactttccagcgcgcaggggtgacagcccacacccaggtgctggcagaggagcgcaccgagcgcaccgcccggggactactgctgcgcaggctgcggcgccgggactcgggcgtgtacttgtgcgccgccgtcgagcagggctttacgcaaccgctgcgtcgcctgtcgctgcacgtgttgagtgctacgcaggccgaacgactggcgcgggccgaggaggctgcgcccgccgcgccgccgggccccaaactctggtaccgggactttctgcagctggtggagccgggcggaggtggcagcgcgaactccctgcgcatgtgccgcccgcagcctgcgctgcagtcactgcccctggagtcgcggagaaagggccgtaaccggaggacccacgcccctgagcctcgcgctgagcgggggccgcgcagcgcaacgcactggtgaccagactgtccccacgccgggaaccaagcaggagacgacaggcgagagaggagccagacagaccctgaaaagaaggacgggttggggccgggcacattgggggtcaccggccgatggagacaccaaccgacaggccctggctgagggcagctgcgcgggcttatttattaacaggataacccttgaatgtagcagccccgggagggcggcacaggtcgggcgcaggattcagccggagggaagggacggggaagccgagctccagagcaacgaccagggccgaggaggtgcctggagtgcccaccctgggagacagaccccacctccttgggtagtgagcagtgagcagaaagctgtgaacaggctgggctgctggaggtggggcgaggcaggccgactgtactaaagtaacgcaataaacgcattatcagccaaagctggaatggccccagcagaaaaccccagtcctcggccttgctatgtggtcttgggcaccttactagcggtgtcagggcccgagtttctcctgtccaaggttgcctggtgaggattaaaggtggttccggccaggcgcggtggctcacgcctgtaatcccaacactttcggaggcccaggcggacggatcacgaggtcaggagatggaaaccatcccggctaacacggtgaaaccccgtctgtactaaaaatacaaaaaattagtcgggcgtggtggcgggcgcctgtaatcctagctactcaggaggctgaggcaggagaattgcttgaacctgggaggtggaggttgcaatgagcctagatctcgccgctgcactccagcctgggcgacagagcgagactcc

SEQ ID NO: 3839 - protein, 635 aa, Homo sapiens; identical to SEQ ID NO: 3829

SEQ ID NO: 3840 - DNA, 2709 bp, Homo sapiens
gctaaaacagaggcctgcctgttctggctgggatgagggcagggaggtcgaggtggctgaggtctgggggtggtgagtcagggtgggggctcgtgtaattcttctggggtgcctctgagtcatgggaggctttgcaggcctgtgcttccccagacacccaccctcgtgaggcctgggctggtcagcaagggcccccaggtccctgtagcccatgttagtacttgcctgggctgatgccgaagagagggaggggtgaggatgccactggtgagctgggacctcttaaggctacgtccctgggggaagcctcacacctccaaccctactagactgagtgcatgaacttcgtgaagttgctgcatgcctacaaccgcacccatttgctggcctgtggcacgggagccttccacccaacctgtgcctttgtggaagtgggccaccgggcagaggagcccgtcctccggctggacccaggaaggatagaggatggcaaggggaagagtccttatgaccccaggcatcgggctgcctccgtgctggtgggggaggagctatactcaggggtggcagcagacctcatgggacgagactttaccatctttcgcagcctagggcaacgtccaagtctccgaacagagccacacgactcccgctggctcaatgagcccaagtttgtcaaggtattttggatcccggagagcgagaacccagacgacgacaaaatctacttcttctttcgtgagacggcggtagaggcggcgccggcactgggacgcctgtccgtgtcccgcgttggccagatctgccggaacgacgtgggcggccagcgcagcctggtcaacaagtggacgacgttcctgaaggcgcggctggtgtgctcggtgcccggcgtcgagggcgacacccacttcgatcagctccaggatgtgtttctgttgtcctcgcgggaccaccggaccccgctgctctatgccgtcttctccacgtccagcatcttccagggctctgcggtgtgcgtgtacagcatgaacgacgtgcgccgggccttcttgggaccctttgcacacaaggaggggcccatgcaccagtgggtgtcataccagggtcgcgtcccctacccgcggccaggcatgtgccccagcaagacctttggcaccttcagttccaccaaggacttcccagacgatgtcatccagtttgcgcggaaccaccccctcatgtacaactctgtcctgcccactggggggcgccctcttttcctacaagttggagccaattacaccttcactcaaattgccgcggaccgggttgcagccgctgacggacactatgacgtcctcttcattggcacagacgttggcacggtgctgaaggtgatctcggtccccaagggcagtaggcccagcgcagaggggctgctcctggaggagctgcacgtgtttgaggactcggccgctgtcaccagcatgcaaatttcttccaagaggcaccagctgtacgtagcctcgcggagcgcggtggcccagatcgcgttgcaccgctgcgctgcccacggccgcgtctgcaccgaatgctgtctggcgcgtgacccctactgcgcctgggacggggtcgcgtgcacgcgcttccagcccagtgccaagaggcggttccggcggcaagacgtaaggaatggcgaccccagcacgttgtgctccggagactcgtctcgtcccgcgctgctggaacacaaggtgttcggcgtggagggcagcagcgcctttctggagtgtgagccccgctcgctgcaggcgcgcgtggagtggactttccagcgcgcaggggtgacagcccacacccaggtgctggcagaggagcgcaccgagcgcaccgcccggggactactgctgcgcaggctgcggcgccgggactcgggcgtgtacttgtgcgccgccgtcgagcagggctttacgcaaccgctgcgtcgcctgtcgctgcacgtgttgagtgctacgcaggccgaacgactggcgcgggccgaggaggctgcgcccgccgcgccgccgggccccaaactctggtaccgggactttctgcagctggtggagccgggcggaggtggcagcgcgaactccctgcgcatgtgccgcccgcagcctgcgctgcagtcactgcccctggagtcgcggagaaagggccgtaaccggaggacccacgcccctgagcctcgcgctgagcgggggccgcgcagcgcaacgcactggtgaccagactgtccccacgccgggaaccaagcaggagacgacaggcgagagaggagccagacagaccctgaaaagaaggacgggttggggccgggcacattgggggtcaccggccgatggagacaccaaccgacaggccctggctgagggcagctgcgcgggcttatttattaacaggataacccttgaatgtagcagccccgggagggcggcacaggtcgggcgcaggattcagccggagggaagggacggggaagccgagctccagagcaacgaccagggccgaggaggtgcctggagtgcccaccctgggagacagaccccacctccttgggtagtgagcagtgagcagaaagctgtgaacaggctgggctgctggaggtggggcgaggcaggccgactgtactaaagtaacgcaataaacgcattatcagccaaagctggaatggccccagcagaaaacccc

SEQ ID NO: 3841 - protein, 635 aa, Homo sapiens; identical to SEQ ID NO: 3829

SEQ ID NO: 3842 - DNA, 3760 bp, Homo sapiens
aataataaagagcaatgggacccagcagaaggatttgaagcaggagtggggagcatctggttatgctagagaggaagattcatgagtgaaggtgaaaccagattacctcatctccctcctaccccagcctaaggtgctgggcgacgtgtggggcgagatcggaggctagccgggcttcacgcctgcgcccccaggtagccacggtctctgctgccccctcgcggctgcttcttgcctcgcaggccctgatcctttggattcggtccgcgcagagcgccaactggacatggtgctagaggttgggtggtcagacactgtgatcccgggtgctgtgcccgcactacgggaaggggaagcagcgcgtgggtctcgcatcaggaggcaaggccaggacccgctgacccatgcctcctgccgcggtcagagcccaagtttgtcaaggtattttggatcccggagagcgagaacccagacgacgacaaaatctacttcttctttcgtgagacggcggtagaggcggcgccggcactgggacgcctgtccgtgtcccgcgttggccagatctgccgggtgaggagtccctgggccacacccggcgaccctgcccctacccctttgcctgccctggtctcgccctcatcccctttgatcgtcccggcagaacgacgtgggcggccagcgcagcctggtcaacaagtggacgacgttcctgaaggcgcggctggtgtgctcggtgcccggcgtcgagggcgacacccacttcgatcagctccgtgagtgcgggagtgggtatggggttggggaggggggcagcggcgcagactccgggagcccccgccgcagcggggctgtgcgccctaccccagctaggccccttccccgcagaggatgtgtttctgttgtcctcgcgggaccaccggaccccgctgctctatgccgtcttctccacgtccagcatcttccagggctctgcggtgtgcgtgtacagcatgaacgacgtgcgccgggccttcttgggaccctttgcacacaaggaggggcccatgcaccagtgggtgtcataccagggtcgcgtcccctacccgcggccaggcatggttcgtagcccagggacttctgctacaacccacttcaaagcctcaagggtttgagaacttggcctggggtcttcttggtgaatgtggtttcttcctttagttatgggtgggaaaacgtttccatcataagacaaggcttgtttcccgcctctgacttcctagggcaaggctgatctcctctctaattctcagggcagggttctgtccccatccccctccatgttcccagaggctgggcatggagggctgcctatcaagcccccatatctatatccctgctgtgcctccctttcccccacccccagtgccccagcaagacctttggcaccttcagttccaccaaggacttcccagacgatgtcatccagtttgcgcggaaccaccccctcatgtacaactctgtcctgcccactggggggcgccctcttttcctacaagttggagccaattacaccttcactcaaattgccgcggaccgggttgcagccgctgacggacactatgacgtcctcttcattggcacagacgttggcacggtgctgaaggtgatctcggtccccaagggcagtaggcccagcgcagaggggctgctcctggaggagctgcacgtgtttgaggtgaggcctcacccccagtcgcccgggacccccccaccccactaagccctgaccccgtcgcccctcctccctctcaggactcggccgctgtcaccagcatgcaaatttcttccaagagggtgagtgaccaggatgggggtcggggtgggatggactgagcttgtgcctggcgcgtcccaagcctctggccccttttggtagtttgcagtcccgggtttgagtacaggctctggctttgttagactgtgtgacctgaggcgtaagacctcagtgttcccatctgtcgagtggaagaagggatccctgaccgatgggaggcaggcgtggggtcgccctcggtcagcccagagcccctcgtgccccctagcaccagctgtacgtagcctcgcggagcgcggtggcccagatcgcgttgcaccgctgcgctgcccacggccgcgtctgcaccgaatgctgtctggcgcgtgacccctactgcgcctgggacggggtcgcgtgcacgcgcttccagcccagtgccaagaggcggttccggcggcaagacgtaaggaatggcgaccccagcacgttgtgctccggagactcgtctcgtcccgcgctgctggaacacaaggtgttcggcgtggagggcagcagcgcctttctggagtgtgagccccgctcgctgcaggcgcgcgtggagtggactttccagcgcgcaggggtgacagcccacacccaggtgagccttactccgccctccccgccaggctcctgtcccaccccctgcatccaggagaggccccgccctacccaacgaagccccgtccaaccagacccactccccgccctgtccagtttggtccctcacctgcactccacaagctgctgaggccccattgcgtccaacggggctcccgacccgcctcccctgaatcaaggagaagacccgccctcgaccctcccattaaggtccctgaccaccccccaccaagttcatgtaaaccccgcctctttcggattctcccttgaagaccaccagctcccaaacactcagccttaaaatgtgcgcctgcgggcacccctttcccgctccacctcggctcccaatgactctttgcttcttccgtcgcgtgctagggcccggaagccctgttcccggcccgacacccccgcctcacgctgccctctgcccgcaggtgctggcagaggagcgcaccgagcgcaccgcccggggactactgctgcgcaggctgcggcgccgggactcgggcgtgtacttgtgcgccgccgtcgagcagggctttacgcaaccgctgcgtcgcctgtcgctgcacgtgttgagtgctacgcaggccgaacgactggcgcgggccgaggaggctgcgcccgccgcgccgccgggccccaaactctggtaccgggactttctgcagctggtggagccgggcggaggtggcagcgcgaactccctgcgcatgtgccgcccgcagcctgcgctgcagtcactgcccctggagtcgcggagaaagggccgtaaccggaggacccacgcccctgagcctcgcgctgagcgggggccgcgcagcgcaacgcactggtgaccagactgtccccacgccgggaaccaagcaggagacgacaggcgagagaggagccagacagaccctgaaaagaaggacgggttggggccgggcacattgggggtcaccggccgatggagacaccaaccgacaggccctggctgagggcagctgcgcgggcttatttattaacaggataacccttgaatgtagcagccccgggagggcggcacaggtcgggcgcaggattcagccggagggaagggacggggaagccgagctccagagcaacgaccagggccgaggaggtgcctggagtgcccaccctgggagacagaccccacctccttgggtagtgagcagtgagcagaaagctgtgaacaggctgggctgctggaggtggggcgaggcaggccgactgtactaaagtaacgcaataaacgcattatcagccaaagctggaatggccccagcagaaaacccc

SEQ ID NO: 3843 - protein, 119 aa, Homo sapiens
MGLGRGAAAQTPGAPAAAGLCALPQLGPFPAEDVFLLSSRDHRTPLLYAVFSTSSIFQGSAVCVYSMNDVRRAFLGPFAHKEGPMHQWVSYQGRVPYPRPGMVRSPGTSATTHFKASRV

SEQ ID NO: 3844 - DNA, 4137 bp, Homo sapiens
aataataaagagcaatgggacccagcagaaggatttgaagcaggagtggggagcatctggttatgctagagaggaagattcatgagtgaaggtgaaaccagattacctcatctccctcctaccccagcctaaggtgctgggcgacgtgtggggcgagatcggaggctagccgggcttcacgcctgcgcccccaggtagccacggtctctgctgccccctcgcggctgcttcttgcctcgcaggccctgatcctttggattcggtccgcgcagagcgccaactggacatggtgctagaggttgggtggtcagacactgtgatcccgggtgctgtgcccgcactacgggaaggggaagcagcgcgtgggtctcgcatcaggaggcaaggccaggacccgctgacccatgcctcctgccgcggtcagagcccaagtttgtcaaggtattttggatcccggagagcgagaacccagacgacgacaaaatctacttcttctttcgtgagacggcggtagaggcggcgccggcactgggacgcctgtccgtgtcccgcgttggccagatctgccgggtgaggagtccctgggccacacccggcgaccctgcccctacccctttgcctgccctggtctcgccctcatcccctttgatcgtcccggcagaacgacgtgggcggccagcgcagcctggtcaacaagtggacgacgttcctgaaggcgcggctggtgtgctcggtgcccggcgtcgagggcgacacccacttcgatcagctccgtgagtgcgggagtgggtatggggttggggaggggggcagcggcgcagactccgggagcccccgccgcagcggggctgtgcgccctaccccagctaggccccttccccgcagaggatgtgtttctgttgtcctcgcgggaccaccggaccccgctgctctatgccgtcttctccacgtccagcatcttccagggctctgcggtgtgcgtgtacagcatgaacgacgtgcgccgggccttcttgggaccctttgcacacaaggaggggcccatgcaccagtgggtgtcataccagggtcgcgtcccctacccgcggccaggcatggttcgtagcccagggacttctgctacaacccacttcaaagcctcaagggtttgagaacttggcctggggtcttcttggtgaatgtggtttcttcctttagttatgggtgggaaaacgtttccatcataagacaaggcttgtttcccgcctctgacttcctagggcaaggctgatctcctctctaattctcagggcagggttctgtccccatccccctccatgttcccagaggctgggcatggagggctgcctatcaagcccccatatctatatccctgctgtgcctccctttcccccacccccagtgccccagcaagacctttggcaccttcagttccaccaaggacttcccagacgatgtcatccagtttgcgcggaaccaccccctcatgtacaactctgtcctgcccactggggggcgccctcttttcctacaagttggagccaattacaccttcactcaaattgccgcggaccgggttgcagccgctgacggacactatgacgtcctcttcattggcacagacgttggcacggtgctgaaggtgatctcggtccccaagggcagtaggcccagcgcagaggggctgctcctggaggagctgcacgtgtttgaggtgaggcctcacccccagtcgcccgggacccccccaccccactaagccctgaccccgtcgcccctcctccctctcaggactcggccgctgtcaccagcatgcaaatttcttccaagagggtgagtgaccaggatgggggtcggggtgggatggactgagcttgtgcctggcgcgtcccaagcctctggccccttttggtagtttgcagtcccgggtttgagtacaggctctggctttgttagactgtgtgacctgaggcgtaagacctcagtgttcccatctgtcgagtggaagaagggatccctgaccgatgggaggcaggcgtggggtcgccctcggtcagcccagagcccctcgtgccccctagcaccagctgtacgtagcctcgcggagcgcggtggcccagatcgcgttgcaccgctgcgctgcccacggccgcgtctgcaccgaatgctgtctggcgcgtgacccctactgcgcctgggacggggtcgcgtgcacgcgcttccagcccagtgccaagaggcggttccggcggcaagacgtaaggaatggcgaccccagcacgttgtgctccggagactcgtctcgtcccgcgctgctggaacacaaggtgttcggcgtggagggcagcagcgcctttctggagtgtgagccccgctcgctgcaggcgcgcgtggagtggactttccagcgcgcaggggtgacagcccacacccaggtgagccttactccgccctccccgccaggctcctgtcccaccccctgcatccaggagaggccccgccctacccaacgaagccccgtccaaccagacccactccccgccctgtccagtttggtccctcacctgcactccacaagctgctgaggccccattgcgtccaacggggctcccgacccgcctcccctgaatcaaggagaagacccgccctcgaccctcccattaaggtccctgaccaccccccaccaagttcatgtaaaccccgcctctttcggattctcccttgaagaccaccagctcccaaacactcagccttaaaatgtgcgcctgcgggcacccctttcccgctccacctcggctcccaatgactctttgcttcttccgtcgcgtgctagggcccggaagccctgttcccggcccgacacccccgcctcacgctgccctctgcccgcaggtgctggcagaggagcgcaccgagcgcaccgcccggggactactgctgcgcaggctgcggcgccgggactcgggcgtgtacttgtgcgccgccgtcgagcagggctttacgcaaccgctgcgtcgcctgtcgctgcacgtgttgagtgctacgcaggccgaacgactggcgcgggccgaggaggctgcgcccgccgcgccgccgggccccaaactctggtaccgggactttctgcagctggtggagccgggcggaggtggcagcgcgaactccctgcgcatgtgccgcccgcagcctgcgctgcagtcactgcccctggagtcgcggagaaagggccgtaaccggaggacccacgcccctgagcctcgcgctgagcgggggccgcgcagcgcaacgcactggtgaccagactgtccccacgccgggaaccaagcaggagacgacaggcgagagaggagccagacagaccctgaaaagaaggacgggttggggccgggcacattgggggtcaccggccgatggagacaccaaccgacaggccctggctgagggcagctgcgcgggcttatttattaacaggataacccttgaatgtagcagccccgggagggcggcacaggtcgggcgcaggattcagccggagggaagggacggggaagccgagctccagagcaacgaccagggccgaggaggtgcctggagtgcccaccctgggagacagaccccacctccttgggtagtgagcagtgagcagaaagctgtgaacaggctgggctgctggaggtggggcgaggcaggccgactgtactaaagtaacgcaataaacgcattatcagccaaagctggaatggccccagcagaaaaccccagtcctcggccttgctatgtggtcttgggcaccttactagcggtgtcagggcccgagtttctcctgtccaaggttgcctggtgaggattaaaggtggttccggccaggcgcggtggctcacgcctgtaatcccaacactttcggaggcccaggcggacggatcacgaggtcaggagatggaaaccatcccggctaacacggtgaaaccccgtctgtactaaaaatacaaaaaattagtcgggcgtggtggcgggcgcctgtaatcctagctactcaggaggctgaggcaggagaattgcttgaacctgggaggtggaggttgcaatgagcctagatctcgccgctgcactccagcctgggcgacagagcgagactcc

SEQ ID NO: 3845 - protein, 119 aa, Homo sapiens; identical to SEQ ID NO: 3843

SEQ ID NO: 3846 - DNA, 2464 bp, Homo sapiens
aaagagcaatgggacccagcagaaggatttgaagcaggagtggggagcatctggttatgctagagaggaagattcatgagtgaaggtgaaaccagattacctcatctccctcctaccccagcctaaggtgctgggcgacgtgtggggcgagatcggaggctagccgggcttcacgcctgcgcccccaggtagccacggtctctgctgccccctcgcggctgcttcttgcctcgcaggccctgatcctttggattcggtccgcgcagagcgccaactggacatggtgctagaggttgggtggtcagacactgtgatcccgggtgctgtgcccgcactacgggaaggggaagcagcgcgtgggtctcgcatcaggaggcaaggccaggacccgctgacccatgcctcctgccgcggtcagagcccaagtttgtcaaggtattttggatcccggagagcgagaacccagacgacgacaaaatctacttcttctttcgtgagacggcggtagaggcggcgccggcactgggacgcctgtccgtgtcccgcgttggccagatctgccggaacgacgtgggcggccagcgcagcctggtcaacaagtggacgacgttcctgaaggcgcggctggtgtgctcggtgcccggcgtcgagggcgacacccacttcgatcagctccaggatgtgtttctgttgtcctcgcgggaccaccggaccccgctgctctatgccgtcttctccacgtccagcatcttccagggctctgcggtgtgcgtgtacagcatgaacgacgtgcgccgggccttcttgggaccctttgcacacaaggaggggcccatgcaccagtgggtgtcataccagggtcgcgtcccctacccgcggccaggcatgtgccccagcaagacctttggcaccttcagttccaccaaggacttcccagacgatgtcatccagtttgcgcggaaccaccccctcatgtacaactctgtcctgcccactggggggcgccctcttttcctacaagttggagccaattacaccttcactcaaattgccgcggaccgggttgcagccgctgacggacactatgacgtcctcttcattggcacagacgttggcacggtgctgaaggtgatctcggtccccaagggcagtaggcccagcgcagaggggctgctcctggaggagctgcacgtgtttgaggactcggccgctgtcaccagcatgcaaatttcttccaagaggcaccagctgtacgtagcctcgcggagcgcggtggcccagatcgcgttgcaccgctgcgctgcccacggccgcgtctgcaccgaatgctgtctggcgcgtgacccctactgcgcctgggacggggtcgcgtgcacgcgcttccagcccagtgccaagaggcggttccggcggcaagacgtaaggaatggcgaccccagcacgttgtgctccggagactcgtctcgtcccgcgctgctggaacacaaggtgttcggcgtggagggcagcagcgcctttctggagtgtgagccccgctcgctgcaggcgcgcgtggagtggactttccagcgcgcaggggtgacagcccacacccaggtgctggcagaggagcgcaccgagcgcaccgcccggggactactgctgcgcaggctgcggcgccgggactcgggcgtgtacttgtgcgccgccgtcgagcagggctttacgcaaccgctgcgtcgcctgtcgctgcacgtgttgagtgctacgcaggccgaacgactggcgcgggccgaggaggctgcgcccgccgcgccgccgggccccaaactctggtaccgggactttctgcagctggtggagccgggcggaggtggcagcgcgaactccctgcgcatgtgccgcccgcagcctgcgctgcagtcactgcccctggagtcgcggagaaagggccgtaaccggaggacccacgcccctgagcctcgcgctgagcgggggccgcgcagcgcaacgcactggtgaccagactgtccccacgccgggaaccaagcaggagacgacaggcgagagaggagccagacagaccctgaaaagaaggacgggttggggccgggcacattgggggtcaccggccgatggagacaccaaccgacaggccctggctgagggcagctgcgcgggcttatttattaacaggataacccttgaatgtagcagccccgggagggcggcacaggtcgggcgcaggattcagccggagggaagggacggggaagccgagctccagagcaacgaccagggccgaggaggtgcctggagtgcccaccctgggagacagaccccacctccttgggtagtgagcagtgagcagaaagctgtgaacaggctgggctgctggaggtggggcgaggcaggccgactgtactaaagtaacgcaataaacgcattatcagccaaagctggaatggccccagcagaaaacccc

SEQ ID NO: 3847 - protein, 406 aa, Homo sapiens
MNDVRRAFLGPFAHKEGPMHQWVSYQGRVPYPRPGMCPSKTFGTFSSTKDFPDDVIQFARNHPLMYNSVLPTGGRPLFLQVGANYTFTQIAADRVAAADGHYDVLFIGTDVGTVLKVISVPKGSRPSAEGLLLEELHVFEDSAAVTSMQISSKRHQLYVASRSAVAQIALHRCAAHGRVCTECCLARDPYCAWDGVACTRFQPSAKRRFRRQDVRNGDPSTLCSGDSSRPALLEHKVFGVEGSSAFLECEPRSLQARVEWTFQRAGVTAHTQVLAEERTERTARGLLLRRLRRRDSGVYLCAAVEQGFTQPLRRLSLHVLSATQAERLARAEEAAPAAPPGPKLWYRDFLQLVEPGGGGSANSLRMCRPQPALQSLPLESRRKGRNRRTHAPEPRAERGPRSATHW

SEQ ID NO: 3848 - DNA, 2065 bp, Homo sapiens
gacatggtgctagaggttgggtggtcagacactgtgatcccgggtgctgtgcccgcactacgggaaggggaagcagcgcgtgggtctcgcatcaggaggcaaggccaggacccgctgacccatgcctcctgccgcggtcagagcccaagtttgtcaagaacgacgtgggcggccagcgcagcctggtcaacaagtggacgacgttcctgaaggcgcggctggtgtgctcggtgcccggcgtcgagggcgacacccacttcgatcagctcctgccccagcaagacctttggcaccttcagttccaccaaggacttcccagacgatgtcatccagtttgcgcggaaccaccccctcatgtacaactctgtcctgcccactggggggcgccctcttttcctacaagttggagccaattacaccttcactcaaattgccgcggaccgggttgcagccgctgacggacactatgacgtcctcttcattggcacagacgttggcacggtgctgaaggtgatctcggtccccaagggcagtaggcccagcgcagaggggctgctcctggaggagctgcacgtgtttgaggactcggccgctgtcaccagcatgcaaatttcttccaagagggcggttccggcggcaagacgtaaggaatggcgaccccagcacgttgtgctccggagactcgtctcgtcccgcgctgctggaacacaaggtgttcggcgtggagggcagcagcgcctttctggagtgtgagccccgctcgctgcaggcgcgcgtggagtggactttccagcgcgcaggggtgacagcccacacccaggtgctggcagaggagcgcaccgagcgcaccgcccggggactactgctgcgcaggctgcggcgccgggactcgggcgtgtacttgtgcgccgccgtcgagcagggctttacgcaaccgctgcgtcgcctgtcgctgcacgtgttgagtgctacgcaggccgaacgactggcgcgggccgaggaggctgcgcccgccgcgccgccgggccccaaactctggtaccgggactttctgcagctggtggagccgggcggaggtggcagcgcgaactccctgcgcatgtgccgcccgcagcctgcgctgcagtcactgcccctggagtcgcggagaaagggccgtaaccggaggacccacgcccctgagcctcgcgctgagcgggggccgcgcagcgcaacgcactggtgaccagactgtccccacgccgggaaccaagcaggagacgacaggcgagagaggagccagacagaccctgaaaagaaggacgggttggggccgggcacattgggggtcaccggccgatggagacaccaaccgacaggccctggctgagggcagctgcgcgggcttatttattaacaggataacccttgaatgtagcagccccgggagggcggcacaggtcgggcgcaggattcagccggagggaagggacggggaagccgagctccagagcaacgaccagggccgaggaggtgcctggagtgcccaccctgggagacagaccccacctccttgggtagtgagcagtgagcagaaagctgtgaacaggctgggctgctggaggtggggcgaggcaggccgactgtactaaagtaacgcaataaacgcattatcagccaaagctggaatggccccagcagaaaaccccagtcctcggccttgctatgtggtcttgggcaccttactagcggtgtcagggcccgagtttctcctgtccaaggttgcctggtgaggattaaaggtggttccggccaggcgcggtggctcacgcctgtaatcccaacactttcggaggcccaggcggacggatcacgaggtcaggagatggaaaccatcccggctaacacggtgaaaccccgtctgtactaaaaatacaaaaaattagtcgggcgtggtggcgggcgcctgtaatcctagctactcaggaggctgaggcaggagaattgcttgaacctgggaggtggaggttgcaatgagcctagatctcgccgctgcactccagcctgggcgacagagcgagactcc

SEQ ID NO: 3849 - protein, 132 aa, Homo sapiens
MYNSVLPTGGRPLFLQVGANYTFTQIAADRVAAADGHYDVLFIGTDVGTVLKVISVPKGSRPSAEGLLLEELHVFEDSAAVTSMQISSKRAVPAARRKEWRPQHVVLRRLVSSRAAGTQGVRRGGQQRLSGV

SEQ ID NO: 3850 - DNA, 732 bp, Homo sapiens
tgctgatggaagctctccctgttcagtcccatctccacatcctttcctgggctgtgtctccaccctgtggatgctgcccaacccacactcttccagtccacactcttcacaacccaaacatgctgagggtagacgcctcaaaggcgaggagacactagccccagctgtccgggagcaccaatggtcattaccccttctcatccctgcagacgttggcacggtgctgaaggtgatctcggtccccaagggcagtaggcccagcgcagaggggctgctcctggaggagctgcacgtgtttgaggactcggccgctgtcaccagcatgcaaatttcttccaagagggtgagtgaccaggatgggggtcggggtgggatggactgagcttgtgcctggcgcgtcccaagcctctggccccttttggtagtttgcagtcccgggtttgagtacaggctctggctttgttagactgtgtgacctgaggcgtaagacctcagtgttcccatctgtcgagtggaagaagggatccctgaccgatgggaggcaggcgtggggtcgccctcggtcagcccagagcccctcgtgccccctagcaccagctgtacgtagcctcgcggagcgcggtggcccagatcgcgttgcaccgctgcgctgcccacggccgcgtctgcaccgaatgctgtctggcgcgtgacccctactgcgcctgggacggggtcgcgtgcacgcgcttc

SEQ ID NO: 3851 - protein, 103 aa, Homo sapiens
MLPNPHSSSPHSSQPKHAEGRRLKGEETLAPAVREHQWSLPLLIPADVGTVLKVISVPKGSRPSAEGLLLEELHVFEDSAAVTSMQISSKRVSDQDGGRGGMD

SEQ ID NO: 3852 - DNA, 737 bp, Homo sapiens
acctttttttttttttttttttttttttttggactggggccattccagctttggctgataatgcgtttattgcgttactttagtacagtcggcctgcctcgccccacctccagcagcccagcctgttcacagctttctgctcactgctcactacccaaggaggtggggtctgtctcccagggtgggcactccaggcacctcctcggccctggtcgttgctctggagctcggcttccccgtcccttccctccggctgaatcctgcgcccgacctgtgccgccctcccggggctgctacattcaagggttatcctgttaataaataagcccgcgcagctgccctcagccagggcctgtcggttggtgtctccatcggccggtgacccccaatgtgcccggccccaacccgtccttcttttcagggtctgtctggctcctctctcgcctgtcgtctcctgcttggttcccggcgtggggacagtctggtcaccagtgcgttgcgctgcgcggcccccgctcagcgcgaggctcaggggcgtgggtcctccggttacggccctttctccgcgactccaggggcagtgactgcagcgcaggctgcgggcggcacatgcgcagggagttcgcgctgccacctccgcccggctccaccagctgcagaaagtcccggtaccagagtttggggcccggcggcgcggcgggcgcagcctcctcggcccgcgccagtcgttcggcctg

SEQ ID NO: 3853 - protein, 115 aa, Homo sapiens
MCPAPTRPSFQGLSGSSLACRLLLGSRRGDSLVTSALRCAAPAQREAQGRGSSGYGPFSATPGAVTAAQAAGGTCAGSSRCHLRPAPPAAESPGTRVWGPAARRAQPPRPAPVVR

SEQ ID NO: 3854 - DNA, 1486 bp, Homo sapiens
aggccaaggctgggaggcagccaggccttccctgggctcacaaaggagccactgctgcatttgtccagtcctgctactggatgccatcattggcccccgactgcccactgcttgccatgcctgaggagacccaagaagactccgtggcgccaatgatgcccagccagaggagcagggggccattggcccccaaccacgtgcatgaggtatgcctgcaccaggtggagtccatcagcgacctacatagtggagcaggcacactgcgcccctatctaactgaagaggcacgaccgtgggatgagctgctgggcgttttgccgccgtcactgtgtgcccaggctggctgcagccctgtgtacagacgaggagggttcctgctgctgctcgcgctgctggtgctcacttgcctagtgctcgcactcctggctgtctacctgagcgtgctgcagagtgaatccctgcgcatcctggcacacacgctccgcacgcaggaggagacactactcaaactccgcttggccagcctcagccagcttcggaggctcaactccagtgaggcccaagcacccagctgagatgccatttggatctggggcctgggggtgtgtgttggtgggggaataaagtggctatgggcaggtctctccttccctactgctggctgccacatctacactatttccttggtgagatttttgtacaagaacctgttgttaacttaatggctgcctccctctcctgatctcttcaagccaggcctagccaagcctctggtgccaaagcctcgctttgggtggcccaaggtcaggggaaggggcaccagcctcctggctcctcctgtggcctgtcaacactctctggccaccccagatggcaggttctgaagtctagaaatagctgcccccatagcaatcacccaaactctgccagggctcccagtgagggtccagcctcagctcttaaagacaggctgggctctgagtagggggagaggcaccacctggggaagactgccttggagggcaaaggtgacatcgtggaagaccagttgggcccaagcctgggatagtagatggggagggagaacagaaaaatacccaggggttaagaccacagaaggctgaccgttctgtttaattatctgtaataatccttaaaaatcagcacacaaatccattccaggtagctttgccaccccacctgctgtggtggcatttgtccagatgccaccacccccctaagagtgggtcatcctgggggagcaaggcctgagaaaggaaaggaagggaaaggccccctagtgcctgccccacagccctgaggaaggcacatatttagcctggcctgagacaggacaggaaggggccacagggctgagtgcagggacaaaggggtcagggtcccaagtgtccgggcccccagctacccaccccatgtctgtttttggttttgtcattaaaaaaaataaagtgacaaatactggtgg

SEQ ID NO: 3855 - protein, 164 aa, Homo sapiens; identical to SEQ ID NO: 371

SEQ ID NO: 3856 - DNA, 1639 bp, Homo sapiens
aggccaaggctgggaggcagccaggccttccctgggctcacaaaggagccactgctgcatttgtccagtcctgctactggatgccatcattggcccccgactgcccactgcttgccatgcctgaggagacccaagaagactccgtggcgccaatgatgcccagccagaggagcagggggccattggcccccaaccacgtgcatgaggtatgcctgcaccaggtggagtccatcagcgacctacatagtggagcaggcacactgcgcccctatctaactgaagaggcacgaccgtgggatgagctgctgggcgttttgccgccgtcactgtgtgcccaggctggctgcagccctgtgtacagacgaggagggttcctgctgctgctcgcgctgctggtgctcacttgcctagtgctcgcactcctggctgtctacctgagcgtgctgcagagtgaatccctgcgcatcctggcacacacgctccgcacgcaggaggagacactactcaaactccgcttggccagcctcagccagcttcggaggctcaactccagtgaggcccaagcacccagctgagatgccatttggatctggggcctgggggtgtgtgttggtgggggaataaagtggctatgggcaggtctctccttccctactgctggctgccacatctacactatttccttggtgagatttttgtacaagaacctgttgttaacttaatggctgcctccctctcctgatctcttcaagccaggcctagccaagcctctggtgccaaagcctcgctttgggtggcccaaggtcaggggaaggggcaccagcctcctggctcctcctgtggcctgtcaacactctctggccaccccagatggcaggttctgaagtctagaaatagctgcccccatagcaatcacccaaactctgccagggctcccagtgagggtccagcctcagctcttaaagacaggctgggctctgagtagggggagaggcaccacctggggaagactgccttggagggcaaaggtgacatcgtggaagaccagttgggcccaagcctgggatagtagatggggagggagaacagaaaaatacccaggggttaagaccacagaaggctgaccgttctgtttaattatctgtaataatccttaaaaatcagcacacaaatccattccaggtagctttgccaccccacctgctgtggtggcatttgtccagatgccaccacccccctaagagtgggtcatcctgggggagcaaggcctgagaaaggaaaggaagggaaaggccccctagtgcctgccccacagccctgaggaaggcacatatttagcctggcctgagacaggacaggaaggggccacagggctgagtgcagggacaaaggggtcagggtcccaagtgtccgggcccccagctacccaccccatgtctgtttttggttttgtcattaaaaaaaataaagtgacaaatactggtggagaccagttgttgcactgtcttctgttaaaaatacggaccaagggcatagaaagtctcctcttcagcaggtcctgcttcacaggatgtctgcccgcttgtcccgcacacggcttcgagccttggtccgggctttgaaggcagcagcattgtac

SEQ ID NO: 3857 - protein, 164 aa, Homo sapiens; identical to SEQ ID NO: 371

SEQ ID NO: 3858 - DNA, 2152 bp, Homo sapiens
gtcggctggtgggccccaggcgtggactaccattcccatggtgctctacgcgcagctagccgccgtcgcctgcgcgctcaggcctctgggattagtagttttagcctcgtggatgtgggcctgaatcggatggcctggaactcgccttcccggcgacctgtttggcagggcggggcgcctcgcgaagatggtggcgcgcgtggcgtgtggctcccgtcgtctggccaagtctcagcgcagcgcaccggccggcgtctcgttggcctggagcccacacccaccgggtccctgaccccgcgccccccgcgcccggttcccggcatgcctcgcgcccgtaagggcaacacgctccggaagggtggtcagcgccgtggaggaggtgcccggagcagtgcccaagctgactcgggttccagtgacgatgaggcagccagtgaggcccgcagcaccgccagtgaatgccccagccttctcagcaccactgcagaggacagccttgggggggatgtcgtggatgagcagggccagcaggaagaccttgaggaaaagctgaaggagtatgtggactgtctcacagacaagagtgccaagacccggcagggtgctcttgagagcctgcgcctggccctagcgtcccgcctactccccgacttcttgctggagcgccgcctcacgctagccgatgccctggaaaagtgcctcaagaaagggaagggcgaggaacaagccctggctgctgctgtgctaggcctgctctgcgtgcagctgggccctggacctaagggtgaggagctgtttcacagcctgcagcctctgctggtctctgtgctcagtgacagcacagctagccctgctgcccggctccactgtgcttctgcccttggcctgggctgctacgtggctgccgctgacatccaggacctggtctcttgccttgcctgcttagaaagtgttttcagccggttctatggcttggggggcagctccacaagtcctgtggttcctgccagcctgcacggcctgctctctgctgccctgcaggcctgggcattgctgctcaccatctgccctagcacccaaatcagccacatccttgacaggcagctgccccggctgccccagctcttgtccagtgaaagtgtgaacctgcggatcgctgccggtgaaaccattgcactgctctttgagcttgcccgggaccttgaggaggagtttgtttacgaggacatggaggccctctgcagtgtcctgcgcactctggccactgacagtaacaagtaccgtgccaaggctgatcgtcggcgccagcgctctactttccgcgccgtgctgcactccgtggagggcggtgaatgcgaagaagagatagtgcgcttcggctttgaggtgctctacatggacagctgggctcggcaccggatctacgctgccttcaaggaagtgctgggttcgggcatgcaccaccacctccagaacaatgagctactccgtgacatctttggcctgggccctgtgctgttgctggatgccactgccctgaaggcctgcaaggttccacgctttgagaagcacctgtacaatgctgctgccttcaaagcccggaccaaggctcgaagccgtgtgcgggacaagcgggcagacatcctgtgaagcaggacctgctgaagaggagactttctatgcccttggtccgtatttttaacagaagacagtgcaacaactggtctccaccagtatttgtcactttattttttttaatgacaaaaccaaaaacagacatggggtgggtagctgggggcccggacacttgggaccctgacccctttgtccctgcactcagccctgtggccccttcctgtcctgtctcaggccaggctaaatatgtgccttcctcagggctgtggggcaggcactagggggcctttcccttcctttcctttctcaggccttgctcccccaggatgacccactcttaggggggtggtggcatctggacaaatgccaccacagcaggtggggtggcaaagctacctggaatggatttgtgtgctgatttttaaggattattacagataattaaacagaacggtcagccttctgtggtcttaacccctgggtatttttctgttctccctccccatctactatccca

SEQ ID NO: 3859 - protein, 506 aa, Homo sapiens
MAWNSPSRRPVWQGGAPREDGGARGVWLPSSGQVSAQRTGRRLVGLEPTPTGSLTPRPPRPVPGMPRARKGNTLRKGGQRRGGGARSSAQADSGSSDDEAASEARSTASECPSLLSTTAEDSLGGDVVDEQGQQEDLEEKLKEYVDCLTDKSAKTRQGALESLRLALASRLLPDFLLERRLTLADALEKCLKKGKGEEQALAAAVLGLLCVQLGPGPKGEELFHSLQPLLVSVLSDSTASPAARLHCASALGLGCYVAAADIQDLVSCLACLESVFSRFYGLGGSSTSPVVPASLHGLLSAALQAWALLLTICPSTQISHILDRQLPRLPQLLSSESVNLRIAAGETIALLFELARDLEEEFVYEDMEALCSVLRTLATDSNKYRAKADRRRQRSTFRAVLHSVEGGECEEEIVRFGFEVLYMDSWARHRIYAAFKEVLGSGMHHHLQNNELLRDIFGLGPVLLLDATALKACKVPRFEKHLYNAAAFKARTKARSRVRDKRADIL

SEQ ID NO: 3860 - DNA, 1170 bp, Homo sapiens
aaggaggggtcaaaggggccaggcagagaagagagggtctctcagtgaaaggaggggtttgggcagtgccctgttcagagccagcagagctcaagcatctaccacacaccctccaatgctcccattgcaggaggagtttgtttacgaggacatggaggccctctgcagtgtcctgcgcactctggccactgacagtaacaagtaccgtgccaaggctgatcgtcggcgccagcgctctactttccgcgccgtgctgcactccgtggagggcggtgaatgcgaagaagagatagtgcgcttcggctttgaggtgctctacatggacagctgggctcggcaccggatctacgctgccttcaaggaagtgctgggttcgggcatgcaccaccacctccagaacaatgagctactccgtgacatctttggcctgggccctgtgctgttgctggatgccactgccctgaaggcctgcaaggttccacgctttgagaaggtttgcacccttgggcacctttctcttccccctattcccatttcctggaggcctggaattctgtagaggccggaagaggacccccagccctttcccttcccagctccccagggtgtcactctctgtccccactctagcacctgtacaatgctgctgccttcaaagcccggaccaaggctcgaagccgtgtgcgggacaagcgggcagacatcctgtgaagcaggacctgctgaagaggagactttctatgcccttggtccgtatttttaacagaagacagtgcaacaactggtctccaccagtatttgtcactttattttttttaatgacaaaaccaaaaacagacatggggtgggtagctgggggcccggacacttgggaccctgacccctttgtccctgcactcagccctgtggccccttcctgtcctgtctcaggccaggctaaatatgtgccttcctcagggctgtggggcaggcactagggggcctttcccttcctttcctttctcaggccttgctcccccaggatgacccactcttaggggggtggtggcatctggacaaatgccaccacagcaggtggggtggcaaagctacctggaatggatttgtgtgctgatttttaaggattattacagataattaaacagaacggtcagccttctgtggtcttaa

SEQ ID NO: 3861 - protein, 147 aa, Homo sapiens
MLPLQEEFVYEDMEALCSVLRTLATDSNKYRAKADRRRQRSTFRAVLHSVEGGECEEEIVRFGFEVLYMDSWARHRIYAAFKEVLGSGMHHHLQNNELLRDIFGLGPVLLLDATALKACKVPRFEKVCTLGHLSLPPIPISWRPGIL

SEQ ID NO: 3862 - DNA, 1407 bp, Homo sapiens
ggtgacaccacctgcccatcacaggctggatgcagggggtgccacacaaaacagaacagctttaggtcattatgcagaggaggtggccccaaaacagatttatctcctagatgtcatgatgggtgccctcagcagtggtgtcctggcctgacagaggccaaggaggggtcaaaggggccaggcagagaagagagggtctctcagtgaaaggaggggtttgggcagtgccctgttcagagccagcagagctcaagcatctaccacacaccctccaatgctcccattgcaggaggagtttgtttacgaggacatggaggccctctgcagtgtcctgcgcactctggccactgacagtaacaagtaccgtgccaaggctgatcgtcggcgccagcgctctactttccgcgccgtgctgcactccgtggagggcggtgaatgcgaagaagagatagtgcgcttcggctttgaggtgctctacatggacagctgggctcggcaccggatctacgctgccttcaaggaagtgctgggttcgggcatgcaccaccacctccaggtgcggggacggacagggaggggacatctggtgtggttgcttcagtctggcctgagctcactgccctctgccccccagaacaatgagctactccgtgacatctttggcctgggccctgtgctgttgctggatgccactgccctgaaggcctgcaaggttccacgctttgagaaggtttgcacccttgggcacctttctcttccccctattcccatttcctggaggcctggaattctgtagaggccggaagaggacccccagccctttcccttcccagctccccagggtgtcactctctgtccccactctagcacctgtacaatgctgctgccttcaaagcccggaccaaggctcgaagccgtgtgcgggacaagcgggcagacatcctgtgaagcaggacctgctgaagaggagactttctatgcccttggtccgtatttttaacagaagacagtgcaacaactggtctccaccagtatttgtcactttattttttttaatgacaaaaccaaaaacagacatggggtgggtagctgggggcccggacacttgggaccctgacccctttgtccctgcactcagccctgtggccccttcctgtcctgtctcaggccaggctaaatatgtgccttcctcagggctgtggggcaggcactagggggcctttcccttcctttcctttctcaggccttgctcccccaggatgacccactcttaggggggtggtggcatctggacaaatgccaccacagcaggtggggtggcaaagctacctggaatggatttgtgtgctgatttttaaggattattacagataattaaacagaacggtcagccttctgtggtcttaa

SEQ ID NO: 3863 - protein, 173 aa, Homo sapiens
MLPLQEEFVYEDMEALCSVLRTLATDSNKYRAKADRRRQRSTFRAVLHSVEGGECEEEIVRFGFEVLYMDSWARHRIYAAFKEVLGSGMHHHLQVRGRTGRGHLVWLLQSGLSSLPSAPQNNELLRDIFGLGPVLLLDATALKACKVPRFEKVCTLGHLSLPPIPISWRPGIL

SEQ ID NO: 3864 - DNA, 2286 bp, Homo sapiens
atgggccccaaaaaatcttggcgaagtcacttttttccactgcctgaggtttggctgttgctcctgttatcccaagctctaagcccttcccatggtccccagacccaggcaggggtaggtctcgtctggagtgtcccgctgccaagtgccctgagaagccagtcctgccttggtgctccactgagggacgcttcggagttaaccaccgtgcacttgttcccgacgcggggctggggcgcgcgcagggcattgtgggtgcatagttcagccagcgcgtcgtcggctgctagccgccgtcgcctgcgcgctcaggcctctgggattagtagttttagcctcgtggatggcggggcgcctcgcgaagatggtggcgcgcgtggcgtgtggctcccgtcgtctggccaagtctcagcgcagcgcaccggccggcgtctcgttggcctggagcccacacccaccgggtccctgaccccgcgccccccgcgcccggttcccggcatgcctcgcgcccgtaagggcaacacgctccggaagggtggtcagcgccgtggaggaggtgcccggagcagtgcccaagctgactcgggttccagtgacgatgaggcagccagtgaggcccgcagcaccgccagtgaatgccccagccttctcagcaccactgcagaggacagccttgggggggatgtcgtggatgagcagggccagcaggaagaccttgaggaaaagctgaaggagtatgtggactgtctcacagacaagagtgccaagacccggcagggtgctcttgagagcctgcgcctggccctagcgtcccgcctactccccgacttcttgctggagcgccgcctcacgctagccgatgccctggaaaagtgcctcaagaaagggaagggcgaggaacaagccctggctgctgctgtgctaggcctgctctgcgtgcagctgggccctggacctaagggtgaggagctgtttcacagcctgcagcctctgctggtctctgtgctcagtgacagcacagctagccctgctgcccggctccactgtgcttctgcccttggcctgggctgctacgtggctgccgctgacatccaggacctggtctcttgccttgcctgcttagaaagtgttttcagccggttctatggcttggggggcagctccacaagtcctgtggttcctgccagcctgcacggcctgctctctgctgccctgcaggcctgggcattgctgctcaccatctgccctagcacccaaatcagccacatccttgacaggcagctgccccggctgccccagctcttgtccagtgaaagtgtgaacctgcggatcgctgccggtgaaaccattgcactgctctttgagcttgcccgggaccttgaggaggagtttgtttacgaggacatggaggccctctgcagtgtcctgcgcactctggccactgacagtaacaagtaccgtgccaaggctgatcgtcggcgccagcgctctactttccgcgccgtgctgcactccgtggagggcggtgaatgcgaagaagagatagtgcgcttcggctttgaggtgctctacatggacagctgggctcggcaccggatctacgctgccttcaaggaagtgctgggttcgggcatgcaccaccacctccagaacaatgagctactccgtgacatctttggcctgggccctgtgctgttgctggatgccactgccctgaaggcctgcaaggttccacgctttgagaagcacctgtacaatgctgctgccttcaaagcccggaccaaggctcgaagccgtgtgcgggacaagcgggcagacatcctgtgaagcaggacctgctgaagaggagactttctatgcccttggtccgtatttttaacagaagacagtgcaacaactggtctccaccagtatttgtcactttattttttttaatgacaaaaccaaaaacagacatggggtgggtagctgggggcccggacacttgggaccctgacccctttgtccctgcactcagccctgtggccccttcctgtcctgtctcaggccaggctaaatatgtgccttcctcagggctgtggggcaggcactagggggcctttcccttcctttcctttctcaggccttgctcccccaggatgacccactcttaggggggtggtggcatctggacaaatgccaccacagcaggtggggtggcaaagctacctggaatggatttgtgtgctgatttttaaggattattacagataattaaacagaacggtcagccttctgtggtcttaa

SEQ ID NO: 3865 - protein, 608 aa, Homo sapiens
MGPKKSWRSHFFPLPEVWLLLLLSQALSPSHGPQTQAGVGLVWSVPLPSALRSQSCLGAPLRDASELTTVHLFPTRGWGARRALWVHSSASASSAASRRRLRAQASGISSFSLVDGGAPREDGGARGVWLPSSGQVSAQRTGRRLVGLEPTPTGSLTPRPPRPVPGMPRARKGNTLRKGGQRRGGGARSSAQADSGSSDDEAASEARSTASECPSLLSTTAEDSLGGDVVDEQGQQEDLEEKLKEYVDCLTDKSAKTRQGALESLRLALASRLLPDFLLERRLTLADALEKCLKKGKGEEQALAAAVLGLLCVQLGPGPKGEELFHSLQPLLVSVLSDSTASPAARLHCASALGLGCYVAAADIQDLVSCLACLESVFSRFYGLGGSSTSPVVPASLHGLLSAALQAWALLLTICPSTQISHILDRQLPRLPQLLSSESVNLRIAAGETIALLFELARDLEEEFVYEDMEALCSVLRTLATDSNKYRAKADRRRQRSTFRAVLHSVEGGECEEEIVRFGFEVLYMDSWARHRIYAAFKEVLGSGMHHHLQNNELLRDIFGLGPVLLLDATALKACKVPRFEKHLYNAAAFKARTKARSRVRDKRADIL

SEQ ID NO: 3866 - DNA, 695 bp, Homo sapiens
aagccctggctgctgctgtgctaggcctgctctgcgtgcagctgggccctggacctaagggtgaggagctgtttcacagcctgcagcctctgctggtctctgtgctcagtgacagcacagctagccctgctgcccggctccacgtgagtgtgcctgtgccccatgaaacccttcctgcaccttatccctcagcagagtggtgggttccccctatcttcagcctcctttactctgaggggagtgagctccagggctgggaacccaggttcacccgctgaccgtggcattgcattgcccttctcccaacagtgtgcttctgcccttggcctgggctgctacgtggctgccgctgacatccaggacctggtctcttgccttgcctgcttagaaagtgttttcagccggttctatggcttggggggcagctccacaagtcctgtggttcctgccagcctgcacggcctgctctctgctgccctgcaggcctgggcattgctgctcaccatctgccctagcacccaaatcagccacatccttgacaggcagctgccccggctgccccagctcttgtccagtgaaagtgtgaacctgcggatcgctgccggtgaaaccattgcactgctctttgagcttgcccgggaccttgaggtgcgagggacaaggatggggggtgcttggtgacaccacctgcccat

SEQ ID NO: 3867 - protein, 172 aa, Homo sapiens
MKPFLHLIPQQSGGFPLSSASFTLRGVSSRAGNPGSPADRGIALPFSQQCASALGLGCYVAAADIQDLVSCLACLESVFSRFYGLGGSSTSPVVPASLHGLLSAALQAWALLLTICPSTQISHILDRQLPRLPQLLSSESVNLRIAAGETIALLFELARDLEVRGTRMGGAW

SEQ ID NO: 3868 - DNA, 1541 bp, Homo sapiens
ctcgcgaagatggtggcgcgcgtggcgtgtggctcccgtcgtctggccaagtctcagcgcagcgcaccggccggcgtctcgttggcctggagcccacacccaccgggtccctgaccccgcgccccccgcgcccggttcccggcatgcctcgcgcccgtaagggcaacacgctccggaagggtggtcagcgccgtggaggaggtgcccggagcagtgcccaagctgactcgggttccagtgacgatgaggcagccagtgaggcccgcagcaccgccagtgaatgccccagccttctcagcaccactgcagaggacagccttggtgagagcgggtggaagtttgacaggggcttggtgagggctccatgggctgaggacaagaagcggtgctgaccaggtggccttgcagggggggatgtcgtggatgagcagggccagcaggaagaccttgaggaaaagctgaaggagtatgtggactgtctcacagacaagaggtacccctggctgccagccaactcctacacccagctccaagtgtgatcaagggagggctggcccatatgaccccccttctcgacctcccccagtgccaagacccggcagggtgctcttgagagcctgcgcctggccctagcgtcccgcctactccccgacttcttgctggagcgccgcctcacgctagccgatgccctggaaaagtgcctcaagaaaggttggacctgggggtgtgtgggagacttaaactgggcagacactggcccttgctgcatgggctgactggaaagcatcccacagggaagggcgaggaacaagccctggctgctgctgtgctaggcctgctctgcgtgcagctgggccctggacctaagggtgaggagctgtttcacagcctgcagcctctgctggtctctgtgctcagtgacagcacagctagccctgctgcccggctccacgtgagtgtgcctgtgccccatgaaacccttcctgcaccttatccctcagcagagtggtgggttccccctatcttcagcctcctttactctgaggggagtgagctccagggctgggaacccaggttcacccgctgaccgtggcattgcattgcccttctcccaacagtgtgcttctgcccttggcctgggctgctacgtggctgccgctgacatccaggtgaggggtctttgggcacaggtggtagagcatctagggctgtaactctgcctctgagctcccctgcctctctgtgctcctaggacctggtctcttgccttgcctgcttagaaagtgttttcagccggttctatggcttggggggcagctccacaagtcctgtggttcctgccagcctgcacggcctgctctctgctgccctgcaggcctgggcattgctgctcaccatctgccctagcacccaaatcagccacatccttgacaggtaggggtggctgtccactgggagggggaggggatctcaaagaggcccccaagccacacatatagctcagcctgccccttccctaggcagctgccccggctgcccca

SEQ ID NO: 3869 - protein, 82 aa, Homo sapiens
MPRARKGNTLRKGGQRRGGGARSSAQADSGSSDDEAASEARSTASECPSLLSTTAEDSLGESGWKFDRGLVRAPWAEDKKRC

SEQ ID NO: 3870 - DNA, 1010 bp, Homo sapiens
ctcgccttcccggcgacctgtttggcagggcggggcgcctcgcgaagatggtggcgcgcgtggcgtgtggctcccgtcgtctggccaagtctcagcgcagcgcaccggccggcgtctcgttggcctggagcccacacccaccgggtccctgaccccgcgccccccgcgcccggttcccggcatgcctcgcgcccgtaagggcaacacgctccggaagggtggtcagcgccgtggaggaggtgcccggagcagtgcccaagctgactcgggttccagtgacgatgaggcagccagtgaggcccgcagcaccgccagtgaatgccccagccttctcagcaccactgcagaggacagccttgggggggatgtcgtggatgagcagggccagcaggaagaccttgaggaaaagctgaaggagtatgtggactgtctcacagacaagagtgccaagacccggcagggtgctcttgagagcctgcgcctggccctagcgtcccgcctactccccgacttcttgctggagcgccgcctcacgctagccgatgccctggaaaagtgcctcaagaaagggaagggcgaggaacaagccctggctgctgctgtgctaggcctgctctgcgtgcagctgggccctggacctaagggtgaggagctgtttcacagcctgcagcctctgctggtctctgtgctcagtgacagcacagctagccctgctgcccggctccactgtgcttctgcccttggcctgggctgctacgtggctgccgctgacatccaggtgaggggtctttgggcacaggtggtagagcatctagggctgtaactctgcctctgagctcccctgcctctctgtgctcctaggacctggtctcttgccttgcctgcttagaaagtgttttcagccggttctatggcttggggggcagctccacaagtcctgtggttcctgccagcctgcacggcctgctctctgctgccctgcaggcctgggcattgctgctcaccatctg

SEQ ID NO: 3871 - protein, 213 aa, Homo sapiens
MPRARKGNTLRKGGQRRGGGARSSAQADSGSSDDEAASEARSTASECPSLLSTTAEDSLGGDVVDEQGQQEDLEEKLKEYVDCLTDKSAKTRQGALESLRLALASRLLPDFLLERRLTLADALEKCLKKGKGEEQALAAAVLGLLCVQLGPGPKGEELFHSLQPLLVSVLSDSTASPAARLHCASALGLGCYVAAADIQVRGLWAQVVEHLGL

SEQ ID NO: 3872 - DNA, 609 bp, Homo sapiens
tttggcagggcggggcgcctcgcgaagatggtggcgcgcgtggcgtgtggctcccgtcgtctggccaagtctcagcgcagcgcaccggccggcgtctcgttggcctggagcccacacccaccgggtccctgaccccgcgccccccgcgcccggttcccggcatgcctcgcgcccgtaagggcaacacgctccggaagggtggtcagcgccgtggaggaggtgcccggagcagtgcccaagctgactcgggttccagtgacgatgaggcagccagtgaggcccgcagcaccgccagtgaatgccccagccttctcagcaccactgcagaggacagccttgggggggatgtcgtggatgagcagggccagcaggaagaccttgaggaaaagctgaaggagtatgtggactgtctcacagacaagagtgccaagacccggcagggtgctcttgagagcctgcgcctggccctagcgtcccgcctactccccgacttcttgctggagcgccgcctcacgctagccgatgccctggaaaagtgcctcaagaaaggttggacctgggggtgtgtgggagacttaaactgggcagacactggcccttgctgcatgg

SEQ ID NO: 3873 - protein, 148 aa, Homo sapiens
MPRARKGNTLRKGGQRRGGGARSSAQADSGSSDDEAASEARSTASECPSLLSTTAEDSLGGDVVDEQGQQEDLEEKLKEYVDCLTDKSAKTRQGALESLRLALASRLLPDFLLERRLTLADALEKCLKKGWTWGCVGDLNWADTGPCC

SEQ ID NO: 3874 - DNA, 668 bp, Homo sapiens
agtagttttagcctcgtggatgtgggcctgaatcggatggcctggaactcgccttcccggcgacctgtttggcagggcggggcgcctcgcgaagatggtggcgcgcgtggcgtgtggctcccgtcgtctggccaagtctcagcgcagcgcaccggccggcgtctcgttggcctggagcccacacccaccgggtccctgaccccgcgccccccgcgcccggttcccggcatgcctcgcgcccgtaagggcaacacgctccggaagggtggtcagcgccgtggaggaggtgcccggagcagtgcccaagctgactcgggttccagtgacgatgaggcagccagtgaggcccgcagcaccgccagtgaatgccccagccttctcagcaccactgcagaggacagccttgggggggatgtcgtggatgagcagggccagcaggaagaccttgaggaaaagctgaaggagtatgtggactgtctcacagacaagaggtacccctggctgccagccaactcctacacccagctccaagtgtgatcaagggagggctggcccatatgaccccccttctcgacctcccccagtgccaagacccggcagggtgctcttgagagcctgcgcctggccctagcgtcccgcctactccccgacttcttgctggagcgccg

SEQ ID NO: 3875 - protein, 166 aa, Homo sapiens
MAWNSPSRRPVWQGGAPREDGGARGVWLPSSGQVSAQRTGRRLVGLEPTPTGSLTPRPPRPVPGMPRARKGNTLRKGGQRRGGGARSSAQADSGSSDDEAASEARSTASECPSLLSTTAEDSLGGDVVDEQGQQEDLEEKLKEYVDCLTDKRYPWLPANSYTQLQV

SEQ ID NO: 3876 - DNA, 1534 bp, Homo sapiens
ggtgtgcacctgccactcaatgctctgggcatcatagccaaccgtggccagcattttcacggtcagaacatgaccattttctacaagaaccaactcggcctctatccctactttggacccaggggcacagctcacaatgggggcatcccccaggctttgccccttgaccgccacctggcactggctgcctaccagatccaccacagcctgagacctggctttgctggcccagcagtgctggattgggaggagtggtgtccactctgggctgggaactggggccgccgccgagcttatcaggcagcctcttgggcttgggcacagcaggtattccctgacctggaccctcaggagcagctctacaaggcctatactggctttgagcaggcggcccgtgcactgatggaggatacgctgcgggtggcccaggcactacggccccatggactctggggcttctatcactacccagcctgtggcaatggctggcatagtatggcttccaactataccggccgctgccatgcagccacccttgcccgcaacactcaactgcattggctctgggccgcctccagtgccctcttccccagcatctacctcccacccaggctgccacctgcccaccaccaggcctttgtccgacatcgcctggaggaggccttccgtgtggcccttgttgggcaccgacatcccctgcctgtcctggcctatgtccgcctcacacaccggagatctgggaggttcctgtcccaggatgaccttgtgcagtccattggtgtgagtgcagcactaggggcagccggcgtggtgctctggggggacctgagcctctccagctctgaggaggagtgctggcatctccatgactacctggtggacaccttgggcccctatgtgatcaatgtgaccagggcagcgatggcctgcagtcaccagcggtgccatggccacgggcgctgtgcccggcgagatccaggacagatggaagcctttctacacctgtggccagacggcagccttggagattggaagtccttcagctgccactgttactggggctgggctggccccacctgccaggagcccaggcctgggcctaaagaagcagtataaagccagggcccctgccactgcctcttcttttccctgctgccacttttccagtcctggaactactctgtcccactcttgctctattcagtttacagtcaaccctcccaagcacacaccccgcttcccttggaatccctgaggggtagaaggggccagaaaaaacgcttataaaaccagaggccctctgagatcatgtgagtcctccatggcaaggaagcagttccagggagagtcaggttccagctagttagggctgccagcctagggctttgtgcctacacctcactaagcccatggagaggtcacagatgggccgtgcacgggcagatgggccccaaaaaatcttggcgaaggtcggtaaagtgctaagctgttgtctgcactctttcatcataaagtcacttttttccactgcctg

SEQ ID NO: 3877 - protein, 348 aa, Homo sapiens
MTIFYKNQLGLYPYFGPRGTAHNGGIPQALPLDRHLALAAYQIHHSLRPGFAGPAVLDWEEWCPLWAGNWGRRRAYQAASWAWAQQVFPDLDPQEQLYKAYTGFEQAARALMEDTLRVAQALRPHGLWGFYHYPACGNGWHSMASNYTGRCHAATLARNTQLHWLWAASSALFPSIYLPPRLPPAHHQAFVRHRLEEAFRVALVGHRHPLPVLAYVRLTHRRSGRFLSQDDLVQSIGVSAALGAAGVVLWGDLSLSSSEEECWHLHDYLVDTLGPYVINVTRAAMACSHQRCHGHGRCARRDPGQMEAFLHLWPDGSLGDWKSFSCHCYWGWAGPTCQEPRPGPKEAV

SEQ ID NO: 3878 - DNA, 2182 bp, Homo sapiens
aagcggcgacgcgcgggtgctgggaggccttagaacgccgtggcgtgccgcaggacgcgacggctgcagaacatccgccgcaccgctgggggccaacgttgtcggaccgaggagtccgaggtggcgactgagtgagatacccagctgtgcggagctaggacgcggaacatcccagaggccagcatcaacatgtcagtaccgcacccttcccatttgctgcctgtaggtccaccccgcgcgtgcggtccccaagtggccatgccaccctgcacgccctccccgcgtcagtcgttcgtttccagaccatgccgagccacacctgcccacagagtcgagctctcgaagtcctcattcccaaaagctccacagcctgtgacccactaggagggagggggaaaccgaggcccgggagagacggagaagccactctctgaggaccccggagccccgcccacagtgggtggggtcggcactgaaggggttaaggccgcggggaagccccgggctcagccctaggggcggatcctggggcttcctccctctagaccaaagggtgcggctgctgcagaggtggctgatgcaggtttccatccttggggaatgaccacgcaactgggcccagccctggtgctgggggtggccctgtgcctgggttgtggccagcccctaccacaggtccctgaacgccccttctctgtgctgtggaatgtaccctcagcacactgtgaggcccgctttggtgtgcacctgccactcaatgctctgggcatcatagccaaccgtggccagcattttcacggtcagaacatgaccattttctacaagaaccaactcggcctctatccctactttggacccaggggcacagctcacaatgggggcatcccccaggctttgccccttgaccgccacctggcactggctgcctaccagatccaccacagcctgagacctggctttgctggcccagcagtgctggattgggaggagtggtgtccactctgggctgggaactggggccgccgccgagcttatcaggcagcctcttgggcttgggcacagcaggtattccctgacctggaccctcaggagcagctctacaaggcctatactggctttgagcaggcggcccgtgcactgatggaggatacgctgcgggtggcccaggcactacggccccatggactctggggcttctatcactacccagcctgtggcaatggctggcatagtatggcttccaactataccggccgctgccatgcagccacccttgcccgcaacactcaactgcattggctctgggccgcctccagtgccctcttccccagcatctacctcccacccaggctgccacctgcccaccaccaggcctttgtccgacatcgcctggaggaggccttccgtgtggcccttgttgggcaccgacatcccctgcctgtcctggcctatgtccgcctcacacaccggagatctgggaggttcctgtcccaggaggagtgctggcatctccatgactacctggtggacaccttgggcccctatgtgatcaatgtgaccagggcagcgatggcctgcagtcaccagcggtgccatggccacgggcgctgtgcccggcgagatccaggacagatggaagcctttctacacctgtggccagacggcagccttggagattggaagtccttcagctgccactgttactggggctgggctggccccacctgccaggagcccaggcctgggcctaaagaagcagtataaagccagggcccctgccactgcctcttcttttccctgctgccacttttccagtcctggaactactctgtcccactcttgctctattcagtttacagtcaaccctcccaagcacacaccccgcttcccttggaatccctgaggggtagaaggggccagaaaaaacgcttataaaaccagaggccctctgagatcatgtgagtcctccatggcaaggaagcagttccagggagagtcaggttccagctagttagggctgccagcctagggctttgtgcctacacctcactaagcccatggagaggtcacagatgggccgtgcacgggcagatgggccccaaaaaatcttggcgaaggtcggtaaagtgctaagctgttgtctgcactctttcatcataaagtcacttttttccactgcctg

SEQ ID NO: 3879 - protein, 387 aa, Homo sapiens
MTTQLGPALVLGVALCLGCGQPLPQVPERPFSVLWNVPSAHCEARFGVHLPLNALGIIANRGQHFHGQNMTIFYKNQLGLYPYFGPRGTAHNGGIPQALPLDRHLALAAYQIHHSLRPGFAGPAVLDWEEWCPLWAGNWGRRRAYQAASWAWAQQVFPDLDPQEQLYKAYTGFEQAARALMEDTLRVAQALRPHGLWGFYHYPACGNGWHSMASNYTGRCHAATLARNTQLHWLWAASSALFPSIYLPPRLPPAHHQAFVRHRLEEAFRVALVGHRHPLPVLAYVRLTHRRSGRFLSQEECWHLHDYLVDTLGPYVINVTRAAMACSHQRCHGHGRCARRDPGQMEAFLHLWPDGSLGDWKSFSCHCYWGWAGPTCQEPRPGPKEAV

SEQ ID NO: 3880 - DNA, 1945 bp, Homo sapiens
agccagggtagagactgagtcggcgcctggcgggtgttgtgacgcgcaaaccaggggcgggttctaagcggcgacgcgcgggtgctgggaggccttagaacgccgtggcgtgccgcaggacgcgacggctgcagaacatccgccgcaccgctgggggccaacgttgtcggaccgaggagtccgaggtggcgactgagtgagatacccagctgtgcggagctaggacgcggaacatcccagaggccagcatcaacatgtttccatccttggggaatgaccacgcaactgggcccagccctggtgctgggggtggccctgtgcctgggttgtggccagcccctaccacaggtccctgaacgccccttctctgtgctgtggaatgtaccctcagcacactgtgaggcccgctttggtgtgcacctgccactcaatgctctgggcatcatagccaaccgtggccagcattttcacggtcagaacatgaccattttctacaagaaccaactcggcctctatccctactttggacccaggggcacagctcacaatgggggcatcccccaggctttgccccttgaccgccacctggcactggctgcctaccagatccaccacagcctgagacctggctttgctggcccagcagtgctggattgggaggagtggtgtccactctgggctgggaactggggccgccgccgagcttatcaggcagcctcttgggcttgggcacagcaggtattccctgacctggaccctcaggagcagctctacaaggcctatactggctttgagcaggcggcccgtgcactgatggaggatacgctgcgggtggcccaggcactacggccccatggactctggggcttctatcactacccagcctgtggcaatggctggcatagtatggcttccaactataccggccgctgccatgcagccacccttgcccgcaacactcaactgcattggctctgggccgcctccagtgccctcttccccagcatctacctcccacccaggctgccacctgcccaccaccaggcctttgtccgacatcgcctggaggaggccttccgtgtggcccttgttgggcaccgacatcccctgcctgtcctggcctatgtccgcctcacacaccggagatctgggaggttcctgtcccaggatgaccttgtgcagtccattggtgtgagtgcagcactaggggcagccggcgtggtgctctggggggacctgagcctctccagctctgaggaggagtgctggcatctccatgactacctggtggacaccttgggcccctatgtgatcaatgtgaccagggcagcgatggcctgcagtcaccagcggtgccatggccacgggcgctgtgcccggcgagatccaggacagatggaagcctttctacacctgtggccagacggcagccttggagattggaagtccttcagctgccactgttactggggctgggctggccccacctgccaggagcccaggcctgggcctaaagaagcagtataaagccagggcccctgccactgcctcttcttttccctgctgccacttttccagtcctggaactactctgtcccactcttgctctattcagtttacagtcaaccctcccaagcacacaccccgcttcccttggaatccctgaggggtagaaggggccagaaaaaacgcttataaaaccagaggccctctgagatcatgtgagtcctccatggcaaggaagcagttccagggagagtcaggttccagctagttagggctgccagcctagggctttgtgcctacacctcactaagcccatggagaggtcacagatgggccgtgcacgggcagatgggccccaaaaaatcttggcgaaggtcggtaaagtgctaagctgttgtctgcactctttcatcataaagtcacttttttccactgcctg

SEQ ID NO: 3881 - protein, 417 aa, Homo sapiens; identical to SEQ ID NO: 375

SEQ ID NO: 3882 - DNA, 1977 bp, Homo sapiens
cggcgacgcgcgggtgctgggaggccttagaacgccgtggcgtgccgcaggacgcgacggctgcagaacatccgccgcaccgctgggggccaacgttgtcggaccgaggagtccgaggtggcgactgagtgagatacccagctgtgcggagctaggacgcggaacatcccagaggccagcatcaacattggtggactaggaggactactggaagacagaaggccagcaagtagattgggtcggctgttttatagacctggtggttacagaccccctgtgaggggaggtcctgaggaggacaaatttgtagccagagcaggctggggccaggactcctaggttctgccccagccttaagcagctcatccatcactcccagcctccctccaatgtggggtagacacctggatctatctgccctgctctataggggatgggtctcttccaggtcacctgtgctatcaggtgagtgtgggacaaagtgcagcccaccactccccagttccagtatgcatggtcccccctgcactctgtcagcccttccctgctccaaccccaccctccctcctggcacagcccagcatggctgttatctacaggaggagagccactgtggtctgaagagatgctactgcctggagactggggtcttaacctccagcctggcactgagccacctgcaacctagcagcaggtgaccttggctcccagcctgactcagctgaacctggatcctgtgcataggcaagagctgactctgagccctggcccagccaagctgacccctacactagaccctacacaccggatggagctgatcctgagtaccagcccagctgagctgactctggatcctgcgtgccagccaaagctgcccctggattccacatgccaaccagagatgaccttcaatcctggtccaactgagcttaccctggatcctgaacaccagccagaggagaccccagctcctagcctggctgagttgaccctggagcctgtgcaccgccgacccgagctcctggatgcttgtgctgacctcatcaatgatcagtggccccgcagccgcacctcccgcctgcactccctgggccagtcctcagatgccttccccctctgcctgatgctgctaagcccccaccccacacttgaagcagcacccgttgtggtgggccatgcccgcctgtcacgggtgctgaaccagccccagagcctcttagtggagacagtggtggtggcccgggccctgaggggccgtggctttggccgccgcctcatggagggcctggaggtctttgctcgggcccggggcttccgcaagctgcatctcaccacccatgaccaggtgcacttctatacccacctgggctaccagctgggtgagcctgtgcagggcctggtcttcaccagcagacggctgcctgccaccctgcttaatgccttccccacagccccctctccccggccacccaggaaggccccaaacctgactgcccaagctgccccaaggggtcccaagggacctccattgccaccaccccctcccctacctgagtgcctgaccatctcacccccagttccatcagggcccccttcaaaaagcctgctggagacacaatatcaaaatgtgagggggcgccccatattctggatggaaaaagacatctgaggccatccagggcaaggaactgtctttctggttcaatagactgccccgacagtctacaagcctcagcccactgaccatacctcagcccctagcccctggggggcagctttaacctgggcatgtttcctgggtaccagtggggccaggaggtggctctggctcagagccgtcagtgtggctgaataaaggctctcttgggtatggctgtgacagtttatttgttgatccccctaccctcacctctcacctcttctgcaggtcccttatccctgcagaagtctccagatccaccttggccctgaggccat

SEQ ID NO: 3883 - protein, 286 aa, Homo sapiens
MELILSTSPAELTLDPACQPKLPLDSTCQPEMTFNPGPTELTLDPEHQPEETPAPSLAELTLEPVHRRPELLDACADLINDQWPRSRTSRLHSLGQSSDAFPLCLMLLSPHPTLEAAPVVVGHARLSRVLNQPQSLLVETVVVARALRGRGFGRRLMEGLEVFARARGFRKLHLTTHDQVHFYTHLGYQLGEPVQGLVFTSRRLPATLLNAFPTAPSPRPPRKAPNLTAQAAPRGPKGPPLPPPPPLPECLTISPPVPSGPPSKSLLETQYQNVRGRPIFWMEKDI

SEQ ID NO: 3884 - DNA, 1816 bp, Homo sapiens
aagcggcgacgcgcgggtgctgggaggccttagaacgccgtggcgtgccgcaggacgcgacggctgcagaacatccgccgcaccgctgggggccaacgttgtcggaccgaggagtccgaggtggcgactgagtgagatacccagctgtgcggagctaggacgcggaacatcccagaggccagcatcaacatgtcagtaccgcacccttcccatttgctgcctgtaggtccaccccgcgcgtgcggtccccaagtggccatgccaccctgcacgccctccccgcgtcagtcgttcgtttccagaccatgccgagccacacctgcccacagagtcgagctctcgaagtcctcattcccaaaagctccacagcctgtgacccactaggagggagggggaaaccgaggcccgggagagacggagaagccactctctgaggaccccggagccccgcccacagtgggtggggtcggcactgaaggggttaaggccgcggggaagccccgggctcagccctaggggcggatcctggggcttcctccctctagaccaaagggtgcggctgctgcagaggtggctgatgcaggcaagagctgactctgagccctggcccagccaagctgacccctacactagaccctacacaccggatggagctgatcctgagtaccagcccagctgagctgactctggatcctgcgtgccagccaaagctgcccctggattccacatgccaaccagagatgaccttcaatcctggtccaactgagcttaccctggatcctgaacaccagccagaggagaccccagctcctagcctggctgagttgaccctggagcctgtgcaccgccgacccgagctcctggatgcttgtgctgacctcatcaatgatcagtggccccgcagccgcacctcccgcctgcactccctgggccagtcctcagatgccttccccctctgcctgatgctgctaagcccccaccccacacttgaagcagcacccgttgtggtgggccatgcccgcctgtcacgggtgctgaaccagccccagagcctcttagtggagacagtggtggtggcccgggccctgaggggccgtggctttggccgccgcctcatggagggcctggaggtctttgctcgggcccggggcttccgcaagctgcatctcaccacccatgaccaggtgcacttctatacccacctgggctaccagctgggtgagcctgtgcagggcctggtcttcaccagcagacggctgcctgccaccctgcttaatgccttccccacagccccctctccccggccacccaggaaggccccaaacctgactgcccaagctgccccaaggggtcccaagggacctccattgccaccaccccctcccctacctgagtgcctgaccatctcacccccagttccatcagggcccccttcaaaaagcctgctggagacacaatatcaaaatgtgagggggcgccccatattctggatggaaaaagacatctgaggccatccagggcaaggaactgtctttctggttcaatagactgccccgacagtctacaagcctcagcccactgaccatacctcagcccctagcccctggggggcagctttaacctgggcatgtttcctgggtaccagtggggccaggaggtggctctggctcagagccgtcagtgtggctgaataaaggctctcttgggtatggctgtgacagtttatttgttgatccccctaccctcacctctcacctcttctgcaggtcccttatccctgcagaagtctccagatccaccttggccctgaggccat

SEQ ID NO: 3885 - protein, 33 aa, Homo sapiens
MQARADSEPWPSQADPYTRPYTPDGADPEYQPS

SEQ ID NO: 3886 - DNA, 1437 bp, Homo sapiens
aggggcgggttctaagcggcgacgcgcgggtgctgggaggccttagaacgccgtggcgtgccgcaggacgcgacggctgcagaacatccgccgcaccgctgggggccaacgttgtcggaccgaggagtccgaggtggcgactgagtgagatacccagctgtgcggagctaggacgcggaacatcccagaggccagcatcaacatgcaagagctgactctgagccctggcccagccaagctgacccctacactagaccctacacaccggatggagctgatcctgagtaccagcccagctgagctgactctggatcctgcgtgccagccaaagctgcccctggattccacatgccaaccagagatgaccttcaatcctggtccaactgagcttaccctggatcctgaacaccagccagaggagaccccagctcctagcctggctgagttgaccctggagcctgtgcaccgccgacccgagctcctggatgcttgtgctgacctcatcaatgatcagtggccccgcagccgcacctcccgcctgcactccctgggccagtcctcagatgccttccccctctgcctgatgctgctaagcccccaccccacacttgaagcagcacccgttgtggtgggccatgcccgcctgtcacgggtgctgaaccagccccagagcctcttagtggagacagtggtggtggcccgggccctgaggggccgtggctttggccgccgcctcatggagggcctggaggtctttgctcgggcccggggcttccgcaagctgcatctcaccacccatgaccaggtgcacttctatacccacctgggctaccagctgggtgagcctgtgcagggcctggtcttcaccagcagacggctgcctgccaccctgcttaatgccttccccacagccccctctccccggccacccaggaaggccccaaacctgactgcccaagctgccccaaggggtcccaagggacctccattgccaccaccccctcccctacctgagtgcctgaccatctcacccccagttccatcagggcccccttcaaaaagcctgctggagacacaatatcaaaatgtgagggggcgccccatattctggatggaaaaagacatctgaggccatccagggcaaggaactgtctttctggttcaatagactgccccgacagtctacaagcctcagcccactgaccatacctcagcccctagcccctggggggcagctttaacctgggcatgtttcctgggtaccagtggggccaggaggtggctctggctcagagccgtcagtgtggctgaataaaggctctcttgggtatggctgtgacagtttatttgttgatccccctaccctcacctctcacctcttctgcaggtcccttatccctgcagaagtctccagatccaccttggccctgaggccat

SEQ ID NO: 3887 - protein, 308 aa, Homo sapiens; identical to SEQ ID NO: 377

SEQ ID NO: 3888 - DNA, 1587 bp, Homo sapiens
aaaccaggggcgggttctaagcggcgacgcgcgggtgctgggaggccttagaacgccgtggcgtgccgcaggacgcgacggctgcagaacatccgccgcaccgctgggggccaacgttgtcggaccgaggagtccgaggtggcgactgagtgagatacccagctgtgcggagctaggacgcggaacatcccagaggccagcatcaacatgaggagagccactgtggtctgaagagatgctactgcctggagactggggtcttaacctccagcctggcactgagccacctgcaacctagcagcaggtgaccttggctcccagcctgactcagctgaacctggatcctgtgcataggcaagagctgactctgagccctggcccagccaagctgacccctacactagaccctacacaccggatggagctgatcctgagtaccagcccagctgagctgactctggatcctgcgtgccagccaaagctgcccctggattccacatgccaaccagagatgaccttcaatcctggtccaactgagcttaccctggatcctgaacaccagccagaggagaccccagctcctagcctggctgagttgaccctggagcctgtgcaccgccgacccgagctcctggatgcttgtgctgacctcatcaatgatcagtggccccgcagccgcacctcccgcctgcactccctgggccagtcctcagatgccttccccctctgcctgatgctgctaagcccccaccccacacttgaagcagcacccgttgtggtgggccatgcccgcctgtcacgggtgctgaaccagccccagagcctcttagtggagacagtggtggtggcccgggccctgaggggccgtggctttggccgccgcctcatggagggcctggaggtctttgctcgggcccggggcttccgcaagctgcatctcaccacccatgaccaggtgcacttctatacccacctgggctaccagctgggtgagcctgtgcagggcctggtcttcaccagcagacggctgcctgccaccctgcttaatgccttccccacagccccctctccccggccacccaggaaggccccaaacctgactgcccaagctgccccaaggggtcccaagggacctccattgccaccaccccctcccctacctgagtgcctgaccatctcacccccagttccatcagggcccccttcaaaaagcctgctggagacacaatatcaaaatgtgagggggcgccccatattctggatggaaaaagacatctgaggccatccagggcaaggaactgtctttctggttcaatagactgccccgacagtctacaagcctcagcccactgaccatacctcagcccctagcccctggggggcagctttaacctgggcatgtttcctgggtaccagtggggccaggaggtggctctggctcagagccgtcagtgtggctgaataaaggctctcttgggtatggctgtgacagtttatttgttgatccccctaccctcacctctcacctcttctgcaggtcccttatccctgcagaagtctccagatccaccttggccctgaggccat

SEQ ID NO: 3889 - protein, 286 aa, Homo sapiens; identical to SEQ ID NO: 3883

SEQ ID NO: 3890 - DNA, 2392 bp, Homo sapiens
gcaaaccaggggcgggttctaagcggcgacgcgcgggtgctgggaggccttagaacgccgtggcgtgccgcaggacgcgacggctgcagaacatccgccgcaccgctgggggccaacgttgtcggaccgaggagtccgaggtggcgactgagtgagatacccagctgtgcggagctaggacgcggaacatcccagaggccagcatcaacatgtcagtaccgcacccttcccatttgctgcctgtaggtccaccccgcgcgtgcggtccccaagtggccatgccaccctgcacgccctccccgcgtcagtcgttcgtttccagaccatgccgagccacacctgcccacagagtcgagctctcgaagtcctcattcccaaaagctccacagcctgtgacccactaggagggagggggaaaccgaggcccgggagagacggagaagccactctctgaggaccccggagccccgcccacagtgggtggggtcggcactgaaggggttaaggccgcggggaagccccgggctcagccctaggggcggatcctggggcttcctccctctagaccaaagggtgcggctgctgcagaggtggctgatgcagtggtggactaggaggactactggaagacagaaggccagcaagtagattgggtcggctgttttatagacctggtggttacagaccccctgtgaggggaggtcctgaggaggacaaatttgtagccagagcaggctggggccaggactcctaggttctgccccagccttaagcagctcatccatcactcccagcctccctccaatgtggggtagacacctggatctatctgccctgctctataggggatgggtctcttccaggtcacctgtgctatcaggtgagtgtgggacaaagtgcagcccaccactccccagttccagtatgcatggtcccccctgcactctgtcagcccttccctgctccaaccccaccctccctcctggcacagcccagcatggctgttatctacaggaggagagccactgtggtctgaagagatgctactgcctggagactggggtcttaacctccagcctggcactgagccacctgcaacctagcagcaggtgaccttggctcccagcctgactcagctgaacctggatcctgtgcataggcaagagctgactctgagccctggcccagccaagctgacccctacactagaccctacacaccggatggagctgatcctgagtaccagcccagctgagctgactctggatcctgcgtgccagccaaagctgcccctggattccacatgccaaccagagatgaccttcaatcctggtccaactgagcttaccctggatcctgaacaccagccagaggagaccccagctcctagcctggctgagttgaccctggagcctgtgcaccgccgacccgagctcctggatgcttgtgctgacctcatcaatgatcagtggccccgcagccgcacctcccgcctgcactccctgggccagtcctcagatgccttccccctctgcctgatgctgctaagcccccaccccacacttgaagcagcacccgttgtggtgggccatgcccgcctgtcacgggtgctgaaccagccccagagcctcttagtggagacagtggtggtggcccgggccctgaggggccgtggctttggccgccgcctcatggagggcctggaggtctttgctcgggcccggggcttccgcaagctgcatctcaccacccatgaccaggtgcacttctatacccacctgggctaccagctgggtgagcctgtgcagggcctggtcttcaccagcagacggctgcctgccaccctgcttaatgccttccccacagccccctctccccggccacccaggaaggccccaaacctgactgcccaagctgccccaaggggtcccaagggacctccattgccaccaccccctcccctacctgagtgcctgaccatctcacccccagttccatcagggcccccttcaaaaagcctgctggagacacaatatcaaaatgtgagggggcgccccatattctggatggaaaaagacatctgaggccatccagggcaaggaactgtctttctggttcaatagactgccccgacagtctacaagcctcagcccactgaccatacctcagcccctagcccctggggggcagctttaacctgggcatgtttcctgggtaccagtggggccaggaggtggctctggctcagagccgtcagtgtggctgaataaaggctctcttgggtatggctgtgacagtttatttgttgatccccctaccctcacctctcacctcttctgcaggtcccttatccctgcagaagtctccagatccaccttggccctgaggccat

SEQ ID NO: 3891 - protein, 286 aa, Homo sapiens; identical to SEQ ID NO: 3883

SEQ ID NO: 3892 - DNA, 2258 bp, Homo sapiens
gcaaaccaggggcgggttctaagcggcgacgcgcgggtgctgggaggccttagaacgccgtggcgtgccgcaggacgcgacggctgcagaacatccgccgcaccgctgggggccaacgttgtcggaccgaggagtccgaggtggcgactgagtgagatacccagctgtgcggagctaggacgcggaacatcccagaggccagcatcaacatgtcagtaccgcacccttcccatttgctgcctgtaggtccaccccgcgcgtgcggtccccaagtggccatgccaccctgcacgccctccccgcgtcagtcgttcgtttccagaccatgccgagccacacctgcccacagagtcgagctctcgaagtcctcattcccaaaagctccacagcctgtgacccactaggagggagggggaaaccgaggcccgggagagacggagaagccactctctgaggaccccggagccccgcccacagtgggtggggtcggcactgaaggggttaaggccgcggggaagccccgggctcagccctaggggcggatcctggggcttcctccctctagaccaaagggtgcggctgctgcagaggtggctgatgcagtggtggactaggaggactactggaagacagaaggccagcaagtagattgggtcggctgttttatagacctggtggttacagaccccctgtgaggggaggtcctgaggaggacaaatttgtagccagagcaggctggggccaggactcctaggttctgccccagccttaagcagctcatccatcactcccagcctccctccaatgtggggtagacacctggatctatctgccctgctctataggggatgggtctcttccaggtcacctgtgctatcaggaggagagccactgtggtctgaagagatgctactgcctggagactggggtcttaacctccagcctggcactgagccacctgcaacctagcagcaggtgaccttggctcccagcctgactcagctgaacctggatcctgtgcataggcaagagctgactctgagccctggcccagccaagctgacccctacactagaccctacacaccggatggagctgatcctgagtaccagcccagctgagctgactctggatcctgcgtgccagccaaagctgcccctggattccacatgccaaccagagatgaccttcaatcctggtccaactgagcttaccctggatcctgaacaccagccagaggagaccccagctcctagcctggctgagttgaccctggagcctgtgcaccgccgacccgagctcctggatgcttgtgctgacctcatcaatgatcagtggccccgcagccgcacctcccgcctgcactccctgggccagtcctcagatgccttccccctctgcctgatgctgctaagcccccaccccacacttgaagcagcacccgttgtggtgggccatgcccgcctgtcacgggtgctgaaccagccccagagcctcttagtggagacagtggtggtggcccgggccctgaggggccgtggctttggccgccgcctcatggagggcctggaggtctttgctcgggcccggggcttccgcaagctgcatctcaccacccatgaccaggtgcacttctatacccacctgggctaccagctgggtgagcctgtgcagggcctggtcttcaccagcagacggctgcctgccaccctgcttaatgccttccccacagccccctctccccggccacccaggaaggccccaaacctgactgcccaagctgccccaaggggtcccaagggacctccattgccaccaccccctcccctacctgagtgcctgaccatctcacccccagttccatcagggcccccttcaaaaagcctgctggagacacaatatcaaaatgtgagggggcgccccatattctggatggaaaaagacatctgaggccatccagggcaaggaactgtctttctggttcaatagactgccccgacagtctacaagcctcagcccactgaccatacctcagcccctagcccctggggggcagctttaacctgggcatgtttcctgggtaccagtggggccaggaggtggctctggctcagagccgtcagtgtggctgaataaaggctctcttgggtatggctgtgacagtttatttgttgatccccctaccctcacctctcacctcttctgcaggtcccttatccctgcagaagtctccagatccaccttggccctgaggccat

SEQ ID NO: 3893 - protein, 54 aa, Homo sapiens
MWGRHLDLSALLYRGWVSSRSPVLSGGEPLWSEEMLLPGDWGLNLQPGTEPPAT

SEQ ID NO: 3894 - DNA, 2017 bp, Homo sapiens
agagactgagtcggcgcctggcgggtgttgtgacgcgcaaaccaggggcgggttctaagcggcgacgcgcgggtgctgggaggccttagaacgccgtggcgtgccgcaggacgcgacggctgcagaacatccgccgcaccgctgggggccaacgttgtcggaccgaggagtccgaggtggcgactgagtgagatacccagctgtgcggagctaggacgcggaacatcccagaggccagcatcaacatgtcagtaccgcacccttcccatttgctgcctgtaggtccaccccgcgcgtgcggtccccaagtggccatgccaccctgcacgccctccccgcgtcagtcgttcgtttccagaccatgccgagccacacctgcccacagagtcgagctctcgaagtcctcattcccaaaagctccacagcctgtgacccactaggagggagggggaaaccgaggcccgggagagacggagaagccactctctgaggaccccggagccccgcccacagtgggtggggtcggcactgaaggggttaaggccgcggggaagccccgggctcagccctaggggcggatcctggggcttcctccctctagaccaaagggtgcggctgctgcagaggtggctgatgcaggaggagagccactgtggtctgaagagatgctactgcctggagactggggtcttaacctccagcctggcactgagccacctgcaacctagcagcaggtgaccttggctcccagcctgactcagctgaacctggatcctgtgcataggcaagagctgactctgagccctggcccagccaagctgacccctacactagaccctacacaccggatggagctgatcctgagtaccagcccagctgagctgactctggatcctgcgtgccagccaaagctgcccctggattccacatgccaaccagagatgaccttcaatcctggtccaactgagcttaccctggatcctgaacaccagccagaggagaccccagctcctagcctggctgagttgaccctggagcctgtgcaccgccgacccgagctcctggatgcttgtgctgacctcatcaatgatcagtggccccgcagccgcacctcccgcctgcactccctgggccagtcctcagatgccttccccctctgcctgatgctgctaagcccccaccccacacttgaagcagcacccgttgtggtgggccatgcccgcctgtcacgggtgctgaaccagccccagagcctcttagtggagacagtggtggtggcccgggccctgaggggccgtggctttggccgccgcctcatggagggcctggaggtctttgctcgggcccggggcttccgcaagctgcatctcaccacccatgaccaggtgcacttctatacccacctgggctaccagctgggtgagcctgtgcagggcctggtcttcaccagcagacggctgcctgccaccctgcttaatgccttccccacagccccctctccccggccacccaggaaggccccaaacctgactgcccaagctgccccaaggggtcccaagggacctccattgccaccaccccctcccctacctgagtgcctgaccatctcacccccagttccatcagggcccccttcaaaaagcctgctggagacacaatatcaaaatgtgagggggcgccccatattctggatggaaaaagacatctgaggccatccagggcaaggaactgtctttctggttcaatagactgccccgacagtctacaagcctcagcccactgaccatacctcagcccctagcccctggggggcagctttaacctgggcatgtttcctgggtaccagtggggccaggaggtggctctggctcagagccgtcagtgtggctgaataaaggctctcttgggtatggctgtgacagtttatttgttgatccccctaccctcacctctcacctcttctgcaggtcccttatccctgcagaagtctccagatccaccttggccctgaggccat

SEQ ID NO: 3895 - protein, 34 aa, Homo sapiens
MQEESHCGLKRCYCLETGVLTSSLALSHLQPSSR

SEQ ID NO: 3896 - DNA, 1869 bp, Homo sapiens
cggcgacgcgcgggtgctgggaggccttagaacgccgtggcgtgccgcaggacgcgacggctgcagaacatccgccgcaccgctgggggccaacgttgtcggaccgaggagtccgaggtggcgactgagtgagatacccagctgtgcggagctaggacgcggaacatcccagaggccagcatcaacattggtggactaggaggactactggaagacagaaggccagcaagtagattgggtcggctgttttatagacctggtggttacagaccccctgtgaggggaggtcctgaggaggacaaatttgtagccagagcaggctggggccaggactcctaggttctgccccagccttaagcagctcatccatcactcccagcctccctccaatgtggggtagacacctggatctatctgccctgctctataggggatgggtctcttccaggtcacctgtgctatcaggtgagtgtgggacaaagtgcagcccaccactccccagttccagtatgcatggtcccccctgcactctgtcagcccttccctgctccaaccccaccctccctcctggcacagcccagcatggctgttatctacaggaggagagccactgtggtctgaagagatgctactgcctggagactggggtcttaacctccagcctggcactgagccacctgcaacctagcagcaggtgaccttggctcccagcctgactcagctgaacctggatcctgtgcataggcaagagctgactctgagccctggcccagccaagctgacccctacactagaccctacacaccggatggagctgatcctgagtaccagcccagctgagctgactctggatcctgcgtgccagccaaagctgcccctggattccacatgccaaccagagatgaccttcaatcctggtccaactgagcttaccctggatcctgaacaccagccagaggagaccccagctcctagcctggctgagttgaccctggagcctgtgcaccgccgacccgagctcctggatgcttgtgctgacctcatcaatgatcagtggccccgcagccgcacctcccgcctgcactccctgggccagtcctcagatgccttccccctctgcctgatgctgctaagcccccaccccacacttgaagcagcacccgttgtggtgggccatgcccgcctgtcacgggtgctgaaccagccccagagcctcttagtggagacagtggtggtggcccgggccctgaggggccgtggctttggccgccgcctcatggagggcctggaggtctttgctcgggcccggggcttccgcaagctgcatctcaccacccatgaccaggtgcacttctatacccacctgggctaccagctgggtgagcctgtgcagggcctggtcttcaccagcagacggctgcctgccaccctgcttaatgccttccccacagccccctctccccggccacccaggaaggccccaaacctgactgcccaagctgccccaaggggtcccaagggacctccattgccaccaccccctcccctacctgagtgcctgaccatctcacccccagttccatcagggcccccttcaaaaagcctgctggagacacaatatcaaaatgtgagggggcgccccatattctggatggaaaaagacatctgaggccatccagggcaaggaactgtctttctggttcaatagactgccccgacagtctacaagcctcagcccactgaccatacctcagcccctagcccctggggggcagctttaacctgggcatgtttcctgggtaccagtggggccaggaggtggctctggctcagagccgtcagtgtggctgaataaaggctctcttgggt

SEQ ID NO: 3897 - protein, 286 aa, Homo sapiens; identical to SEQ ID NO: 3883

SEQ ID NO: 3898 - DNA, 1708 bp, Homo sapiens
aagcggcgacgcgcgggtgctgggaggccttagaacgccgtggcgtgccgcaggacgcgacggctgcagaacatccgccgcaccgctgggggccaacgttgtcggaccgaggagtccgaggtggcgactgagtgagatacccagctgtgcggagctaggacgcggaacatcccagaggccagcatcaacatgtcagtaccgcacccttcccatttgctgcctgtaggtccaccccgcgcgtgcggtccccaagtggccatgccaccctgcacgccctccccgcgtcagtcgttcgtttccagaccatgccgagccacacctgcccacagagtcgagctctcgaagtcctcattcccaaaagctccacagcctgtgacccactaggagggagggggaaaccgaggcccgggagagacggagaagccactctctgaggaccccggagccccgcccacagtgggtggggtcggcactgaaggggttaaggccgcggggaagccccgggctcagccctaggggcggatcctggggcttcctccctctagaccaaagggtgcggctgctgcagaggtggctgatgcaggcaagagctgactctgagccctggcccagccaagctgacccctacactagaccctacacaccggatggagctgatcctgagtaccagcccagctgagctgactctggatcctgcgtgccagccaaagctgcccctggattccacatgccaaccagagatgaccttcaatcctggtccaactgagcttaccctggatcctgaacaccagccagaggagaccccagctcctagcctggctgagttgaccctggagcctgtgcaccgccgacccgagctcctggatgcttgtgctgacctcatcaatgatcagtggccccgcagccgcacctcccgcctgcactccctgggccagtcctcagatgccttccccctctgcctgatgctgctaagcccccaccccacacttgaagcagcacccgttgtggtgggccatgcccgcctgtcacgggtgctgaaccagccccagagcctcttagtggagacagtggtggtggcccgggccctgaggggccgtggctttggccgccgcctcatggagggcctggaggtctttgctcgggcccggggcttccgcaagctgcatctcaccacccatgaccaggtgcacttctatacccacctgggctaccagctgggtgagcctgtgcagggcctggtcttcaccagcagacggctgcctgccaccctgcttaatgccttccccacagccccctctccccggccacccaggaaggccccaaacctgactgcccaagctgccccaaggggtcccaagggacctccattgccaccaccccctcccctacctgagtgcctgaccatctcacccccagttccatcagggcccccttcaaaaagcctgctggagacacaatatcaaaatgtgagggggcgccccatattctggatggaaaaagacatctgaggccatccagggcaaggaactgtctttctggttcaatagactgccccgacagtctacaagcctcagcccactgaccatacctcagcccctagcccctggggggcagctttaacctgggcatgtttcctgggtaccagtggggccaggaggtggctctggctcagagccgtcagtgtggctgaataaaggctctcttgggt

SEQ ID NO: 3899 - protein, 33 aa, Homo sapiens; identical to SEQ ID NO: 3885

SEQ ID NO: 3900 - DNA, 1329 bp, Homo sapiens
aggggcgggttctaagcggcgacgcgcgggtgctgggaggccttagaacgccgtggcgtgccgcaggacgcgacggctgcagaacatccgccgcaccgctgggggccaacgttgtcggaccgaggagtccgaggtggcgactgagtgagatacccagctgtgcggagctaggacgcggaacatcccagaggccagcatcaacatgcaagagctgactctgagccctggcccagccaagctgacccctacactagaccctacacaccggatggagctgatcctgagtaccagcccagctgagctgactctggatcctgcgtgccagccaaagctgcccctggattccacatgccaaccagagatgaccttcaatcctggtccaactgagcttaccctggatcctgaacaccagccagaggagaccccagctcctagcctggctgagttgaccctggagcctgtgcaccgccgacccgagctcctggatgcttgtgctgacctcatcaatgatcagtggccccgcagccgcacctcccgcctgcactccctgggccagtcctcagatgccttccccctctgcctgatgctgctaagcccccaccccacacttgaagcagcacccgttgtggtgggccatgcccgcctgtcacgggtgctgaaccagccccagagcctcttagtggagacagtggtggtggcccgggccctgaggggccgtggctttggccgccgcctcatggagggcctggaggtctttgctcgggcccggggcttccgcaagctgcatctcaccacccatgaccaggtgcacttctatacccacctgggctaccagctgggtgagcctgtgcagggcctggtcttcaccagcagacggctgcctgccaccctgcttaatgccttccccacagccccctctccccggccacccaggaaggccccaaacctgactgcccaagctgccccaaggggtcccaagggacctccattgccaccaccccctcccctacctgagtgcctgaccatctcacccccagttccatcagggcccccttcaaaaagcctgctggagacacaatatcaaaatgtgagggggcgccccatattctggatggaaaaagacatctgaggccatccagggcaaggaactgtctttctggttcaatagactgccccgacagtctacaagcctcagcccactgaccatacctcagcccctagcccctggggggcagctttaacctgggcatgtttcctgggtaccagtggggccaggaggtggctctggctcagagccgtcagtgtggctgaataaaggctctcttgggt

SEQ ID NO: 3901 - protein, 308 aa, Homo sapiens; identical to SEQ ID NO: 377

SEQ ID NO: 3902 - DNA, 1479 bp, Homo sapiens
aaaccaggggcgggttctaagcggcgacgcgcgggtgctgggaggccttagaacgccgtggcgtgccgcaggacgcgacggctgcagaacatccgccgcaccgctgggggccaacgttgtcggaccgaggagtccgaggtggcgactgagtgagatacccagctgtgcggagctaggacgcggaacatcccagaggccagcatcaacatgaggagagccactgtggtctgaagagatgctactgcctggagactggggtcttaacctccagcctggcactgagccacctgcaacctagcagcaggtgaccttggctcccagcctgactcagctgaacctggatcctgtgcataggcaagagctgactctgagccctggcccagccaagctgacccctacactagaccctacacaccggatggagctgatcctgagtaccagcccagctgagctgactctggatcctgcgtgccagccaaagctgcccctggattccacatgccaaccagagatgaccttcaatcctggtccaactgagcttaccctggatcctgaacaccagccagaggagaccccagctcctagcctggctgagttgaccctggagcctgtgcaccgccgacccgagctcctggatgcttgtgctgacctcatcaatgatcagtggccccgcagccgcacctcccgcctgcactccctgggccagtcctcagatgccttccccctctgcctgatgctgctaagcccccaccccacacttgaagcagcacccgttgtggtgggccatgcccgcctgtcacgggtgctgaaccagccccagagcctcttagtggagacagtggtggtggcccgggccctgaggggccgtggctttggccgccgcctcatggagggcctggaggtctttgctcgggcccggggcttccgcaagctgcatctcaccacccatgaccaggtgcacttctatacccacctgggctaccagctgggtgagcctgtgcagggcctggtcttcaccagcagacggctgcctgccaccctgcttaatgccttccccacagccccctctccccggccacccaggaaggccccaaacctgactgcccaagctgccccaaggggtcccaagggacctccattgccaccaccccctcccctacctgagtgcctgaccatctcacccccagttccatcagggcccccttcaaaaagcctgctggagacacaatatcaaaatgtgagggggcgccccatattctggatggaaaaagacatctgaggccatccagggcaaggaactgtctttctggttcaatagactgccccgacagtctacaagcctcagcccactgaccatacctcagcccctagcccctggggggcagctttaacctgggcatgtttcctgggtaccagtggggccaggaggtggctctggctcagagccgtcagtgtggctgaataaaggctctcttgggt

SEQ ID NO: 3903 - protein, 286 aa, Homo sapiens; identical to SEQ ID NO: 3883

SEQ ID NO: 3904 - DNA, 2150 bp, Homo sapiens
gcaaaccaggggcgggttctaagcggcgacgcgcgggtgctgggaggccttagaacgccgtggcgtgccgcaggacgcgacggctgcagaacatccgccgcaccgctgggggccaacgttgtcggaccgaggagtccgaggtggcgactgagtgagatacccagctgtgcggagctaggacgcggaacatcccagaggccagcatcaacatgtcagtaccgcacccttcccatttgctgcctgtaggtccaccccgcgcgtgcggtccccaagtggccatgccaccctgcacgccctccccgcgtcagtcgttcgtttccagaccatgccgagccacacctgcccacagagtcgagctctcgaagtcctcattcccaaaagctccacagcctgtgacccactaggagggagggggaaaccgaggcccgggagagacggagaagccactctctgaggaccccggagccccgcccacagtgggtggggtcggcactgaaggggttaaggccgcggggaagccccgggctcagccctaggggcggatcctggggcttcctccctctagaccaaagggtgcggctgctgcagaggtggctgatgcagtggtggactaggaggactactggaagacagaaggccagcaagtagattgggtcggctgttttatagacctggtggttacagaccccctgtgaggggaggtcctgaggaggacaaatttgtagccagagcaggctggggccaggactcctaggttctgccccagccttaagcagctcatccatcactcccagcctccctccaatgtggggtagacacctggatctatctgccctgctctataggggatgggtctcttccaggtcacctgtgctatcaggaggagagccactgtggtctgaagagatgctactgcctggagactggggtcttaacctccagcctggcactgagccacctgcaacctagcagcaggtgaccttggctcccagcctgactcagctgaacctggatcctgtgcataggcaagagctgactctgagccctggcccagccaagctgacccctacactagaccctacacaccggatggagctgatcctgagtaccagcccagctgagctgactctggatcctgcgtgccagccaaagctgcccctggattccacatgccaaccagagatgaccttcaatcctggtccaactgagcttaccctggatcctgaacaccagccagaggagaccccagctcctagcctggctgagttgaccctggagcctgtgcaccgccgacccgagctcctggatgcttgtgctgacctcatcaatgatcagtggccccgcagccgcacctcccgcctgcactccctgggccagtcctcagatgccttccccctctgcctgatgctgctaagcccccaccccacacttgaagcagcacccgttgtggtgggccatgcccgcctgtcacgggtgctgaaccagccccagagcctcttagtggagacagtggtggtggcccgggccctgaggggccgtggctttggccgccgcctcatggagggcctggaggtctttgctcgggcccggggcttccgcaagctgcatctcaccacccatgaccaggtgcacttctatacccacctgggctaccagctgggtgagcctgtgcagggcctggtcttcaccagcagacggctgcctgccaccctgcttaatgccttccccacagccccctctccccggccacccaggaaggccccaaacctgactgcccaagctgccccaaggggtcccaagggacctccattgccaccaccccctcccctacctgagtgcctgaccatctcacccccagttccatcagggcccccttcaaaaagcctgctggagacacaatatcaaaatgtgagggggcgccccatattctggatggaaaaagacatctgaggccatccagggcaaggaactgtctttctggttcaatagactgccccgacagtctacaagcctcagcccactgaccatacctcagcccctagcccctggggggcagctttaacctgggcatgtttcctgggtaccagtggggccaggaggtggctctggctcagagccgtcagtgtggctgaataaaggctctcttgggt

SEQ ID NO: 3905 - protein, 54 aa, Homo sapiens; identical to SEQ ID NO: 3893

SEQ ID NO: 3906 - DNA, 2284 bp, Homo sapiens
gcaaaccaggggcgggttctaagcggcgacgcgcgggtgctgggaggccttagaacgccgtggcgtgccgcaggacgcgacggctgcagaacatccgccgcaccgctgggggccaacgttgtcggaccgaggagtccgaggtggcgactgagtgagatacccagctgtgcggagctaggacgcggaacatcccagaggccagcatcaacatgtcagtaccgcacccttcccatttgctgcctgtaggtccaccccgcgcgtgcggtccccaagtggccatgccaccctgcacgccctccccgcgtcagtcgttcgtttccagaccatgccgagccacacctgcccacagagtcgagctctcgaagtcctcattcccaaaagctccacagcctgtgacccactaggagggagggggaaaccgaggcccgggagagacggagaagccactctctgaggaccccggagccccgcccacagtgggtggggtcggcactgaaggggttaaggccgcggggaagccccgggctcagccctaggggcggatcctggggcttcctccctctagaccaaagggtgcggctgctgcagaggtggctgatgcagtggtggactaggaggactactggaagacagaaggccagcaagtagattgggtcggctgttttatagacctggtggttacagaccccctgtgaggggaggtcctgaggaggacaaatttgtagccagagcaggctggggccaggactcctaggttctgccccagccttaagcagctcatccatcactcccagcctccctccaatgtggggtagacacctggatctatctgccctgctctataggggatgggtctcttccaggtcacctgtgctatcaggtgagtgtgggacaaagtgcagcccaccactccccagttccagtatgcatggtcccccctgcactctgtcagcccttccctgctccaaccccaccctccctcctggcacagcccagcatggctgttatctacaggaggagagccactgtggtctgaagagatgctactgcctggagactggggtcttaacctccagcctggcactgagccacctgcaacctagcagcaggtgaccttggctcccagcctgactcagctgaacctggatcctgtgcataggcaagagctgactctgagccctggcccagccaagctgacccctacactagaccctacacaccggatggagctgatcctgagtaccagcccagctgagctgactctggatcctgcgtgccagccaaagctgcccctggattccacatgccaaccagagatgaccttcaatcctggtccaactgagcttaccctggatcctgaacaccagccagaggagaccccagctcctagcctggctgagttgaccctggagcctgtgcaccgccgacccgagctcctggatgcttgtgctgacctcatcaatgatcagtggccccgcagccgcacctcccgcctgcactccctgggccagtcctcagatgccttccccctctgcctgatgctgctaagcccccaccccacacttgaagcagcacccgttgtggtgggccatgcccgcctgtcacgggtgctgaaccagccccagagcctcttagtggagacagtggtggtggcccgggccctgaggggccgtggctttggccgccgcctcatggagggcctggaggtctttgctcgggcccggggcttccgcaagctgcatctcaccacccatgaccaggtgcacttctatacccacctgggctaccagctgggtgagcctgtgcagggcctggtcttcaccagcagacggctgcctgccaccctgcttaatgccttccccacagccccctctccccggccacccaggaaggccccaaacctgactgcccaagctgccccaaggggtcccaagggacctccattgccaccaccccctcccctacctgagtgcctgaccatctcacccccagttccatcagggcccccttcaaaaagcctgctggagacacaatatcaaaatgtgagggggcgccccatattctggatggaaaaagacatctgaggccatccagggcaaggaactgtctttctggttcaatagactgccccgacagtctacaagcctcagcccactgaccatacctcagcccctagcccctggggggcagctttaacctgggcatgtttcctgggtaccagtggggccaggaggtggctctggctcagagccgtcagtgtggctgaataaaggctctcttgggt

SEQ ID NO: 3907 - protein, 286 aa, Homo sapiens; identical to SEQ ID NO: 3883

SEQ ID NO: 3908 - DNA, 1909 bp, Homo sapiens
agagactgagtcggcgcctggcgggtgttgtgacgcgcaaaccaggggcgggttctaagcggcgacgcgcgggtgctgggaggccttagaacgccgtggcgtgccgcaggacgcgacggctgcagaacatccgccgcaccgctgggggccaacgttgtcggaccgaggagtccgaggtggcgactgagtgagatacccagctgtgcggagctaggacgcggaacatcccagaggccagcatcaacatgtcagtaccgcacccttcccatttgctgcctgtaggtccaccccgcgcgtgcggtccccaagtggccatgccaccctgcacgccctccccgcgtcagtcgttcgtttccagaccatgccgagccacacctgcccacagagtcgagctctcgaagtcctcattcccaaaagctccacagcctgtgacccactaggagggagggggaaaccgaggcccgggagagacggagaagccactctctgaggaccccggagccccgcccacagtgggtggggtcggcactgaaggggttaaggccgcggggaagccccgggctcagccctaggggcggatcctggggcttcctccctctagaccaaagggtgcggctgctgcagaggtggctgatgcaggaggagagccactgtggtctgaagagatgctactgcctggagactggggtcttaacctccagcctggcactgagccacctgcaacctagcagcaggtgaccttggctcccagcctgactcagctgaacctggatcctgtgcataggcaagagctgactctgagccctggcccagccaagctgacccctacactagaccctacacaccggatggagctgatcctgagtaccagcccagctgagctgactctggatcctgcgtgccagccaaagctgcccctggattccacatgccaaccagagatgaccttcaatcctggtccaactgagcttaccctggatcctgaacaccagccagaggagaccccagctcctagcctggctgagttgaccctggagcctgtgcaccgccgacccgagctcctggatgcttgtgctgacctcatcaatgatcagtggccccgcagccgcacctcccgcctgcactccctgggccagtcctcagatgccttccccctctgcctgatgctgctaagcccccaccccacacttgaagcagcacccgttgtggtgggccatgcccgcctgtcacgggtgctgaaccagccccagagcctcttagtggagacagtggtggtggcccgggccctgaggggccgtggctttggccgccgcctcatggagggcctggaggtctttgctcgggcccggggcttccgcaagctgcatctcaccacccatgaccaggtgcacttctatacccacctgggctaccagctgggtgagcctgtgcagggcctggtcttcaccagcagacggctgcctgccaccctgcttaatgccttccccacagccccctctccccggccacccaggaaggccccaaacctgactgcccaagctgccccaaggggtcccaagggacctccattgccaccaccccctcccctacctgagtgcctgaccatctcacccccagttccatcagggcccccttcaaaaagcctgctggagacacaatatcaaaatgtgagggggcgccccatattctggatggaaaaagacatctgaggccatccagggcaaggaactgtctttctggttcaatagactgccccgacagtctacaagcctcagcccactgaccatacctcagcccctagcccctggggggcagctttaacctgggcatgtttcctgggtaccagtggggccaggaggtggctctggctcagagccgtcagtgtggctgaataaaggctctcttgggt

SEQ ID NO: 3909 - protein, 34 aa, Homo sapiens; identical to SEQ ID NO: 3895

SEQ ID NO: 3910 - DNA, 1677 bp, Homo sapiens
cttcctccaggagtctctggtgcagctggggtggaatctggccaggccctgcttaggcccccatcctggggtcaggaaatttggaggataaggcccttcagccccaaggacatcctggctgccatacctgctcctgacttctcagggctggcagtcatcgactgggaggcatggcgcccacgctgggccttcaactgggacaccaaggacatttaccggcagcgctcacgggcactggtacaggcacagcaccctgattggccagctcctcaggtggaggcagtagcccaggaccagttccagggagctgcacgggcctggatggcaggcaccctccagctggggcgggcactgcgtcctcgcggcctctggggcttctatggcttccctgactgctacaactatgactttctaagccccaactacaccggccagtgcccatcaggcatccgtgcccaaaatgaccagctagggtggctgtggggccagagccgtgccctctatcccagcatctacatgcccgcagtgctggagggcacagggaagtcacagatgtatgtgcaacaccgtgtggccgaggcattccgtgtggctgtggctgctggtgaccccaatctgccggtgctgccctatgtccagatcttctatgacacgacaaaccactttctgcccctggatgagctggagcacagcctgggggagagtgcggcccagggggcagctggagtggtgctctgggtgagctgggaaaatacaagaaccaaggaatcatgtcaggccatcaaggagtatatggacactacactggggcccttcatcctgaacgtgaccagtggggcccttctctgcagtcaagccctgtgctccggccatggccgctgtgtccgccgcaccagccaccccaaagccctcctcctccttaaccctgccagtttctccatccagctcacgcctggtggtgggcccctgagcctgcggggtgccctctcacttgaagatcaggcacagatggctgtggagttcaaatgtcgatgctaccctggctggcaggcaccgtggtgtgagcggaagagcatgtggtgattggccacacactgagttgcacatattgagaacctaatgcactctgggtctggccagggcttcctcaaatacatgcacagtcatacaagtcatggtcacagtaaagagtacactcagccactgtcacaggcatattccctgcacacacatgcatacttacagactggaatagtggcataaggagttagaaccacagcagacaccattcattccatgtccatatgcatctacttggcaaggtcatagacaattcctccagagacactgagccagtctttgaactgcagcaatcacaaaggctgacattcactgagtgcctactctttgccaatccccgtgctaagcgttttatgtggacttattcattcctcacaatgaggctatgaggaaactgagtcactcacattgagagtaagcacgttgcccaaggttgcacagcaagaaaagggagaagttgagattcaaacccaggctgtctagctccgggggtacagcccttgcactcctactgagtttgtggtaaccagccctgcacgacccctgaatctgctgagaggcaccagtccagcaaataaagcagtcatgatttactta

SEQ ID NO: 3911 - protein, 253 aa, Homo sapiens; identical to SEQ ID NO: 387

SEQ ID NO: 3912 - DNA, 1110 bp, Homo sapiens
cttcctccaggagtctctggtgcagctggggtggaatctggccaggccctgcttaggcccccatcctggggtcaggaaatttggaggataaggcccttcagccccaaggatgagctggagcacagcctgggggagagtgcggcccagggggcagctggagtggtgctctgggtgagctgggaaaatacaagaaccaaggaatcatgtcaggccatcaaggagtatatggacactacactggggcccttcatcctgaacgtgaccagtggggcccttctctgcagtcaagccctgtgctccggccatggccgctgtgtccgccgcaccagccaccccaaagccctcctcctccttaaccctgccagtttctccatccagctcacgcctggtggtgggcccctgagcctgcggggtgccctctcacttgaagatcaggcacagatggctgtggagttcaaatgtcgatgctaccctggctggcaggcaccgtggtgtgagcggaagagcatgtggtgattggccacacactgagttgcacatattgagaacctaatgcactctgggtctggccagggcttcctcaaatacatgcacagtcatacaagtcatggtcacagtaaagagtacactcagccactgtcacaggcatattccctgcacacacatgcatacttacagactggaatagtggcataaggagttagaaccacagcagacaccattcattccatgtccatatgcatctacttggcaaggtcatagacaattcctccagagacactgagccagtctttgaactgcagcaatcacaaaggctgacattcactgagtgcctactctttgccaatccccgtgctaagcgttttatgtggacttattcattcctcacaatgaggctatgaggaaactgagtcactcacattgagagtaagcacgttgcccaaggttgcacagcaagaaaagggagaagttgagattcaaacccaggctgtctagctccgggggtacagcccttgcactcctactgagtttgtggtaaccagccctgcacgacccctgaatctgctgagaggcaccagtccagcaaataaagcagtcatgatttactta

SEQ ID NO: 3913 - protein, 96 aa, Homo sapiens
MDTTLGPFILNVTSGALLCSQALCSGHGRCVRRTSHPKALLLLNPASFSIQLTPGGGPLSLRGALSLEDQAQMAVEFKCRCYPGWQAPWCERKSMW

SEQ ID NO: 3914 - DNA, 1259 bp, Homo sapiens
cttcctccaggagtctctggtgcagctggggtggaatctggccaggccctgcttaggcccccatcctggggtcaggaaatttggaggataaggcccttcagccccaagtgctggagggcacagggaagtcacagatgtatgtgcaacaccgtgtggccgaggcattccgtgtggctgtggctgctggtgaccccaatctgccggtgctgccctatgtccagatcttctatgacacgacaaaccactttctgcccctggatgagctggagcacagcctgggggagagtgcggcccagggggcagctggagtggtgctctgggtgagctgggaaaatacaagaaccaaggaatcatgtcaggccatcaaggagtatatggacactacactggggcccttcatcctgaacgtgaccagtggggcccttctctgcagtcaagccctgtgctccggccatggccgctgtgtccgccgcaccagccaccccaaagccctcctcctccttaaccctgccagtttctccatccagctcacgcctggtggtgggcccctgagcctgcggggtgccctctcacttgaagatcaggcacagatggctgtggagttcaaatgtcgatgctaccctggctggcaggcaccgtggtgtgagcggaagagcatgtggtgattggccacacactgagttgcacatattgagaacctaatgcactctgggtctggccagggcttcctcaaatacatgcacagtcatacaagtcatggtcacagtaaagagtacactcagccactgtcacaggcatattccctgcacacacatgcatacttacagactggaatagtggcataaggagttagaaccacagcagacaccattcattccatgtccatatgcatctacttggcaaggtcatagacaattcctccagagacactgagccagtctttgaactgcagcaatcacaaaggctgacattcactgagtgcctactctttgccaatccccgtgctaagcgttttatgtggacttattcattcctcacaatgaggctatgaggaaactgagtcactcacattgagagtaagcacgttgcccaaggttgcacagcaagaaaagggagaagttgagattcaaacccaggctgtctagctccgggggtacagcccttgcactcctactgagtttgtggtaaccagccctgcacgacccctgaatctgctgagaggcaccagtccagcaaataaagcagtcatgatttactta

SEQ ID NO: 3915 - protein, 176 aa, Homo sapiens; identical to SEQ ID NO: 389

SEQ ID NO: 3916 - DNA, 2228 bp, Homo sapiens
gcggctccttcctccaggagtctctggtgcagctggggtggaatctggccaggccctgcttaggcccccatcctggggtcaggaaatttggaggataaggcccttcagccccaaggttgtcctcgaccagtcccgtgccatggcagcccacctgcttcccatctgcgccctcttcctgaccttactcgatatggcccaaggctttaggggccccttgctacccaaccggcccttcaccaccgtctggaatgcaaacacccagtggtgcctggagaggcacggtgtggacgtggatgtcagtgtcttcgatgtggtagccaacccagggcagaccttccgcggccctgacatgacaattttctatagctcccagctgggcacctacccctactacacgcccactggggagcctgtgtttggtggtctgccccagaatgccagcctgattgcccacctggcccgcacattccaggacatcctggctgccatacctgctcctgacttctcagggctggcagtcatcgactgggaggcatggcgcccacgctgggccttcaactgggacaccaaggacatttaccggcagcgctcacgggcactggtacaggcacagcaccctgattggccagctcctcaggtggaggcagtagcccaggaccagttccagggagctgcacgggcctggatggcaggcaccctccagctggggcgggcactgcgtcctcgcggcctctggggcttctatggcttccctgactgctacaactatgactttctaagccccaactacaccggccagtgcccatcaggcatccgtgcccaaaatgaccagctagggtggctgtggggccagagccgtgccctctatcccagcatctacatgcccgcagtgctggagggcacagggaagtcacagatgtatgtgcaacaccgtgtggccgaggcattccgtgtggctgtggctgctggtgaccccaatctgccggtgctgccctatgtccagatcttctatgacacgacaaaccactttctgcccctggatgagctggagcacagcctgggggagagtgcggcccagggggcagctggagtggtgctctgggtgagctgggaaaatacaagaaccaaggtgagcttaggcctggcatgagggtgggggtgggggaggggtggggccattaagctgacggggtagaccctgacttaccctttctacctgcaaagtcctggctgaccagcaggtgagtgcctcagtgccctgggtgggtccatacatggccatggtgtccctgacgctatcctcccttcccacctaggaatcatgtcaggccatcaaggagtatatggacactacactggggcccttcatcctgaacgtgaccagtggggcccttctctgcagtcaagccctgtgctccggccatggccgctgtgtccgccgcaccagccaccccaaagccctcctcctccttaaccctgccagtttctccatccagctcacgcctggtggtgggcccctgagcctgcggggtgccctctcacttgaagatcaggcacagatggctgtggagttcaaatgtcgatgctaccctggctggcaggcaccgtggtgtgagcggaagagcatgtggtgattggccacacactgagttgcacatattgagaacctaatgcactctgggtctggccagggcttcctcaaatacatgcacagtcatacaagtcatggtcacagtaaagagtacactcagccactgtcacaggcatattccctgcacacacatgcatacttacagactggaatagtggcataaggagttagaaccacagcagacaccattcattccatgtccatatgcatctacttggcaaggtcatagacaattcctccagagacactgagccagtctttgaactgcagcaatcacaaaggctgacattcactgagtgcctactctttgccaatccccgtgctaagcgttttatgtggacttattcattcctcacaatgaggctatgaggaaactgagtcactcacattgagagtaagcacgttgcccaaggttgcacagcaagaaaagggagaagttgagattcaaacccaggctgtctagctccgggggtacagcccttgcactcctactgagtttgtggtaaccagccctgcacgacccctgaatctgctgagaggcaccagtccagcaaataaagcagtcatgatttactta

SEQ ID NO: 3917 - protein, 336 aa, Homo sapiens
MAAHLLPICALFLTLLDMAQGFRGPLLPNRPFTTVWNANTQWCLERHGVDVDVSVFDVVANPGQTFRGPDMTIFYSSQLGTYPYYTPTGEPVFGGLPQNASLIAHLARTFQDILAAIPAPDFSGLAVIDWEAWRPRWAFNWDTKDIYRQRSRALVQAQHPDWPAPQVEAVAQDQFQGAARAWMAGTLQLGRALRPRGLWGFYGFPDCYNYDFLSPNYTGQCPSGIRAQNDQLGWLWGQSRALYPSIYMPAVLEGTGKSQMYVQHRVAEAFRVAVAAGDPNLPVLPYVQIFYDTTNHFLPLDELEHSLGESAAQGAAGVVLWVSWENTRTKVSLGLA

SEQ ID NO: 3918 - DNA, 2041 bp, Homo sapiens
gcggctccttcctccaggagtctctggtgcagctggggtggaatctggccaggccctgcttaggcccccatcctggggtcaggaaatttggaggataaggcccttcagccccaaggttgtcctcgaccagtcccgtgccatggcagcccacctgcttcccatctgcgccctcttcctgaccttactcgatatggcccaaggctttaggggccccttgctacccaaccggcccttcaccaccgtctggaatgcaaacacccagtggtgcctggagaggcacggtgtggacgtggatgtcagtgtcttcgatgtggtagccaacccagggcagaccttccgcggccctgacatgacaattttctatagctcccagctgggcacctacccctactacacgcccactggggagcctgtgtttggtggtctgccccagaatgccagcctgattgcccacctggcccgcacattccaggacatcctggctgccatacctgctcctgacttctcagggctggcagtcatcgactgggaggcatggcgcccacgctgggccttcaactgggacaccaaggacatttaccggcagcgctcacgggcactggtacaggcacagcaccctgattggccagctcctcaggtggaggcagtagcccaggaccagttccagggagctgcacgggcctggatggcaggcaccctccagctggggcgggcactgcgtcctcgcggcctctggggcttctatggcttccctgactgctacaactatgactttctaagccccaactacaccggccagtgcccatcaggcatccgtgcccaaaatgaccagctagggtggctgtggggccagagccgtgccctctatcccagcatctacatgcccgcagtgctggagggcacagggaagtcacagatgtatgtgcaacaccgtgtggccgaggcattccgtgtggctgtggctgctggtgaccccaatctgccggtgctgccctatgtccagatcttctatgacacgacaaaccactttctgcccctggatgagctggagcacagcctgggggagagtgcggcccagggggcagctggagtggtgctctgggtgagctgggaaaatacaagaaccaaggaatcatgtcaggccatcaaggagtatatggacactacactggggcccttcatcctgaacgtgaccagtggggcccttctctgcagtcaagccctgtgctccggccatggccgctgtgtccgccgcaccagccaccccaaagccctcctcctccttaaccctgccagtttctccatccagctcacgcctggtggtgggcccctgagcctgcggggtgccctctcacttgaagatcaggcacagatggctgtggagttcaaatgtcgatgctaccctggctggcaggcaccgtggtgtgagcggaagagcatgtggtgattggccacacactgagttgcacatattgagaacctaatgcactctgggtctggccagggcttcctcaaatacatgcacagtcatacaagtcatggtcacagtaaagagtacactcagccactgtcacaggcatattccctgcacacacatgcatacttacagactggaatagtggcataaggagttagaaccacagcagacaccattcattccatgtccatatgcatctacttggcaaggtcatagacaattcctccagagacactgagccagtctttgaactgcagcaatcacaaaggctgacattcactgagtgcctactctttgccaatccccgtgctaagcgttttatgtggacttattcattcctcacaatgaggctatgaggaaactgagtcactcacattgagagtaagcacgttgcccaaggttgcacagcaagaaaagggagaagttgagattcaaacccaggctgtctagctccgggggtacagcccttgcactcctactgagtttgtggtaaccagccctgcacgacccctgaatctgctgagaggcaccagtccagcaaataaagcagtcatgatttactta

SEQ ID NO: 3919 - protein, 435 aa, Homo sapiens; identical to SEQ ID NO: 379

SEQ ID NO: 3920 - DNA, 1951 bp, Homo sapiens
gcggctccttcctccaggagtctctggtgcagctggggtggaatctggccaggccctgcttaggcccccatcctggggtcaggaaatttggaggataaggcccttcagccccaaggttgtcctcgaccagtcccgtgccatggcagcccacctgcttcccatctgcgccctcttcctgaccttactcgatatggcccaaggctttaggggccccttgctacccaaccggcccttcaccaccgtctggaatgcaaacacccagtggtgcctggagaggcacggtgtggacgtggatgtcagtgtcttcgatgtggtagccaacccagggcagaccttccgcggccctgacatgacaattttctatagctcccagctgggcacctacccctactacacgcccactggggagcctgtgtttggtggtctgccccagaatgccagcctgattgcccacctggcccgcacattccaggacatcctggctgccatacctgctcctgacttctcagggctggcagtcatcgactgggaggcatggcgcccacgctgggccttcaactgggacaccaaggacatttaccggcagcgctcacgggcactggtacaggcacagcaccctgattggccagctcctcaggtggaggcagtagcccaggaccagttccagggagctgcacgggcctggatggcaggcaccctccagctggggcgggcactgcgtcctcgcggcctctggggcttctatggcttccctgactgctacaactatgactttctaagccccaactacaccggccagtgcccatcaggcatccgtgcccaaaatgaccagctagggtggctgtggggccagagccgtgccctctatcccagcatctacatgcccgcagtgctggagggcacagggaagtcacagatgtatgtgcaacaccgtgtggccgaggcattccgtgtggctgtggctgctggtgaccccaatctgccggtgctgccctatgtccagatcttctatgacacgacaaaccactttctgcccctggaatcatgtcaggccatcaaggagtatatggacactacactggggcccttcatcctgaacgtgaccagtggggcccttctctgcagtcaagccctgtgctccggccatggccgctgtgtccgccgcaccagccaccccaaagccctcctcctccttaaccctgccagtttctccatccagctcacgcctggtggtgggcccctgagcctgcggggtgccctctcacttgaagatcaggcacagatggctgtggagttcaaatgtcgatgctaccctggctggcaggcaccgtggtgtgagcggaagagcatgtggtgattggccacacactgagttgcacatattgagaacctaatgcactctgggtctggccagggcttcctcaaatacatgcacagtcatacaagtcatggtcacagtaaagagtacactcagccactgtcacaggcatattccctgcacacacatgcatacttacagactggaatagtggcataaggagttagaaccacagcagacaccattcattccatgtccatatgcatctacttggcaaggtcatagacaattcctccagagacactgagccagtctttgaactgcagcaatcacaaaggctgacattcactgagtgcctactctttgccaatccccgtgctaagcgttttatgtggacttattcattcctcacaatgaggctatgaggaaactgagtcactcacattgagagtaagcacgttgcccaaggttgcacagcaagaaaagggagaagttgagattcaaacccaggctgtctagctccgggggtacagcccttgcactcctactgagtttgtggtaaccagccctgcacgacccctgaatctgctgagaggcaccagtccagcaaataaagcagtcatgatttactta

SEQ ID NO: 3921 - protein, 405 aa, Homo sapiens; identical to SEQ ID NO: 385

SEQ ID NO: 3922 - DNA, 2547 bp, Homo sapiens
aaaagctcagaatttccagcagcggctccttcctccaggagtctctggtgcagctggggtggaatctggccaggccctgcttaggcccccatcctggggtcaggaaatttggaggataaggcccttcagccccaaggtcagcagggacgagcgggcagactggcgggtgtacaggagggctgggttgacctgtccttggtcactgaggccattggatcttcctccagtggctgccaggatttctggtggaagagacaggaaggcctcccccccttggtcgggtcagcctgggggctgagggcctggctgtcagccactcttcccagaacatatgtcatggcctcagtggctcatggggaagcaggggtgggcgagcttaggctagagcaagtcctgtgggagatggcagaggcctggtctgagaggcaactcggatgtgccctccagtggccatgctcccctccatgcgtctcccctgccctcctggagccctgcaggtcaatgtttaacagaaaccagagcagcggtggattaatgcgcaagggctcagccccccagccctgagcagtgggggaatcggagactttgcaacctgttctcagctctgcctcccctggccaggttgtcctcgaccagtcccgtgccatggcagcccacctgcttcccatctgcgccctcttcctgaccttactcgatatggcccaaggctttaggggccccttgctacccaaccggcccttcaccaccgtctggaatgcaaacacccagtggtgcctggagaggcacggtgtggacgtggatgtcagtgtcttcgatgtggtagccaacccagggcagaccttccgcggccctgacatgacaattttctatagctcccagctgggcacctacccctactacacgcccactggggagcctgtgtttggtggtctgccccagaatgccagcctgattgcccacctggcccgcacattccaggacatcctggctgccatacctgctcctgacttctcagggctggcagtcatcgactgggaggcatggcgcccacgctgggccttcaactgggacaccaaggacatttaccggcagcgctcacgggcactggtacaggcacagcaccctgattggccagctcctcaggtggaggcagtagcccaggaccagttccagggagctgcacgggcctggatggcaggcaccctccagctggggcgggcactgcgtcctcgcggcctctggggcttctatggcttccctgactgctacaactatgactttctaagccccaactacaccggccagtgcccatcaggcatccgtgcccaaaatgaccagctagggtggctgtggggccagagccgtgccctctatcccagcatctacatgcccgcagtgctggagggcacagggaagtcacagatgtatgtgcaacaccgtgtggccgaggcattccgtgtggctgtggctgctggtgaccccaatctgccggtgctgccctatgtccagatcttctatgacacgacaaaccactttctgcccctggatgagctggagcacagcctgggggagagtgcggcccagggggcagctggagtggtgctctgggtgagctgggaaaatacaagaaccaaggaatcatgtcaggccatcaaggagtatatggacactacactggggcccttcatcctgaacgtgaccagtggggcccttctctgcagtcaagccctgtgctccggccatggccgctgtgtccgccgcaccagccaccccaaagccctcctcctccttaaccctgccagtttctccatccagctcacgcctggtggtgggcccctgagcctgcggggtgccctctcacttgaagatcaggcacagatggctgtggagttcaaatgtcgatgctaccctggctggcaggcaccgtggtgtgagcggaagagcatgtggtgattggccacacactgagttgcacatattgagaacctaatgcactctgggtctggccagggcttcctcaaatacatgcacagtcatacaagtcatggtcacagtaaagagtacactcagccactgtcacaggcatattccctgcacacacatgcatacttacagactggaatagtggcataaggagttagaaccacagcagacaccattcattccatgtccatatgcatctacttggcaaggtcatagacaattcctccagagacactgagccagtctttgaactgcagcaatcacaaaggctgacattcactgagtgcctactctttgccaatccccgtgctaagcgttttatgtggacttattcattcctcacaatgaggctatgaggaaactgagtcactcacattgagagtaagcacgttgcccaaggttgcacagcaagaaaagggagaagttgagattcaaacccaggctgtctagctccgggggtacagcccttgcactcctactgagtttgtggtaaccagccctgcacgacccctgaatctgctgagaggcaccagtccagcaaataaagcagtcatgatttactta

SEQ ID NO: 3923 - protein, 435 aa, Homo sapiens; identical to SEQ ID NO: 379

SEQ ID NO: 3924 - DNA, 1731 bp, Homo sapiens
acaaaagctcagaatttccagcagcggctccttcctccaggagtctctggtgcagctggggtggaatctggccaggccctgcttaggcccccatcctggggtcaggaaatttggaggataaggcccttcagccccaaggttgtcctcgaccagtcccgtgccatggcagcccacctgcttcccatctgcgccctcttcctgaccttactcgatatggcccaaggctttaggggccccttgctacccaaccggcccttcaccaccgtctggaatgcaaacacccagtggtgcctggagaggcacggtgtggacgtggatgtcagtgtcttcgatgtggtagccaacccagggcagaccttccgcggccctgacatgacaattttctatagctcccagctgggcacctacccctactacacgcccactggggagcctgtgtttggtggtctgccccagaatgccagcctgattgcccacctggcccgcacattccaggacatcctggctgccatacctgctcctgacttctcagggctggcagtcatcgactgggaggcatggcgcccacgctgggccttcaactgggacaccaaggacatttaccggcagcgctcacgggcactggtacaggcacagcaccctgattggccagctcctcaggtggaggcagtagcccaggaccagttccagggagctgcacgggcctggatggcaggcaccctccagctggggcgggcactgcgtcctcgcggcctctggggcttctatggcttccctgacttggtgctctgggtgagctgggaaaatacaagaaccaaggaatcatgtcaggccatcaaggagtatatggacactacactggggcccttcatcctgaacgtgaccagtggggcccttctctgcagtcaagccctgtgctccggccatggccgctgtgtccgccgcaccagccaccccaaagccctcctcctccttaaccctgccagtttctccatccagctcacgcctggtggtgggcccctgagcctgcggggtgccctctcacttgaagatcaggcacagatggctgtggagttcaaatgtcgatgctaccctggctggcaggcaccgtggtgtgagcggaagagcatgtggtgattggccacacactgagttgcacatattgagaacctaatgcactctgggtctggccagggcttcctcaaatacatgcacagtcatacaagtcatggtcacagtaaagagtacactcagccactgtcacaggcatattccctgcacacacatgcatacttacagactggaatagtggcataaggagttagaaccacagcagacaccattcattccatgtccatatgcatctacttggcaaggtcatagacaattcctccagagacactgagccagtctttgaactgcagcaatcacaaaggctgacattcactgagtgcctactctttgccaatccccgtgctaagcgttttatgtggacttattcattcctcacaatgaggctatgaggaaactgagtcactcacattgagagtaagcacgttgcccaaggttgcacagcaagaaaagggagaagttgagattcaaacccaggctgtctagctccgggggtacagcccttgcactcctactgagtttgtggtaaccagccctgcacgacccctgaatctgctgagaggcaccagtccagcaaataaagcagtcatgatttactta

SEQ ID NO: 3925 - protein, 324 aa, Homo sapiens [sequence omitted]

SEQ ID NO: 3926 - DNA, 2329 bp, Homo sapiens
agatgtggggagcgcctctgccctgtcgccccgtccgggatgtgaggagcgtctctccctggccgccccgtctgagaagtgaggagcccctccgcccagcagccgccctgtctgagaagctagtcttgaattcctgacctcaggtgatcctcccgcgttggcctcccaaagtgctgggattacaggcatgagccaccactcctggccccagaaagtgacattctttacttaccacaggaggaaaagatccacgaaagtaaagtgcctagggcccatcaatgtcagatgcagccacgtggacaaagaacactccctgagcacaagacacgaaagaacccggtctccagtgtcacaaacaggcctgcccagcagggtctgcccctgcccacctcctccagcctaggttgtcctcgaccagtcccgtgccatggcagcccacctgcttcccatctgcgccctcttcctgaccttactcgatatggcccaaggctttaggggccccttgctacccaaccggcccttcaccaccgtctggaatgcaaacacccagtggtgcctggagaggcacggtgtggacgtggatgtcagtgtcttcgatgtggtagccaacccagggcagaccttccgcggccctgacatgacaattttctatagctcccagctgggcacctacccctactacacgcccactggggagcctgtgtttggtggtctgccccagaatgccagcctgattgcccacctggcccgcacattccaggacatcctggctgccatacctgctcctgacttctcagggctggcagtcatcgactgggaggcatggcgcccacgctgggccttcaactgggacaccaaggacatttaccggcagcgctcacgggcactggtacaggcacagcaccctgattggccagctcctcaggtggaggcagtagcccaggaccagttccagggagctgcacgggcctggatggcaggcaccctccagctggggcgggcactgcgtcctcgcggcctctggggcttctatggcttccctgactgctacaactatgactttctaagccccaactacaccggccagtgcccatcaggcatccgtgcccaaaatgaccagctagggtggctgtggggccagagccgtgccctctatcccagcatctacatgcccgcagtgctggagggcacagggaagtcacagatgtatgtgcaacaccgtgtggccgaggcattccgtgtggctgtggctgctggtgaccccaatctgccggtgctgccctatgtccagatcttctatgacacgacaaaccactttctgcccctggatgagctggagcacagcctgggggagagtgcggcccagggggcagctggagtggtgctctgggtgagctgggaaaatacaagaaccaaggaatcatgtcaggccatcaaggagtatatggacactacactggggcccttcatcctgaacgtgaccagtggggcccttctctgcagtcaagccctgtgctccggccatggccgctgtgtccgccgcaccagccaccccaaagccctcctcctccttaaccctgccagtttctccatccagctcacgcctggtggtgggcccctgagcctgcggggtgccctctcacttgaagatcaggcacagatggctgtggagttcaaatgtcgatgctaccctggctggcaggcaccgtggtgtgagcggaagagcatgtggtgattggccacacactgagttgcacatattgagaacctaatgcactctgggtctggccagggcttcctcaaatacatgcacagtcatacaagtcatggtcacagtaaagagtacactcagccactgtcacaggcatattccctgcacacacatgcatacttacagactggaatagtggcataaggagttagaaccacagcagacaccattcattccatgtccatatgcatctacttggcaaggtcatagacaattcctccagagacactgagccagtctttgaactgcagcaatcacaaaggctgacattcactgagtgcctactctttgccaatccccgtgctaagcgttttatgtggacttattcattcctcacaatgaggctatgaggaaactgagtcactcacattgagagtaagcacgttgcccaaggttgcacagcaagaaaagggagaagttgagattcaaacccaggctgtctagctccgggggtacagcccttgcactcctactgagtttgtggtaaccagccctgcacgacccctgaatctgctgagaggcaccagtccagcaaataaagcagtcatgatttactta

SEQ ID NO: 3927 - protein, 435 aa, Homo sapiens; identical to SEQ ID NO: 379

SEQ ID NO: 3928 - DNA, 620 bp, Homo sapiens
tccttcctccaggagtctctggtgcagctggggtggaatctggccaggccctgcttaggcccccatcctggggtcaggaaatttggaggataaggcccttcagccccaaggttgtcctcgaccagtcccgtgccatggcagcccacctgcttcccatctgcgccctcttcctgaccttactcgatatggcccaaggctttaggggccccttgctacccaaccggcccttcaccaccgtctggaatgcaaacacccagtggtgcctggagaggcacggtgtggacgtggatgtcagtgtcttcgatgtggtagccaacccagggcagacgctcacgggcactggtacaggcacagcaccctgattggccagctcctcaggtggaggcagtagcccaggaccagttccagggagctgcacgggcctggatggcaggcaccctccagctggggcgggcactgcgtcctcgcggcctctggggcttctatggcttccctgactgctacaactatgactttctaagccccaactacaccggccagtgcccatcaggcatccgtgcccaaaatgaccagctagggtggctgtggggccagagccgtgccctctatcccagcatcta

SEQ ID NO: 3929 - protein, 75 aa, Homo sapiens
MAAHLLPICALFLTLLDMAQGFRGPLLPNRPFTTVWNANTQWCLERHGVDVDVSVFDVVANPGQTLTGTGTGTAP

SEQ ID NO: 3930 - DNA, 952 bp, Homo sapiens
ccttcctccaggagtctctggtgcagctggggtggaatctggccaggccctgcttaggcccccatcctggggtcaggaaatttggaggataaggcccttcagccccaaggtcaatgtttaacagaaaccagagcagcggtggattaatgcgcaagggctcagccccccagccctgagcagtgggggaatcggagactttgcaacctgttctcagctctgcctcccctggccaggttgtcctcgaccagtcccgtgccatggcagcccacctgcttcccatctgcgccctcttcctgaccttactcgatatggcccaaggctttaggggccccttgctacccaaccggcccttcaccaccgtctggaatgcaaacacccagtggtgcctggagaggcacggtgtggacgtggatgtcagtgtcttcgatgtggtagccaacccagggcagaccttccgcggccctgacatgacaattttctatagctcccagctgggcacctacccctactacacgcccactggggagcctgtgtttggtggtctgccccagaatgccagcctgattgcccacctggcccgcacattccaggacatcctggctgccatacctgctcctgacttctcagggctggcagtcatcgactgggaggcatggcgcccacgctgggccttcaactgggacaccaaggacatttaccggcagcgctcacgggcactggtacaggcacagcaccctgattggccagctcctcaggtggaggcagtagcccaggaccagttccagggagctgcacgggcctggatggcaggcaccctccagctggggcgggcactgcgtcctcgcggcctctggggcttctatggcttccctgactgctacaactatgactttctaagccccaactacaccggccagtgcccatcaggcatccgtgcccaaaatgaccagct

SEQ ID NO: 3931 - protein, 230 aa, Homo sapiens
MAAHLLPICALFLTLLDMAQGFRGPLLPNRPFTTVWNANTQWCLERHGVDVDVSVFDVVANPGQTFRGPDMTIFYSSQLGTYPYYTPTGEPVFGGLPQNASLIAHLARTFQDILAAIPAPDFSGLAVIDWEAWRPRWAFNWDTKDIYRQRSRALVQAQHPDWPAPQVEAVAQDQFQGAARAWMAGTLQLGRALRPRGLWGFYGFPDCYNYDFLSPNYTGQCPSGIRAQND

SEQ ID NO: 3932 - DNA, 817 bp, Homo sapiens
tccttcctccaggagtctctggtgcagctggggtggaatctggccaggccctgcttaggcccccatcctggggtcaggaaatttggaggataaggcccttcagccccaaggtcagcagggacgagcgggcagactggcgggtgtacaggagggctgggttgaccttactcgatatggcccaaggctttaggggccccttgctacccaaccggcccttcaccaccgtctggaatgcaaacacccagtggtgcctggagaggcacggtgtggacgtggatgtcagtgtcttcgatgtggtagccaacccagggcagaccttccgcggccctgacatgacaattttctatagctcccagctgggcacctacccctactacacgcccactggggagcctgtgtttggtggtctgccccagaatgccagcctgattgcccacctggcccgcacattccaggacatcctggctgccatacctgctcctgacttctcagggctggcagtcatcgactgggaggcatggcgcccacgctgggccttcaactgggacaccaaggacatttaccggcagcgctcacgggcactggtacaggcacagcaccctgattggccagctcctcaggtggaggcagtagcccaggaccagttccagggagctgcacgggcctggatggcaggcaccctccagctggggcgggcactgcgtcctcgcggcctctggggcttctatggcttccctgactgctacaactatgactttctaagccccaactacaccggccagtgcccatcaggcatccgtgcccaaaatgaccagct

SEQ ID NO: 3933 - protein, 213 aa, Homo sapiens
MAQGFRGPLLPNRPFTTVWNANTQWCLERHGVDVDVSVFDVVANPGQTFRGPDMTIFYSSQLGTYPYYTPTGEPVFGGLPQNASLIAHLARTFQDILAAIPAPDFSGLAVIDWEAWRPRWAFNWDTKDIYRQRSRALVQAQHPDWPAPQVEAVAQDQFQGAARAWMAGTLQLGRALRPRGLWGFYGFPDCYNYDFLSPNYTGQCPSGIRAQND

SEQ ID NO: 3934 - DNA, 1034 bp, Homo sapiens
gtagagaaggggtttcaccatgttagccgggatggtctcgatctcctgacctcgtgatctgccacctcggcttcccaaagtgctaggattataggcgtgagcctccgcacctggcatgcctggccatattttaaaatattttttttaaggaggaaaagatccacgaaagtaaagtgcctagggcccatcaatgtcagatgcagccacgtggacaaagaacactccctgagcacaagacacgaaagaacccggtctccagtgtcacaaacaggcctgcccagcagggtctgcccctgcccacctcctccagcctaggttgtcctcgaccagtcccgtgccatggcagcccacctgcttcccatctgcgccctcttcctgaccttactcgatatggcccaaggctttaggggccccttgctacccaaccggcccttcaccaccgtctggaatgcaaacacccagtggtgcctggagaggcacggtgtggacgtggatgtcagtgtcttcgatgtggtagccaacccagggcagaccttccgcggccctgacatgacaattttctatagctcccagctgggcacctacccctactacacgcccactggggagcctgtgtttggtggtctgccccagaatgccagcctgattgcccacctggcccgcacattccaggacatcctggctgccatacctgctcctgacttctcagggctggcagtcatcgactgggaggcatggcgcccacgctgggccttcaactgggacaccaaggacatttaccggcagcgctcacgggcactggtacaggcacagcaccctgattggccagctcctcaggtggaggcagtagcccaggaccagttccagggagctgcacgggcctggatggcaggcaccctccagctggggcgggcactgcgtcctcgcggcctctggggcttctatggcttccctgactgctacaactatgactttctaagccccaactacaccggccagtgcccatcaggcatccgtgcccaaaatgaccagct

SEQ ID NO: 3935 - protein, 69 aa, Homo sapiens
MQPRGQRTLPEHKTRKNPVSSVTNRPAQQGLPLPTSSSLGCPRPVPCHGSPPASHLRPLPDLTRYGPRL

SEQ ID NO: 3936 - DNA, 4054 bp, Homo sapiens
gaatggggtttatcaagtcctcggcgagctgcccaacgggcagcagctggcgcaagtagcctagctggagaggctcaccccaggaaggagggaggccaccgacctactgggccgacggactcccacacaggtgagcccagagcagacggctggtctgcacccccacagatgcgctcgcagttgcactccctccctctcctggcgcccgggagggttaggggctggtggtgcagacgcgggcccttttgggagttgagtctcgcacaagggagcggacctaggaagagccgaggtggtttcgcacggggctcgccagggtctaagcctgccccccaccgggagaggcctgtggagcgtagggggcgctggatacgggatggaggccctgggagacccctcttgctggctttctcggaggtccagccagaaactgctgcaaggaatggaggcctcctcggggttgagagggagccgggctcccaaaggacctcagagactgggcagaaaaggacgggatctcagggatgactgtcccgccctgatgcgagtcagggagaggggcggccaacctcctagacccctctgagcttccctgaccccaaccctgcggccacgccgcgacccagagccgggctgccaggataacgactgcctcggcccttcctgggccggctaagaagcggtgcttggccccttccctcagtctggcagggggcggggcctccctttagacggcggaccagagaagggggcccctgattcgtgggaggcggggcactactctccaggagaccagaggtcgcctcaggtcaaagtccctttttccacacaaaggggacccacggctggcgtctacgttagggggtgcagagccagatctggtgctgccccctgccaacctcggagtaccacagcacctcctgatggccgaacggggcaacgcctcctcctattcccccccccccccttcccgtccccctgccttgtccctcacactgtctctttaaagggctggcggcgccgcggagctgggaggactgaaccaccggcctcgggctgcaggggaaacatttcaggctgactggcgctcgtggctgagactcccatagaaagcccggctcagaggggcattagggtcctaaatgggcggccacgtccctctgcagaggacctggggctcttcgagcccgaaacgaggcaccggcaccgagaaaggtggaccacaccttcccgccccgtccgcaagtccaatcccgggcccacctccgcactggagtcttaaagggccagcgtgcctgggggcggagccagcagaggcgctgagccgggccgcgcctgggcgaacggccggagcgggctgggctgggcccgggatggcggtggccctggcgccggtcccggtggcgccccgcgcgaggtgagggcgggcggtgcaaacctggcggctctctccccttgggctggggtctgaatccccgggggtgctcgcggagaggcgtcccagaaaccccacccccacccgaccgggcgcaggccccacgtgtggggcgggggcggggtcccgcacaaagacccggcggagcgcgctctagccctgagcggccgggcgggggaggcgagcgcgcgcattcccggtggcggtggagggaagggccgggcggccggcgccgccgtgggaggtccgctgcccctttgtccctacggggcctcctccaagccgggagagtgtcagcgctcgagagaaagtccggagagcctcactcttctgccgggcgagtgttacacggatagaagcctcccggcagcgttccttccagtttcgtagcctcttgacgagctgttccctgctttacccaaatgctgtcgtttctctggatcaagggttcttcacggtgtacagggtgggcatcagctgttcagggttctctgaaaccatgtactggatggtatgcaggcatatatgtgactctggtgagcccaaattatctagttcttagaagggtcacagacctaatagagatttgtgccgagccacaggctacctgctccagaaaagagccctgtgcttctggcagtgagttcccagggtgccttgtctgccctgcagtggcctgtggtctctcaaacctattacagccatgagcacagtgcccccacacagcatgggctttgggagcatagatgggcttgaggtgggcacttccagtattccctagactgacttgttctccccaacccttcttccagttcctgagctggtgccaggcaggtgacacctcctgcagcccccagcatgcgggcaggcccaggccccaccgttacattggccctggtgctggcggtgtcatgggccatggagctcaagcccacagcaccacccatcttcactggccggccctttgtggtagcgtgggacgtgcccacacaggactgtggcccacgcctcaaggtgccactggacctgaatgcctttgatgtgcaggcctcacctaatgagggttttgtgaaccagaatattaccatcttctaccgcgaccgtctaggcctgtatccacgcttcgattctgccggaaggtctgtgcatggtggtgtgccacagaatgtcagcctttgggcacaccggaagatgctgcagaaacgtgtggagcactacattcggacacaggagtctgcggggctggcggtcatcgactgggaggactggcgacctgtgtgggtgcgcaactggcaggacaaagatgtgtatcgccggttatcacgccagctagtggccagtcgtcaccctgactggcctccagaccgcatagtcaaacaggcacaatatgagtttgagttcgcagcacagcagttcatgctggagacactgcgttatgtcaaggcagtgcggccccggcacctctggggcttctacctctttcctgactgctacaatcatgattatgtgcagaactgggagagctacacaggccgctgccctgatgttgaggtggcccgcaatgaccagctggcctggctgtgggctgagagcacggccctcttcccgtctgtctacctggacgagacacttgcttcctcccgccatggccgcaactttgtgagcttccgtgttcaggaggcccttcgtgtggctcgcacccaccatgccaaccatgcactcccagtctacgtcttcacacgacccacctacagccgcaggctcacggggcttagtgagatggacctcatctctaccattggcgagagtgcggccctgggcgcagctggtgtcatcctctggggtgacgcggggtacaccacaagcacggagacctgccagtacctcaaagattacctgacacggctgctggtcccctacgtggtcaatgtgtcctgggccacccaatattgcagccgggcccagtgccatggccatgggcgctgtgtgcgccgcaaccccagtgccagtaccttcctgcatctcagcaccaacagtttccgcctagtgcctggccatgcacctggtgaaccccagctgcgacctgtgggggagctcagttgggccgacattgaccacctgcagacacacttccgctgccagtgctacttgggctggagtggtgagcaatgccagtgggaccataggcaggcagctggaggtgccagcgaggcctgggctgggtcccacctcaccagtctgctggctctggcagccctggcctttacctggaccttgtaggggtctcctgcctagctgcctagcaagctggcctctaccacaagggctctcttaggcatgtaggaccctgcagggggtggacaaactggagtctggagtgggcagagcccccaggaagcccaggagggcatccataccagctcgcacccccctgttctaagggggaggggaagtccctgggaggccccttctctccctgccagaggggaaggagggtacagctgggctggggaggacctgaccctactcccttgccctagatagtttattattattattattttggggtctcttttgtaaattaaacataaaacaattgcttctctgcttggattttgt

SEQ ID NO: 3937 - protein, 473 aa, Homo sapiens; identical to SEQ ID NO: 391

SEQ ID NO: 3938 - DNA, 1191 bp, Homo sapiens
agttcctgagctggtgccaggcaggtgacacctcctgcagcccccagcatgcgggcaggcccaggccccaccgttacattggccctggtgctggcggtgtcatgggccatggagctcaagcccacagcaccacccatcttcactggccggccctttgtggtagcgtgggacgtgcccacacaggactgtggcccacgcctcaaggtgccactggacctgaatgcctttgatgtgcaggcctcacctaatgagggttttgtgaaccagaatattaccatcttctaccgcgaccgtctaggcctgtatccacgcttcgattctgccggaaggtctgtgcatggtggtgtgccacagaatgtcagcctttgggcacaccggaagatgctgcagaaacgtgtggagcactacattcggacacaggagtctgcggggctggcggtcatcgactgggaggactggcgacctgtgtgggtgcgcaactggcaggacaaagatgtgtatcgccggttatcacgccagctagtggccagtcgtcaccctgactggcctccagaccgcatagtcaaacaggcacaatatgagtttgagttcgcagcacagcagttcatgctggagacactgcgttatgtcaaggcagtgcggccccggcacctctggggcttctacctctttcctgactgctacaatcatgattatgtgcagaactgggagagctacacaggccgctgccctgatgttgaggtggcccgcaatgaccagctggcctggctgtgggctgagagcacggccctcttcccgtctgtctacctggacgagacacttgcttcctcccgccatggccgcaactggaccttgtaggggtctcctgcctagctgcctagcaagctggcctctaccacaagggctctcttaggcatgtaggaccctgcagggggtggacaaactggagtctggagtgggcagagcccccaggaagcccaggagggcatccataccagctcgcacccccctgttctaagggggaggggaagtccctgggaggccccttctctccctgccagaggggaaggagggtacagctgggctggggaggacctgaccctactcccttgccctagatagtttattattattattattttggggtctcttttgtaaattaaacataaaacaattgcttctctgcttgga

SEQ ID NO: 3939 - protein, 269 aa, Homo sapiens
MRAGPGPTVTLALVLAVSWAMELKPTAPPIFTGRPFVVAWDVPTQDCGPRLKVPLDLNAFDVQASPNEGFVNQNITIFYRDRLGLYPRFDSAGRSVHGGVPQNVSLWAHRKMLQKRVEHYIRTQESAGLAVIDWEDWRPVWVRNWQDKDVYRRLSRQLVASRHPDWPPDRIVKQAQYEFEFAAQQFMLETLRYVKAVRPRHLWGFYLFPDCYNHDYVQNWESYTGRCPDVEVARNDQLAWLWAESTALFPSVYLDETLASSRHGRNWTL

SEQ ID NO: 3940 - DNA, 1529 bp, Homo sapiens
cagttcctgagctggtgccaggcaggtgacacctcctgcagcccccagcatgcgggcaggcccaggccccaccgttacattggccctggtgctggcggtgtcatgggccatggagctcaagcccacagcaccacccatcttcactggccggccctttgtggtagcgtgggacgtgcccacacaggactgtggcccacgcctcaaggtgccactggacctgaatgcctttgatgtgcaggcctcacctaatgagggttttgtgaaccagaatattaccatcttctaccgcgaccgtctaggcctgtatccacgcttcgattctgccggaaggtctgtgcatggtggtgtgccacagaatgtcagcctttgggcacaccggaagatgctgcagaaacgtgtggagcactacattcggacacaggagtctgcggggctggcggtcatcgactgggaggactggcgacctgtgtgggtgcgcaactggcaggacaaagatgtgtatcgccggttatcacgccagctagtggccagtcgtcaccctgactggcctccagaccgcatagtcaaacaggcacaatatgagtttgagttcgcagcacagcagttcatgctggagacactgcgttatgtcaaggcagtgcggccccggcacctctggggcttctacctctttcctgactgctacaatcatgattatgtgcagaactgggagagctacacaggccgctgccctgatgttgaggtggcccgcaatgaccagctggcctggctgtgggctgagagcacggccctgccagtacctcaaagattacctgacacggctgctggtcccctacgtggtcaatgtgtcctgggccacccaatattgcagccgggcccagtgccatggccatgggcgctgtgtgcgccgcaaccccagtgccagtaccttcctgcatctcagcaccaacagtttccgcctagtgcctggccatgcacctggtgaaccccagctgcgacctgtgggggagctcagttgggccgacattgaccacctgcagacacacttccgctgccagtgctacttgggctggagtggtgagcaatgccagtgggaccataggcaggcagctggaggtgccagcgaggcctgggctgggtcccacctcaccagtctgctggctctggcagccctggcctttacctggaccttgtaggggtctcctgcctagctgcctagcaagctggcctctaccacaagggctctcttaggcatgtaggaccctgcagggggtggacaaactggagtctggagtgggcagagcccccaggaagcccaggagggcatccataccagctcgcacccccctgttctaagggggaggggaagtccctgggaggccccttctctccctgccagaggggaaggagggtacagctgggctggggaggacctgaccctactcccttgccctagatagtttattattattattattttggggtctcttttgtaaattaaacataaaacaattgcttctctgcttgga

SEQ ID NO: 3941 - protein, 311 aa, Homo sapiens
MRAGPGPTVTLALVLAVSWAMELKPTAPPIFTGRPFVVAWDVPTQDCGPRLKVPLDLNAFDVQASPNEGFVNQNITIFYRDRLGLYPRFDSAGRSVHGGVPQNVSLWAHRKMLQKRVEHYIRTQESAGLAVIDWEDWRPVWVRNWQDKDVYRRLSRQLVASRHPDWPPDRIVKQAQYEFEFAAQQFMLETLRYVKAVRPRHLWGFYLFPDCYNHDYVQNWESYTGRCPDVEVARNDQLAWLWAESTALPVPQRLPDTAAGPLRGQCVLGHPILQPGPVPWPWALCAPQPQCQYLPASQHQQFPPSAWPCTW

SEQ ID NO: 3942 - DNA, 1924 bp, Homo sapiens
gtttatcaagtcctcggcgagctgcccaacgggcagcagctggcgcaagtagcctagctggagaggctcaccccaggaaggagggaggccaccgacctactgggccgacggactcccacacagttcctgagctggtgccaggcaggtgacacctcctgcagcccccagcatgcgggcaggcccaggccccaccgttacattggccctggtgctggcggtgtcatgggccatggagctcaagcccacagcaccacccatcttcactggccggccctttgtggtagcgtgggacgtgcccacacaggactgtggcccacgcctcaaggtgccactggacctgaatgcctttgatgtgcaggcctcacctaatgagggttttgtgaaccagaatattaccatcttctaccgcgaccgtctaggcctgtatccacgcttcgattctgccggaaggtctgtgcatggtggtgtgccacagaatgtcagcctttgggcacaccggaagatgctgcagaaacgtgtggagcactacattcggacacaggagtctgcggggctggcggtcatcgactgggaggactggcgacctgtgtgggtgcgcaactggcaggacaaagatgtgtatcgccggttatcacgccagctagtggccagtcgtcaccctgactggcctccagaccgcatagtcaaacaggcacaatatgagtttgagttcgcagcacagcagttcatgctggagacactgcgttatgtcaaggcagtgcggccccggcacctctggggcttctacctctttcctgactgctacaatcatgattatgtgcagaactgggagagctacacaggccgctgccctgatgttgaggtggcccgcaatgaccagctggcctggctgtgggctgagagcacggccctcttcccgtctgtctacctggacgagacacttgcttcctcccgccatggccgcaactttgtgagcttccgtgttcaggaggcccttcgtgtggctcgcacccaccatgccaaccatgcactcccagtctacgtcttcacacgacccacctacagccgcaggctcacggggcttagtgagatggacctcatctctaccattggcgagagtgcggccctgggcgcagctggtgtcatcctctggggtgacgcggggtacaccacaagcacggagacctgccagtacctcaaagattacctgacacggctgctggtcccctacgtggtcaatgtgtcctgggccacccaatattgcagccgggcccagtgccatggccatgggcgctgtgtgcgccgcaaccccagtgccagtaccttcctgcatctcagcaccaacagtttccgcctagtgcctggccatgcacctggtgaaccccagctgcgacctgtgggggagctcagttgggccgacattgaccacctgcagacacacttccgctgccagtgctacttgggctggagtggtgagcaatgccagtgggaccataggcaggcagctggaggtgccagcgaggcctgggctgggtcccacctcaccagtctgctggctctggcagccctggcctttacctggaccttgtaggggtctcctgcctagctgcctagcaagctggcctctaccacaagggctctcttaggcatgtaggaccctgcagggggtggacaaactggagtctggagtgggcagagcccccaggaagcccaggagggcatccataccagctcgcacccccctgttctaagggggaggggaagtccctgggaggccccttctctccctgccagaggggaaggagggtacagctgggctggggaggacctgaccctactcccttgccctagatagtttattattattattattttggggtctcttttgtaaattaaacataaaacaattgcttctctgcttgga

SEQ ID NO: 3943 - protein, 473 aa, Homo sapiens; identical to SEQ ID NO: 391

SEQ ID NO: 3944 - DNA, 2334 bp, Homo sapiens
gggtttatcaagtcctcggcgagctgcccaacgggcagcagctggcgcaagtagcctagctggagaggctcaccccaggaaggagggaggccaccgacctactgggccgacggactcccacacagggctggcggcgccgcggagctgggaggactgaaccaccggcctcgggctgcaggggaaacatttcaggctgactggcgctcgtggctgagactcccatagaaagcccggctcagaggggcattagggtcctaaatgggcggccacgtccctctgcagaggacctggggctcttcgagcccgaaacgaggcaccggcaccgagaaaggtggaccacaccttcccgccccgtccgcaagtccaatcccgggcccacctccgcactggagtcttaaagggccagcgtgcctgggggcggagccagcagaggcgctgagccgggccgcgcctgggcgaacggccggagcgggctgggctgggcccgggatggcggtggccctggcgccggtcccggtggcgccccgcgcgagttcctgagctggtgccaggcaggtgacacctcctgcagcccccagcatgcgggcaggcccaggccccaccgttacattggccctggtgctggcggtgtcatgggccatggagctcaagcccacagcaccacccatcttcactggccggccctttgtggtagcgtgggacgtgcccacacaggactgtggcccacgcctcaaggtgccactggacctgaatgcctttgatgtgcaggcctcacctaatgagggttttgtgaaccagaatattaccatcttctaccgcgaccgtctaggcctgtatccacgcttcgattctgccggaaggtctgtgcatggtggtgtgccacagaatgtcagcctttgggcacaccggaagatgctgcagaaacgtgtggagcactacattcggacacaggagtctgcggggctggcggtcatcgactgggaggactggcgacctgtgtgggtgcgcaactggcaggacaaagatgtgtatcgccggttatcacgccagctagtggccagtcgtcaccctgactggcctccagaccgcatagtcaaacaggcacaatatgagtttgagttcgcagcacagcagttcatgctggagacactgcgttatgtcaaggcagtgcggccccggcacctctggggcttctacctctttcctgactgctacaatcatgattatgtgcagaactgggagagctacacaggccgctgccctgatgttgaggtggcccgcaatgaccagctggcctggctgtgggctgagagcacggccctcttcccgtctgtctacctggacgagacacttgcttcctcccgccatggccgcaactttgtgagcttccgtgttcaggaggcccttcgtgtggctcgcacccaccatgccaaccatgcactcccagtctacgtcttcacacgacccacctacagccgcaggctcacggggcttagtgagatggacctcatctctaccattggcgagagtgcggccctgggcgcagctggtgtcatcctctggggtgacgcggggtacaccacaagcacggagacctgccagtacctcaaagattacctgacacggctgctggtcccctacgtggtcaatgtgtcctgggccacccaatattgcagccgggcccagtgccatggccatgggcgctgtgtgcgccgcaaccccagtgccagtaccttcctgcatctcagcaccaacagtttccgcctagtgcctggccatgcacctggtgaaccccagctgcgacctgtgggggagctcagttgggccgacattgaccacctgcagacacacttccgctgccagtgctacttgggctggagtggtgagcaatgccagtgggaccataggcaggcagctggaggtgccagcgaggcctgggctgggtcccacctcaccagtctgctggctctggcagccctggcctttacctggaccttgtaggggtctcctgcctagctgcctagcaagctggcctctaccacaagggctctcttaggcatgtaggaccctgcagggggtggacaaactggagtctggagtgggcagagcccccaggaagcccaggagggcatccataccagctcgcacccccctgttctaagggggaggggaagtccctgggaggccccttctctccctgccagaggggaaggagggtacagctgggctggggaggacctgaccctactcccttgccctagatagtttattattattattattttggggtctcttttgtaaattaaacataaaacaattgcttctctgcttgga

SEQ ID NO: 3945 - protein, 473 aa, Homo sapiens; identical to SEQ ID NO: 391

SEQ ID NO: 3946 - DNA, 404 bp, Homo sapiens
ggtggcagacagaagcaccccctgccccggcaagaaactcccaggctcaatcaaggtgtggcttccattgaggagcccaggctggggccacaaccctgaataaactctgttggcccataaccttcagctgatcagtcaagggaaagcactagaacccctgggtagggaaagaaaggagggaaaaaccataaaaggaatacttataatgtgaaggtttgtaaatagtccatgatgatgtcgtggcagagtctgatttctatatagaggtgactttttttttaagtactgtgcaagctctgtgcttctataatgtgggaaatggcttggggaggatggcccctagcttaggaagactgttgtgttatttgttcaatttcaataaaatgatttgtagatcctgcaca

SEQ ID NO: 3947 - protein, 33 aa, Homo sapiens
VADRSTPCPGKKLPGSIKVWLPLRSPGWGHNPE

SEQ ID NO: 3948 - DNA, 1513 bp, Homo sapiens
agacagccgagcctgcggaaggcggcggcggcggcacctgcgatcagcggctggggcaggttatggtagtgcggactgcggtgtgagcagagcggccacggggcccgccatgcgccggcggccctgacatgggcgccagcgggtccaaagctcggggcctgtggcccttcgcctcggcggccggaggcggcggctcagaggcagcaggagctgagcaagctttggtgcggcctcggggccgagctgtgccccccttcgtattcacgcgccgcggctctatgttctatgatgaggtgtgaccctgggaggtggcagacagaagcaccccctgccccggcaagaaactcccaggctcaatcaaggtgtggcttccattgaggagcccaggctggggccacaaccctgaataaactctgttggcccataaccttcagctgtgagcgggtcggtcccacagtattggttgggtgttggtttgtgtgtggacaagaggtggttggtgggtggtgaaggctaatggcagagttagcaccccactctcccaagccacccctgcaagcagcacagcagggcatataccagtcaggaatgcccgttacctggttccttgcctggtctgctttcttccaagtttgcctggggcctagccctgctagaggctacagcactttacaagcaaggtatgctttcttccagcccctaggctgtgggcactgtatacaagtaggaacttcctttccttcacttcccttttaacccctagtcagagcatttcagccgtttgctacctcgattcctcctgtgttggacagaggctgggggcagtgccagcctgattcttccgacctacctgccatttgttcccgccttcagatggatggacagtttgctggctattgataggagtggggactgggtgggggcttctccctctacccagggctgggctgatccccctactgcaactaactgttgccccccaaccccgaacccccagttgaggagttgagagagtgcaggctggggtcaggacaggctgcggatgcttgtgcctatggggagttactccaacccacctattctgtctaatctccatggctttgcaccaaatcctccacccctccaattgggaggggactgttcaccaccttgtggtaagggacaacaccctaaggctggtgccagtagttatgagtagcctaccaccccctcccttacagtaacccccaccccttcaggatcagtcaagggaaagcactagaacccctgggtagggaaagaaaggagggaaaaaccataaaaggaatacttataatgtgaaggtttgtaaatagtccatgatgatgtcgtggcagagtctgatttctatatagaggtgactttttttttaagtactgtgcaagctctgtgcttctataatgtgggaaatggcttggggaggatggcccctagcttaggaagactgttgtgttatttgttcaatttcaataaaatgatttgtagatcctgcaca

SEQ ID NO: 3949 - protein, 56 aa, Homo sapiens [sequence omitted]

SEQ ID NO: 3950 - DNA, 1697 bp, Homo sapiens
agcggaagtgaggtttccgtggagacagccgagcctgcggaaggcggcggcggcggcacctgcgatcagcggctggggcaggttatggtagtgcggactgcggtgtgagcagagcggccacggggcccgccatgcgccggcggccctgacatgggcgccagcgggtccaaagctcggggcctgtggcccttcgcctcggcggccggaggcggcggctcagaggcagcaggagctgagcaagctttggtgcggcctcggggccgagctgtgccccccttcgtattcacgcgccgcggctctatgttctatgatgaggatggggatctggctcacgagttctatgaggagacaatcgtcaccaagaacgggcagaagcgggccaagctgaggcgagtgcataagaatctgattcctcagggcatcgtgaagctggatcacccccgcatccacgtggatttccctgtgatcctctatgaggtgtgaccctgggaggtggcagacagaagcaccccctgccccggcaagaaactcccaggctcaatcaaggtgtggcttccattgaggagcccaggctggggccacaaccctgaataaactctgttggcccataaccttcagctgtgagcgggtcggtcccacagtattggttgggtgttggtttgtgtgtggacaagaggtggttggtgggtggtgaaggctaatggcagagttagcaccccactctcccaagccacccctgcaagcagcacagcagggcatataccagtcaggaatgcccgttacctggttccttgcctggtctgctttcttccaagtttgcctggggcctagccctgctagaggctacagcactttacaagcaaggtatgctttcttccagcccctaggctgtgggcactgtatacaagtaggaacttcctttccttcacttcccttttaacccctagtcagagcatttcagccgtttgctacctcgattcctcctgtgttggacagaggctgggggcagtgccagcctgattcttccgacctacctgccatttgttcccgccttcagatggatggacagtttgctggctattgataggagtggggactgggtgggggcttctccctctacccagggctgggctgatccccctactgcaactaactgttgccccccaaccccgaacccccagttgaggagttgagagagtgcaggctggggtcaggacaggctgcggatgcttgtgcctatggggagttactccaacccacctattctgtctaatctccatggctttgcaccaaatcctccacccctccaattgggaggggactgttcaccaccttgtggtaagggacaacaccctaaggctggtgccagtagttatgagtagcctaccaccccctcccttacagtaacccccaccccttcaggatcagtcaagggaaagcactagaacccctgggtagggaaagaaaggagggaaaaaccataaaaggaatacttataatgtgaaggtttgtaaatagtccatgatgatgtcgtggcagagtctgatttctatatagaggtgactttttttttaagtactgtgcaagctctgtgcttctataatgtgggaaatggcttggggaggatggcccctagcttaggaagactgttgtgttatttgttcaatttcaataaaatgatttgtagatcctgcaca

SEQ ID NO: 3951 - protein, 110 aa, Homo sapiens; identical to SEQ ID NO: 395

SEQ ID NO: 3952 - DNA, 1891 bp, Homo sapiens
gaagcggaagtgaggtttccgtggagacagccgagcctgcggaaggcggcggcggcggcacctgcgatcagcggctggggcaggttatggtagtgcggactgcggtgtgagcagagcggccacggggcccgccatgcgccggcggccctgacatgggcgccagcgggtccaaagctcggggcctgtggcccttcgcctcggcggccggaggcggcggctcagaggcagcaggagctgagcaagctttggtgcggcctcggggccgagctgtgccccccttcgtattcacgcgccgcgggcttctgctatttcagtctttgacactgggccagcagcatcttctggagtgagaccaacatgcccaggccaccaccctgcccactctagaagtcctgggtgaaggcaaagtcctgatattagaatggctgcccttgctgaacaaatcaaggatgagaactggccttggtggctgcctggatggtgtgctctgctctatgttctatgatgaggatggggatctggctcacgagttctatgaggagacaatcgtcaccaagaacgggcagaagcgggccaagctgaggcgagtgcataagaatctgattcctcagggcatcgtgaagctggatcacccccgcatccacgtggatttccctgtgatcctctatgaggtgtgaccctgggaggtggcagacagaagcaccccctgccccggcaagaaactcccaggctcaatcaaggtgtggcttccattgaggagcccaggctggggccacaaccctgaataaactctgttggcccataaccttcagctgtgagcgggtcggtcccacagtattggttgggtgttggtttgtgtgtggacaagaggtggttggtgggtggtgaaggctaatggcagagttagcaccccactctcccaagccacccctgcaagcagcacagcagggcatataccagtcaggaatgcccgttacctggttccttgcctggtctgctttcttccaagtttgcctggggcctagccctgctagaggctacagcactttacaagcaaggtatgctttcttccagcccctaggctgtgggcactgtatacaagtaggaacttcctttccttcacttcccttttaacccctagtcagagcatttcagccgtttgctacctcgattcctcctgtgttggacagaggctgggggcagtgccagcctgattcttccgacctacctgccatttgttcccgccttcagatggatggacagtttgctggctattgataggagtggggactgggtgggggcttctccctctacccagggctgggctgatccccctactgcaactaactgttgccccccaaccccgaacccccagttgaggagttgagagagtgcaggctggggtcaggacaggctgcggatgcttgtgcctatggggagttactccaacccacctattctgtctaatctccatggctttgcaccaaatcctccacccctccaattgggaggggactgttcaccaccttgtggtaagggacaacaccctaaggctggtgccagtagttatgagtagcctaccaccccctcccttacagtaacccccaccccttcaggatcagtcaagggaaagcactagaacccctgggtagggaaagaaaggagggaaaaaccataaaaggaatacttataatgtgaaggtttgtaaatagtccatgatgatgtcgtggcagagtctgatttctatatagaggtgactttttttttaagtactgtgcaagctctgtgcttctataatgtgggaaatggcttggggaggatggcccctagcttaggaagactgttgtgttatttgttcaatttcaataaaatgatttgtagatcctgcaca

SEQ ID NO: 3953 - protein, 75 aa, Homo sapiens [sequence omitted]

SEQ ID NO: 3954 - DNA, 600 bp, Homo sapiens
gaggtttccgtggagacagccgagcctgcggaaggcggcggcggcggcacctgcgatcagcggctggggcaggttatggtagtgcggactgcggtgtgagcagagcggccacggggcccgccatgcgccggcggccctgacatgggcgccagcgggtccaaagctcggggcctgtggcccttcgcctcggcggccggaggcggcggctcagaggcagcaggagctgagcaagctttggtgcggcctcggggccgagctgtgccccccttcgtattcacgcgccgcggctctatgttctatgatgaggatggggatctggctcacgagttctatgaggagacaatcgtcaccaagaacgggcagaagcgggccaagctgaggcgagtgcataagaatctgattcctcagggcatcgtgaagctggatcacccccgcatccacgtggatttccctgtgatcctctatgaggtgtgaccctgggaggtggcagacagaagcaccccctgccccggcaagaaactcccaggctcaatcaaggtgtggcttccattgaggagcccaggctggggccacaaccctgaataaactctgttggcccat

SEQ ID NO: 3955 - protein, 110 aa, Homo sapiens; identical to SEQ ID NO: 395

SEQ ID NO: 3956 - DNA, 803 bp, Homo sapiens
gaagcggaagtgaggtttccgtggagacagccgagcctgcggaaggcggcggcggcggcacctgcgatcagcggctggggcaggttatggtagtgcggactgcggtgtgagcagagcggccacggggcccgccatgcgccggcggccctgacatgggcgccagcgggtccaaagctcggggcctgtggcccttcgcctcggcggccggaggcggcggctcagaggcagcaggagctgagcaagctttggtgcggcctcggggccgagctgtgccccccttcgtattcacgcgccgcgggcttctgctatttcagtctttgacactgggccagcagcatcttctggagtgagaccaacatgcccaggccaccaccctgcccactctagaagtcctgggtgaaggcaaagtcctgatattagaatggctgcccttgctgaacaaatcaaggatgagaactggccttggtggctgcctggatggtgtgctctgctctatgttctatgatgaggatggggatctggctcacgagttctatgaggagacaatcgtcaccaagaacgggcagaagcgggccaagctgaggcgagtgcataagaatctgattcctcagggcatcgtgaagctggatcacccccgcatccacgtggatttccctgtgatcctctatgaggtgtgaccctgggaggtggcagacagaagcaccccctgccccggcaagaaactcccaggctcaatcaaggtgtggcttccattgaggagcccaggctggggccacaaccctgaataaactctgttggcccat

SEQ ID NO: 3957 - protein, 75 aa, Homo sapiens [sequence omitted]

SEQ ID NO: 3958 - DNA, 1350 bp, Homo sapiens
cggtcgctggagctccgccctccccggtccgttgccgcgtcctgggtcggtgggcagccccaccctcctggctacgtggctccccgcgggtcctggccggggacctgcccgcggaaccgtgcgtaagaccccgattccaccgcctagatgctgggtgccggggcccccttggtttctgtcacagacaggttgaacacggaaaaagcagctgtatggcttgtggtagacctgagccgggcattatccagctatgactaaagccgaccgagcagtttggactagcacctcgatttccgcgttcgaatgctcctgctccctccttggggagactaggggaggatgtggagagggaagagtcctcgccaggaattgagaagtatgtttaggaaaacttgagaggcagagagagatcctgctcctccatctgcactcctgtatggagccagctgagccctcacctcttccctgttctggcctgtcaccagctgctggaatgtggaagattctgttcccttcctctagggtggatctggagaaagatttgggaatagataggaaagaagtcttgttttggaccataagcattcaggagcactttacccacaggaagggggaaagctagattataaaatgcctaaagaggtggaaaaagagatccaggttactaacccaggactgtaaggtgtctcggaacctcctaggtatccccattatcggagaactgtgtgccagatgccattggtgtgaccaccaggctcagagaaccaggcctaggcaccaggaaaaagaaacagggactgtgaagctcagtatgcctggcagaaatggggcggaaatccttatttaagtaaagaaagtggagttgtgagtgatgcttcagataaaattttacaaaattccttacaaaatgggtggtgctcagcacgccaaaatcttagcccagagcttgggtgcaagggttgagttgagtgtagacccctgggcttgtcttcatgtcagtcagtcctgagccattttccactgtggaaaggtgggaaaaccacaagacactaaccaattgaaaaggagggctagccacggaggtgcacacctgtaatcccagctacttgggagggtgaggcagaaggatcacttgaacctgggaggcagaggttgcagtgagccaagatcgtgccactgcactccagcctgagtgacagagtgagactctgtctcaaaaatagaaaaggaagccaagtacggtggctcacacctgtaatcccaacactttggttgggctaggtgggcagatcacttgaggccaggagttcgaggccagcctggccagcatggcgaaaccccatctctacc

SEQ ID NO: 3959 - protein, 61 aa, Homo sapiens
MEPAEPSPLPCSGLSPAAGMWKILFPSSRVDLEKDLGIDRKEVLFWTISIQEHFTHRKGES

SEQ ID NO: 3960 - DNA, 2304 bp, Homo sapiens
attgcaagttcacctgccactaccgctgccgcgcgctcgtctgcctggactgttgcgggccccgggacctgggctgggaacccgcggtggagcgggacacgaacgtggtgagcgcggggccgagggcgtatgggaagggcgaggatgggcaggccacagtgcaggcattctcgagggctgcctgggtgccgcgcgcaaggagcgttctaattgccgatttcccggcggcacagagaggctaattctgcgcgggggctgggaggggagcctggattgccggctccgcaagtactccacccgctgcaagcggacccgggcccaggctgacccaggctccgcgcacgcgcacttcccgcaccttcccgccctcgcctccggccagaggccactcttgtgcgcttgcccggacgctggcacccgcccccgttccctgtggtaggtggggtctgtgagtggagctccggagcgatgaggtcattcctgggggcgaagcgtgcgtgtccccgccccggcgttcctgccccaatgagacaagagctagatcccggcgatctacgtttcagtcttaacggttgcggcgcggctctggcccgggcgcacgcgcacactgacacgcgtacacgcacgcacgcgaccggggcggtggttggcggctacggacgcgcaggactgggggacgggcgggtacggctatgggcgaggcggaggcgccttctttcgaaatgacctggagcagcacgacgagcagtggctactgcagccaagaggactcggactcggagctcgagcagtacttcaccgcgcgaacctcgctagctcgcaggccgcgccgggaccaggacgagcctgtggagtgggagacacctgacctttctcaagctgagattgagcagaagatcaaggagtacaatgcccagatcaacagcaacctcttcatgagcttgaacaaggacggttcttacacaggcttcatcaaggttcagctgaagctggtgcgccctgtctctgtgccctccagcaagaagccaccctccttgcaggatgcccggcggggcccaggacggggcacaagtgtcaggcgccgcacttccttttacctgcccaaggatgctgtcaagcacctgcatgtgctgtcacgcacaagggcacgtgaagtcattgaggccctgctgcgaaagttcttggtggtggatgacccccgcaagtttgcactctttgagcgcgctgagcgtcacggccaagtgtacttgcggaagctgttggatgatgagcagcccctgcggctgcggctcctggcagggcccagtgacaaggccctgagctttgtcctgaaggaaaatgactctggggaggtgaactgggacgccttcagcatgcctgaactacataacttcctacgtatcctgcagcgggaggaggaggagcacctccgccagatcctgcagaagtactcctattgccgccagaagatccaagaggccctgcacgcctgcccccttgggtgacctcttgtacccccaggtggaaggcagacagcaggcagcgccaagtgcgtgccgtgtgagtgtgacagggccagtggggcctgtggaatgagtgtgcatggaggccctcctgtgctgggggaatgagcccagagaacagcgaagtagcttgctccctgtgtccacctgtgggtgtagccaggtatggctctgcacccctctgccctcattactgggccttagtgggccagggctgccctgagaagctgctccaggcctgcagcaggagtggtgcagacagaagtctcctcaatttttgtctcagaagtgaaaatcttggagaccctgcaaacagaacagggtcatgtttgcaggggtgacggccctcatctatgaggaaaggttttggatcttgaatgtggtctcaggatatccttatcagagctaagggtgggtgctcagaataaggcaggcattgaggaagagtcttggtttctctctacagtgccaactcctcacacaccctgaggtcagggagtgctggctcacagtacagcatgtgccttaatgcttcatatgaggaggatgtccctgggccagggtctgtgtgaatgtgggcactggcccaggttcataccttatttgctaatcaaagccagggtctctccctcaggtgttttttatgaagtgcgtgaatgtatgtaatgtgtggtggcctcagctgaatgcctcctgtggggaaaggggttggggtgacagtcatcatcagggcctggggcctgagagaattggctcaataaagatttcaagatcctcctgc

SEQ ID NO: 3961 - protein, 270 aa, Homo sapiens; identical to SEQ ID NO: 401

SEQ ID NO: 3962 - DNA, 1665 bp, Homo sapiens
tccaactgttgagcaggcctctctgcctgtggccttccggccggtttccagacgcccaggtggccaacattagagtccgcgtagcagtgtgagattgcaagttcacctgccactaccgctgccgcgcgctcgtctgcctggactgttgcgggccccgggacctgggctgggaacccgcggtggagcgggacacgaacgtggacgagcctgtggagtgggagacacctgacctttctcaagctgagattgagcagaagatcaaggagtacaatgcccagatcaacagcaacctcttcatgagcttgaacaaggacggttcttacacaggcttcatcaaggttcagctgaagctggtgcgccctgtctctgtgccctccagcaagaagccaccctccttgcaggatgcccggcggggcccaggacggggcacaagtgtcaggcgccgcacttccttttacctgcccaaggatgctgtcaagcacctgcatgtgctgtcacgcacaagggcacgtgaagtcattgaggccctgctgcgaaagttcttggtggtggatgacccccgcaagtttgcactctttgagcgcgctgagcgtcacggccaagtgtacttgcggaagctgttggatgatgagcagcccctgcggctgcggctcctggcagggcccagtgacaaggccctgagctttgtcctgaaggaaaatgactctggggaggtgaactgggacgccttcagcatgcctgaactacataacttcctacgtatcctgcagcgggaggaggaggagcacctccgccagatcctgcagaagtactcctattgccgccagaagatccaagaggccctgcacgcctgcccccttgggtgacctcttgtacccccaggtggaaggcagacagcaggcagcgccaagtgcgtgccgtgtgagtgtgacagggccagtggggcctgtggaatgagtgtgcatggaggccctcctgtgctgggggaatgagcccagagaacagcgaagtagcttgctccctgtgtccacctgtgggtgtagccaggtatggctctgcacccctctgccctcattactgggccttagtgggccagggctgccctgagaagctgctccaggcctgcagcaggagtggtgcagacagaagtctcctcaatttttgtctcagaagtgaaaatcttggagaccctgcaaacagaacagggtcatgtttgcaggggtgacggccctcatctatgaggaaaggttttggatcttgaatgtggtctcaggatatccttatcagagctaagggtgggtgctcagaataaggcaggcattgaggaagagtcttggtttctctctacagtgccaactcctcacacaccctgaggtcagggagtgctggctcacagtacagcatgtgccttaatgcttcatatgaggaggatgtccctgggccagggtctgtgtgaatgtgggcactggcccaggttcataccttatttgctaatcaaagccagggtctctccctcaggtgttttttatgaagtgcgtgaatgtatgtaatgtgtggtggcctcagctgaatgcctcctgtggggaaaggggttggggtgacagtcatcatcagggcctggggcctgagagaattggctcaataaagatttcaagatcctcctgc

SEQ ID NO: 3963 - protein, 189 aa, Homo sapiens; identical to SEQ ID NO: 399

SEQ ID NO: 3964 - DNA, 1853 bp, Homo sapiens
gcgcggctctcctcagctccttcccgccgcccagtctggatcctgggggaggcgctgaagtcggggcccgccctgtggccccgcccggcccgcgcttgctagcgcccaaagccagcgaagcacgggcccaaccgggccatgtcgggggagcctgagctcattgagctgcgggagctggcacccgctgggcgcgctgggaagggccgcacccggctggagcgtgccaacgcgctgcgcatcgcgcggggcaccgcgtgcaaccccacacggcagctggtccctggccgtggccaccgcttccagcccgcggggcccgccacgcacacgtggtgcgacctctgtggcgacttcatctggggcgtcgtgcgcaaaggcctgcagtgcgcgcgacgagcctgtggagtgggagacacctgacctttctcaagctgagattgagcagaagatcaaggagtacaatgcccagatcaacagcaacctcttcatgagcttgaacaaggacggttcttacacaggcttcatcaaggttcagctgaagctggtgcgccctgtctctgtgccctccagcaagaagccaccctccttgcaggatgcccggcggggcccaggacggggcacaagtgtcaggcgccgcacttccttttacctgcccaaggatgctgtcaagcacctgcatgtgctgtcacgcacaagggcacgtgaagtcattgaggccctgctgcgaaagttcttggtggtggatgacccccgcaagtttgcactctttgagcgcgctgagcgtcacggccaagtgtacttgcggaagctgttggatgatgagcagcccctgcggctgcggctcctggcagggcccagtgacaaggccctgagctttgtcctgaaggaaaatgactctggggaggtgaactgggacgccttcagcatgcctgaactacataacttcctacgtatcctgcagcgggaggaggaggagcacctccgccagatcctgcagaagtactcctattgccgccagaagatccaagaggccctgcacgcctgcccccttgggtgacctcttgtacccccaggtggaaggcagacagcaggcagcgccaagtgcgtgccgtgtgagtgtgacagggccagtggggcctgtggaatgagtgtgcatggaggccctcctgtgctgggggaatgagcccagagaacagcgaagtagcttgctccctgtgtccacctgtgggtgtagccaggtatggctctgcacccctctgccctcattactgggccttagtgggccagggctgccctgagaagctgctccaggcctgcagcaggagtggtgcagacagaagtctcctcaatttttgtctcagaagtgaaaatcttggagaccctgcaaacagaacagggtcatgtttgcaggggtgacggccctcatctatgaggaaaggttttggatcttgaatgtggtctcaggatatccttatcagagctaagggtgggtgctcagaataaggcaggcattgaggaagagtcttggtttctctctacagtgccaactcctcacacaccctgaggtcagggagtgctggctcacagtacagcatgtgccttaatgcttcatatgaggaggatgtccctgggccagggtctgtgtgaatgtgggcactggcccaggttcataccttatttgctaatcaaagccagggtctctccctcaggtgttttttatgaagtgcgtgaatgtatgtaatgtgtggtggcctcagctgaatgcctcctgtggggaaaggggttggggtgacagtcatcatcagggcctggggcctgagagaattggctcaataaagatttcaagatcctcctgc

SEQ ID NO: 3965 - protein, 189 aa, Homo sapiens; identical to SEQ ID NO: 399

SEQ ID NO: 3966 - DNA, 1748 bp, Homo sapiens
gcgcggctctcctcagctccttcccgccgcccagtctggatcctgggggaggcgctgaagtcggggcccgccctgtggccccgcccggcccgcgcttgctagcgcccaaagccagcgaagcacgggcccaaccgggccatgtcgggggagcctgagctcattgagctgcgggagctggcacccgctgggcgcgctgggaagggccgcacccggctggagcgtgccaacgcgctgcgcatcgcgcggggcaccgcgtgcaaccccacacggcagctggtccctggccgtggccaccgcttccagcccgcggggcccgccacgcacacgtggtgcgacctctgtggcgacttcatctggggcgtcgtgcgcaaaggcctgcagtgcgcgcaacaaggacggttcttacacaggcttcatcaaggttcagctgaagctggtgcgccctgtctctgtgccctccagcaagaagccaccctccttgcaggatgcccggcggggcccaggacggggcacaagtgtcaggcgccgcacttccttttacctgcccaaggatgctgtcaagcacctgcatgtgctgtcacgcacaagggcacgtgaagtcattgaggccctgctgcgaaagttcttggtggtggatgacccccgcaagtttgcactctttgagcgcgctgagcgtcacggccaagtgtacttgcggaagctgttggatgatgagcagcccctgcggctgcggctcctggcagggcccagtgacaaggccctgagctttgtcctgaaggaaaatgactctggggaggtgaactgggacgccttcagcatgcctgaactacataacttcctacgtatcctgcagcgggaggaggaggagcacctccgccagatcctgcagaagtactcctattgccgccagaagatccaagaggccctgcacgcctgcccccttgggtgacctcttgtacccccaggtggaaggcagacagcaggcagcgccaagtgcgtgccgtgtgagtgtgacagggccagtggggcctgtggaatgagtgtgcatggaggccctcctgtgctgggggaatgagcccagagaacagcgaagtagcttgctccctgtgtccacctgtgggtgtagccaggtatggctctgcacccctctgccctcattactgggccttagtgggccagggctgccctgagaagctgctccaggcctgcagcaggagtggtgcagacagaagtctcctcaatttttgtctcagaagtgaaaatcttggagaccctgcaaacagaacagggtcatgtttgcaggggtgacggccctcatctatgaggaaaggttttggatcttgaatgtggtctcaggatatccttatcagagctaagggtgggtgctcagaataaggcaggcattgaggaagagtcttggtttctctctacagtgccaactcctcacacaccctgaggtcagggagtgctggctcacagtacagcatgtgccttaatgcttcatatgaggaggatgtccctgggccagggtctgtgtgaatgtgggcactggcccaggttcataccttatttgctaatcaaagccagggtctctccctcaggtgttttttatgaagtgcgtgaatgtatgtaatgtgtggtggcctcagctgaatgcctcctgtggggaaaggggttggggtgacagtcatcatcagggcctggggcctgagagaattggctcaataaagatttcaagatcctcctgc

SEQ ID NO: 3967 - protein, 152 aa, Homo sapiens
MSGEPELIELRELAPAGRAGKGRTRLERANALRIARGTACNPTRQLVPGRGHRFQPAGPATHTWCDLCGDFIWGVVRKGLQCAQQGRFLHRLHQGSAEAGAPCLCALQQEATLLAGCPAGPRTGHKCQAPHFLLPAQGCCQAPACAVTHKGT

SEQ ID NO: 3968 - DNA, 1960 bp, Homo sapiens
gcgcggctctcctcagctccttcccgccgcccagtctggatcctgggggaggcgctgaagtcggggcccgccctgtggccccgcccggcccgcgcttgctagcgcccaaagccagcgaagcacgggcccaaccgggccatgtcgggggagcctgagctcattgagctgcgggagctggcacccgctgggcgcgctgggaagggccgcacccggctggagcgtgccaacgcgctgcgcatcgcgcggggcaccgcgtgcaaccccacacggcagctggtccctggccgtggccaccgcttccagcccgcggggcccgccacgcacacgtggtgcgacctctgtggcgacttcatctggggcgtcgtgcgcaaaggcctgcagtgcgcgcattgcaagttcacctgccactaccgctgccgcgcgctcgtctgcctggactgttgcgggccccgggacctgggctgggaacccgcggtggagcgggacacgaacgtggacgagcctgtggagtgggagacacctgacctttctcaagctgagattgagcagaagatcaaggagtacaatgcccagatcaacagcaacctcttcatgagcttgaacaaggacggttcttacacaggcttcatcaaggttcagctgaagctggtgcgccctgtctctgtgccctccagcaagaagccaccctccttgcaggatgcccggcggggcccaggacggggcacaagtgtcaggcgccgcacttccttttacctgcccaaggatgctgtcaagcacctgcatgtgctgtcacgcacaagggcacgtgaagtcattgaggccctgctgcgaaagttcttggtggtggatgacccccgcaagtttgcactctttgagcgcgctgagcgtcacggccaagtgtacttgcggaagctgttggatgatgagcagcccctgcggctgcggctcctggcagggcccagtgacaaggccctgagctttgtcctgaaggaaaatgactctggggaggtgaactgggacgccttcagcatgcctgaactacataacttcctacgtatcctgcagcgggaggaggaggagcacctccgccagatcctgcagaagtactcctattgccgccagaagatccaagaggccctgcacgcctgcccccttgggtgacctcttgtacccccaggtggaaggcagacagcaggcagcgccaagtgcgtgccgtgtgagtgtgacagggccagtggggcctgtggaatgagtgtgcatggaggccctcctgtgctgggggaatgagcccagagaacagcgaagtagcttgctccctgtgtccacctgtgggtgtagccaggtatggctctgcacccctctgccctcattactgggccttagtgggccagggctgccctgagaagctgctccaggcctgcagcaggagtggtgcagacagaagtctcctcaatttttgtctcagaagtgaaaatcttggagaccctgcaaacagaacagggtcatgtttgcaggggtgacggccctcatctatgaggaaaggttttggatcttgaatgtggtctcaggatatccttatcagagctaagggtgggtgctcagaataaggcaggcattgaggaagagtcttggtttctctctacagtgccaactcctcacacaccctgaggtcagggagtgctggctcacagtacagcatgtgccttaatgcttcatatgaggaggatgtccctgggccagggtctgtgtgaatgtgggcactggcccaggttcataccttatttgctaatcaaagccagggtctctccctcaggtgttttttatgaagtgcgtgaatgtatgtaatgtgtggtggcctcagctgaatgcctcctgtggggaaaggggttggggtgacagtcatcatcagggcctggggcctgagagaattggctcaataaagatttcaagatcctcctgc

SEQ ID NO: 3969 - protein, 340 aa, Homo sapiens; identical to SEQ ID NO: 397

SEQ ID NO: 3970 - DNA, 2832 bp, Homo sapiens
aattgccaatgaggaaaggggaagttctgtgctaggcgatagagatccaactgttgagcaggcctctctgcctgtggccttccggccggtttccagacgcccaggtggccaacattagagtccgcgtagcagtgtgagattgcaagttcacctgccactaccgctgccgcgcgctcgtctgcctggactgttgcgggccccgggacctgggctgggaacccgcggtggagcgggacacgaacgtggtgagcgcggggccgagggcgtatgggaagggcgaggatgggcaggccacagtgcaggcattctcgagggctgcctgggtgccgcgcgcaaggagcgttctaattgccgatttcccggcggcacagagaggctaattctgcgcgggggctgggaggggagcctggattgccggctccgcaagtactccacccgctgcaagcggacccgggcccaggctgacccaggctccgcgcacgcgcacttcccgcaccttcccgccctcgcctccggccagaggccactcttgtgcgcttgcccggacgctggcacccgcccccgttccctgtggtaggtggggtctgtgagtggagctccggagcgatgaggtcattcctgggggcgaagcgtgcgtgtccccgccccggcgttcctgccccaatgagacaagagctagatcccggcgatctacgtttcagtcttaacggttgcggcgcggctctggcccgggcgcacgcgcacactgacacgcgtacacgcacgcacgcgaccggggcggtggttggcggctacggacgcgcaggactgggggacgggcgggtacggctatgggcgaggcggaggcgccttctttcgaaatgacctggagcagcacgacgagcagtggctactgcagccaagaggactcggactcggagctcgagcagtacttcaccgcgcgaacctcgctagctcgcaggccgcgccgggaccaggtgggagccagggggtgccggcgggcgggaggggaagcggtcgctggagctccgccctccccggtccgttgccgcgtcctgggtcggtgggcagccccaccctcctggctacgtggctccccgcgggtcctggccggggacctgcccgcggaaccgtgcgtaagaccccgattccaccgcctagatgctgggtgccggggcccccttggtttctgtcacagacaggttgaacacggaaaaagcagctgtatggcttgtggtagacctgagccgggcattatccagctatgactaaagccgaccgagcagtttggactagcacctcgatttccgcgttcgaatgctcctgctccctccttggggagactaggggaggatgtggagagggaagagtcctcgccaggaattgagaagtatgtttaggaaaacttgagaggcagagagagatcctgctcctccatctgcactcctgtatggagccagctgagccctcacctcttccctgttctggcctgtcaccagctgctggaatgtggaagattctgttcccttcctctagggtggatctggagaaagatttgggaatagataggaaagaagtcttgttttggaccataagcattcaggagcactttacccacaggaagggggaaagctagattataaaatgcctaaagaggtggaaaaagagatccaggttactaacccaggactgtaaggtgtctcggaacctcctaggtatccccattatcggagaactgtgtgccagatgccattggtgtgaccaccaggctcagagaaccaggcctaggcaccaggaaaaagaaacagggactgtgaagctcagtatgcctggcagaaatggggcggaaatccttatttaagtaaagaaagtggagttgtgagtgatgcttcagataaaattttacaaaattccttacaaaatgggtggtgctcagcacgccaaaatcttagcccagagcttgggtgcaagggttgagttgagtgtagacccctgggcttgtcttcatgtcagtcagtcctgagccattttccactgtggaaaggtgggaaaaccacaagacactaaccaattgaaaaggagggctagccacggaggtgcacacctgtaatcccagctacttgggagggtgaggcagaaggatcacttgaacctgggaggcagaggttgcagtgagccaagatcgtgccactgcactccagcctgagtgacagagtgagactctgtctcaaaaatagaaaaggaagccaagtacggtggctcacacctctaatgccaatgctttgggaggccaaggcaggtggatcatttgcaatcaggaattcgaggtcagcctggccaacatggtgaaaccctatctctactaaacatacaaaaattagccgggcatggtggtgtgtgactgtagtcccagctacttgggagactgaatcacttcaaccgggaggcaaaggttgcagtgagccaagatcgtgccactgcactccaacctgggtgacagggtgaggctctgtctcaaaaaaaagaaagaaggctgggcttggtgactcatgcctgtaatctcagcattttgggaggccaaggcaggcagatcacttgaggccaagagttcgagacctgccaggccaacatagcaaaaccccgtctgtactgaaaatacaaaaaaattatctggccatggtggtgtgtgcctgtaatcccagctactggggaggctgaggcaggagtatcacttgaacccagaagacagaggttgcagtgagtcgagactgggccactgcattccagcctggatgagagagcaagactctgtctcaaaaaaaaaaaaaaaaa

SEQ ID NO: 3971 - protein, 145 aa, Homo sapiens [sequence omitted]

SEQ ID NO: 3972 - DNA, 3089 bp, Homo sapiens
ttccattgcgcggctctcctcagctccttcccgccgcccagtctggatcctgggggaggcgctgaagtcggggcccgccctgtggccccgcccggcccgcgcttgctagcgcccaaagccagcgaagcacgggcccaaccgggccatgtcgggggagcctgagctcattgagctgcgggagctggcacccgctgggcgcgctgggaagggccgcacccggctggagcgtgccaacgcgctgcgcatcgcgcggggcaccgcgtgcaaccccacacggcagctggtccctggccgtggccaccgcttccagcccgcggggcccgccacgcacacgtggtgcgacctctgtggcgacttcatctggggcgtcgtgcgcaaaggcctgcagtgcgcgcattgcaagttcacctgccactaccgctgccgcgcgctcgtctgcctggactgttgcgggccccgggacctgggctgggaacccgcggtggagcgggacacgaacgtggtgagcgcggggccgagggcgtatgggaagggcgaggatgggcaggccacagtgcaggcattctcgagggctgcctgggtgccgcgcgcaaggagcgttctaattgccgatttcccggcggcacagagaggctaattctgcgcgggggctgggaggggagcctggattgccggctccgcaagtactccacccgctgcaagcggacccgggcccaggctgacccaggctccgcgcacgcgcacttcccgcaccttcccgccctcgcctccggccagaggccactcttgtgcgcttgcccggacgctggcacccgcccccgttccctgtggtaggtggggtctgtgagtggagctccggagcgatgaggtcattcctgggggcgaagcgtgcgtgtccccgccccggcgttcctgccccaatgagacaagagctagatcccggcgatctacgtttcagtcttaacggttgcggcgcggctctggcccgggcgcacgcgcacactgacacgcgtacacgcacgcacgcgaccggggcggtggttggcggctacggacgcgcaggactgggggacgggcgggtacggctatgggcgaggcggaggcgccttctttcgaaatgacctggagcagcacgacgagcagtggctactgcagccaagaggactcggactcggagctcgagcagtacttcaccgcgcgaacctcgctagctcgcaggccgcgccgggaccaggtgggagccagggggtgccggcgggcgggaggggaagcggtcgctggagctccgccctccccggtccgttgccgcgtcctgggtcggtgggcagccccaccctcctggctacgtggctccccgcgggtcctggccggggacctgcccgcggaaccgtgcgtaagaccccgattccaccgcctagatgctgggtgccggggcccccttggtttctgtcacagacaggttgaacacggaaaaagcagctgtatggcttgtggtagacctgagccgggcattatccagctatgactaaagccgaccgagcagtttggactagcacctcgatttccgcgttcgaatgctcctgctccctccttggggagactaggggaggatgtggagagggaagagtcctcgccaggaattgagaagtatgtttaggaaaacttgagaggcagagagagatcctgctcctccatctgcactcctgtatggagccagctgagccctcacctcttccctgttctggcctgtcaccagctgctggaatgtggaagattctgttcccttcctctagggtggatctggagaaagatttgggaatagataggaaagaagtcttgttttggaccataagcattcaggagcactttacccacaggaagggggaaagctagattataaaatgcctaaagaggtggaaaaagagatccaggttactaacccaggactgtaaggtgtctcggaacctcctaggtatccccattatcggagaactgtgtgccagatgccattggtgtgaccaccaggctcagagaaccaggcctaggcaccaggaaaaagaaacagggactgtgaagctcagtatgcctggcagaaatggggcggaaatccttatttaagtaaagaaagtggagttgtgagtgatgcttcagataaaattttacaaaattccttacaaaatgggtggtgctcagcacgccaaaatcttagcccagagcttgggtgcaagggttgagttgagtgtagacccctgggcttgtcttcatgtcagtcagtcctgagccattttccactgtggaaaggtgggaaaaccacaagacactaaccaattgaaaaggagggctagccacggaggtgcacacctgtaatcccagctacttgggagggtgaggcagaaggatcacttgaacctgggaggcagaggttgcagtgagccaagatcgtgccactgcactccagcctgagtgacagagtgagactctgtctcaaaaatagaaaaggaagccaagtacggtggctcacacctctaatgccaatgctttgggaggccaaggcaggtggatcatttgcaatcaggaattcgaggtcagcctggccaacatggtgaaaccctatctctactaaacatacaaaaattagccgggcatggtggtgtgtgactgtagtcccagctacttgggagactgaatcacttcaaccgggaggcaaaggttgcagtgagccaagatcgtgccactgcactccaacctgggtgacagggtgaggctctgtctcaaaaaaaagaaagaaggctgggcttggtgactcatgcctgtaatctcagcattttgggaggccaaggcaggcagatcacttgaggccaagagttcgagacctgccaggccaacatagcaaaaccccgtctgtactgaaaatacaaaaaaattatctggccatggtggtgtgtgcctgtaatcccagctactggggaggctgaggcaggagtatcacttgaacccagaagacagaggttgcagtgagtcgagactgggccactgcattccagcctggatgagagagcaagactctgtctcaaaaaaaaaaaaaaaaa

SEQ ID NO: 3973 - protein, 163 aa, Homo sapiens [sequence omitted]

SEQ ID NO: 3974 - DNA, 581 bp, Homo sapiens
ataaggaggaggaagagcagcgggtaggtcaagatgccacagccgcaggaggggctgttggggtcggggttacccccatccctgtgcaggcggacttggcgtctgaggacagagtccagaccacaaggatctggagctcaggagagactcgtgggccacagcccgagaaagcgctgggaatccaaatactatggcgattggcagtcgcgtaggcgaggcgggctagagacccgcccggatttaggcgcgagccacctccaggggcggggcccaggccgcactgcgcaggcgcggctaacccgtttccatggctgcgagaactgacgctccccaaccgtcccgcaactgtcctgtcccagactttggcaccgtcggggtccgtcgtccccgaatgtgacagcatccccaccccggctgctgcccaggatccgccggaccccggcctcgatatgggagacttcctgccccacccagtgggtaggccaagtgtgttgcttcagcaaaccggaccaggagggccagggccggatgtggggaccctcttcctctagcacagtaaagctggcctccagaaacacggg

SEQ ID NO: 3975 - protein, 33 aa, Homo sapiens
MGDFLPHPVGRPSVLLQQTGPGGPGPDVGTLFL

SEQ ID NO: 3976 - DNA, 2900 bp, Homo sapiens
aaaaagatgtgatcaagagtgagttgggttggaggcagggactgctctggattaaatggccaagaaaggccatgctgaggtgtaaactgagccctgaaggaaaagtattccaggcaaagtgcaaaactctgaggcaaaaacctctttggaatgtatgagggaggttcagggaagcaaggaggagaggaaagaatccaagtcccgaggtacaggagaggacaagaagtagatcttgcagagctgctagtaagcggcatcccacctaacattttgagggccagaagtagccacagagcccctctcacgcaagggagtaatgtctatatgctttttttttttttttgagacggtctccctttgttgtccaggctggagtgcggtggtgcaatcttgcctcactgcaaactccacctcctgtgctcaagcgattctcctgcctcagtctcccatgtagctgggactacaggtgtgtgctaccacacctgtctaatttttgtacttttagtagagacagggtttcaccatgttgcccaggctggtctcaaactcctgacctcaagtgatccgcctgcctcggcctcccaaagtgctgagattacaggtgtcagccaccgcgcccggcctgatatacacttttaaggctccgggctgtccatgaggatcaagcgtggaagtaggtctacagaaaaggctgccgcagttcacccatgacaggtgatgacagtctggacatagggaggatggagagaagtcgtgcgccctggcagtatttcaggagccaactagtggagccgggacgcgagaaatagaggaaccaagaagccataaggaggaggaagagcagcgggtaggtcaagatgccacagccgcaggaggggctgttggggtcggggttacccccatccctgtgcaggcggacttggcgtctgaggacagagtccagaccacaaggatctggagctcaggagagactcgtgggccacagcccgagaaagcgctgggaatccaaatactatggcgattggcagtcgcgtaggcgaggcgggctagagacccgcccggatttaggcgcgagccacctccaggggcggggcccaggccgcactgcgcaggcgcggctaacccgtttccatggctgcgagaactgacgctccccaaccgtcccgcaactgtcctgtcccagactttggcaccgtcggggtccgtcgtccccgaatgtgacagcatccccaccccggctgctgcccaggatccgccggaccccggcctcgatatgggagacctggaactgctgctgcccggggaagctgaagtgctggtgcggggtctgcgcagcttcccgctacgcgagatgggctccgaagggtggaaccagcagcatgagaacctggagaagctgaacatgcaagccatcctcgatgccacagtcagccagggcgagcccattcaggagctgctggtcacccatgggaaggtcccaacactggtggaggagctgatcgcagtggagatgtggaagcagaaggtgttccctgtgttctgcagggtggaggacttcaagccccagaacaccttccccatctacatggtggtgcaccacgaggcctccatcatcaacctcttggagacagtgttcttccacaaggaggtgtgtgagtcagcagaagacactgtcttggacttggtagactattgccaccgcaaactgaccctgctggtggcccagagtggctgtggtggcccccctgagggggagggatcccaggacagcaaccccatgcaggagctgcagaagcaggcagagctgatggaatttgagattgcactgaaggccctctcagtactacgctacatcacagactgtgtggacagcctctctctcagcaccttgagccgtatgcttagcacacacaacctgccctgcctcctggtggaactgctggagcatagtccctggagccggcgggaaggaggcaagctgcagcagttcgagggcagccgttggcatactgtggccccctcagagcagcaaaagctgagcaagttggacgggcaagtgtggatcgccctgtacaacctgctgctaagccctgaggctcaggcgcgctactgcctcacaagttttgccaagggacggctactcaagcttcgggccttcctcacagacacactgctggaccagctgcccaacctggcccacttgcagagtttcctggcccatctgaccctaactgaaacccagcctcctaagaaggacctggtgttggaacagatcccagaaatctgggagcggctggagcgagaaaacagaggcaagtggcaggcaattgccaagcaccagctccagcatgtgttcagcccctcagagcaggacctgcggctgcaggcgcgaaggtgggctgagacctacaggctggatgtgctagaggcagtggctccagagcggccccgctgtgcttactgcagtgcagaggcttctaagcgctgctcacgatgccagaatgagtggtattgctgcagggagtgccaagtcaagcactgggaaaagcatggaaagacttgtgtcctggcagcccagggtgacagagccaaatgagggctgcagttgctgagggccgaccacccatgccaagggaatccacccagaatgcacccctgaacctcaagatcacggtccagcctctgccggagccccagtctccgcagtggagagcagagcgggcggtaaagctgctgaccgatctccctcctcctcaccccaagtgaaggctcgagacttcctgccccacccagtgggtaggccaagtgtgttgcttcagcaaaccggaccaggagggccagggccggatgtggggaccctcttcctctagcacagtaaagctggcctccagaaacacggg

SEQ ID NO: 3977 - protein, 440 aa, Homo sapiens; identical to SEQ ID NO: 405

SEQ ID NO: 3978 - DNA, 1778 bp, Homo sapiens
tgcactgaaggccctctcagtactacgctacatcacagactgtgtggacaggtgagcagtccgactgggcctgggcctactgtggagggctggaagaccgggcctgtagcctgcctctactcacctccttcacaacgtccctgcccctagcctctctctcagcaccttgagccgtatgcttagcacacacaacctgccctgcctcctggtggaactgctggagcatagtccctggagccggcgggaaggaggtagggtcctcccccaccagcctaagccccaggctactgcttcagggtatctttttgatagaggggggcagcttgcacacacgaagacaaaccctgtccccaagcccactgaggataccaggatgcctcagccaaggttggcctagacctgagctctgcagcaggccaggcccatgtgtccactactgaggctcaccctgctctggggtcagcagccctatagcctgggcaagtcctgcagcccaggttctcccattcccaggcagtggtcagtctcccagcccccacagctggctcacttgaagagaattcaacgtctgcacccagtgtgctggttcctctccccaggcaagctgcagcagttcgagggcagccgttggcatactgtggccccctcagagcagcaaaagctgagcaagttggacgggcaagtgtggatcgccctgtacaacctgctgctaagccctgaggctcaggcgcgctactgcctcacaagttttgccaagggacggctactcaaggtcagactccctccgcaccagcccccacagccccagtaccgccctccccatcctaccccgactgcgtccctgctgtttatctttgcccacccacctcaaccccagtgctcttttcagtccttgggcctcaggtgacacaccagctagtgggacatgggcccccacaggcattctcagcccaacccagccccttccttttccttggccccctggccagcacctgcatcacactggcctccactggacacccttgcagcttcgggccttcctcacagacacactgctggaccagctgcccaacctggcccacttgcagagtttcctggcccatctgaccctaactgaaacccagcctcctaagaaggacctggtgttggaacagatcccagaaatctgggagcggctggagcgagaaaacagaggcaagtggcaggcaattgccaagcaccagctccagcatgtgttcagcccctcagagcaggacctgcggctgcaggcgcgaaggtgggctgagacctacaggctggatgtgctagaggcagtggctccagagcggccccgctgtgcttactgcagtgcagaggcttctaagcgctgctcacgatgccagaatgagtggtattgctgcagggagtgccaagtcaagcactgggaaaagcatggaaagacttgtgtcctggcagcccagggtgacagagccaaatgagggctgcagttgctgagggccgaccacccatgccaagggaatccacccagaatgcacccctgaacctcaagatcacggtccagcctctgccggagccccagtctccgcagtggagagcagagcgggcggtaaagctgctgaccgatctccctcctcctcaccccaagtgaaggctcgagacttcctgccccacccagtgggtaggccaagtgtgttgcttcagcaaaccggaccaggagggccagggccggatgtggggaccctcttcctctagcacagtaaagctggcctccagaaaca

SEQ ID NO: 3979 - protein, 36 aa, Homo sapiens
MSGIAAGSAKSSTGKSMERLVSWQPRVTEPNEGCSC

SEQ ID NO: 3980 - DNA, 2057 bp, Homo sapiens
ataaggaggaggaagagcagcgggtaggtcaagatgccacagccgcaggaggggctgttggggtcggggttacccccatccctgtgcaggcggacttggcgtctgaggacagagtccagaccacaaggatctggagctcaggagagactcgtgggccacagcccgagaaagcgctgggaatccaaatactatggcgattggcagtcgcgtaggcgaggcgggctagagacccgcccggatttaggcgcgagccacctccaggggcggggcccaggccgcactgcgcaggcgcggctaacccgtttccatggctgcgagaactgacgctccccaaccgtcccgcaactgtcctgtcccagactttggcaccgtcggggtccgtcgtccccgaatgtgacagcatccccaccccggctgctgcccaggatccgccggaccccggcctcgatatgggagacctggaactgctgctgcccggggaagctgaagtgctggtgcggggtctgcgcagcttcccgctacgcgagatgggctccgaagggtggaaccagcagcatgagaacctggagaagctgaacatgcaagccatcctcgatgccacagtcagccagggcgagcccattcaggagctgctggtcacccatgggaaggtcccaacactggtggaggagctgatcgcagtggagatgtggaagcagaaggtgttccctgtgttctgcagggtggaggacttcaagccccagaacaccttccccatctacatggtggtgcaccacgaggcctccatcatcaacctcttggagacagtgttcttccacaaggaggtgtgtgagtcagcagaagacactgtcttggacttggtagactattgccaccgcaaactgaccctgctggtggcccagagtggctgtggtggcccccctgagggggagggatcccaggacagcaaccccatgcaggagctgcagaagcaggcagagctgatggaatttgagattgcactgaaggccctctcagtactacgctacatcacagactgtgtggacaggcagtggtcagtctcccagcccccacagctggctcacttgaagagaattcaacgtctgcacccagtgtgctggttcctctccccaggcaagctgcagcagttcgagggcagccgttggcatactgtggccccctcagagcagcaaaagctgagcaagttggacgggcaagtgtggatcgccctgtacaacctgctgctaagccctgaggctcaggcgcgctactgcctcacaagttttgccaagggacggctactcaagcttcgggccttcctcacagacacactgctggaccagctgcccaacctggcccacttgcagagtttcctggcccatctgaccctaactgaaacccagcctcctaagaaggacctggtgttggaacagatcccagaaatctgggagcggctggagcgagaaaacagaggcaagtggcaggcaattgccaagcaccagctccagcatgtgttcagcccctcagagcaggacctgcggctgcaggcgcgaaggtgggctgagacctacaggctggatgtgctagaggcagtggctccagagcggccccgctgtgcttactgcagtgcagaggcttctaagcgctgctcacgatgccagaatgagtggtattgctgcagggagtgccaagtcaagcactgggaaaagcatggaaagacttgtgtcctggcagcccagggtgacagagccaaatgagggctgcagttgctgagggccgaccacccatgccaagggaatccacccagaatgcacccctgaacctcaagatcacggtccagcctctgccggagccccagtctccgcagtggagagcagagcgggcggtaaagctgctgaccgatctccctcctcctcaccccaagtgaaggctcgagacttcctgccccacccagtgggtaggccaagtgtgttgcttcagcaaaccggaccaggagggccagggccggatgtggggaccctcttcctctagcacagtaaagctggcctccagaaaca

SEQ ID NO: 3981 - protein, 435 aa, Homo sapiens
MGDLELLLPGEAEVLVRGLRSFPLREMGSEGWNQQHENLEKLNMQAILDATVSQGEPIQELLVTHGKVPTLVEELIAVEMWKQKVFPVFCRVEDFKPQNTFPIYMVVHHEASIINLLETVFFHKEVCESAEDTVLDLVDYCHRKLTLLVAQSGCGGPPEGEGSQDSNPMQELQKQAELMEFEIALKALSVLRYITDCVDRQWSVSQPPQLAHLKRIQRLHPVCWFLSPGKLQQFEGSRWHTVAPSEQQKLSKLDGQVWIALYNLLLSPEAQARYCLTSFAKGRLLKLRAFLTDTLLDQLPNLAHLQSFLAHLTLTETQPPKKDLVLEQIPEIWERLERENRGKWQAIAKHQLQHVFSPSEQDLRLQARRWAETYRLDVLEAVAPERPRCAYCSAEASKRCSRCQNEWYCCRECQVKHWEKHGKTCVLAAQGDRAK

SEQ ID NO: 3982 - DNA, 1963 bp, Homo sapiens
ataaggaggaggaagagcagcgggtaggtcaagatgccacagccgcaggaggggctgttggggtcggggttacccccatccctgtgcaggcggacttggcgtctgaggacagagtccagaccacaaggatctggagctcaggagagactcgtgggccacagcccgagaaagcgctgggaatccaaatactatggcgattggcagtcgcgtaggcgaggcgggctagagacccgcccggatttaggcgcgagccacctccaggggcggggcccaggccgcactgcgcaggcgcggctaacccgtttccatggctgcgagaactgacgctccccaaccgtcccgcaactgtcctgtcccagactttggcaccgtcggggtccgtcgtccccgaatgtgacagcatccccaccccggctgctgcccaggatccgccggaccccggcctcgatatgggagacctggaactgctgctgcccggggaagctgaagtgctggtgcggggtctgcgcagcttcccgctacgcgagatgggctccgaagggtcccaacactggtggaggagctgatcgcagtggagatgtggaagcagaaggtgttccctgtgttctgcagggtggaggacttcaagccccagaacaccttccccatctacatggtggtgcaccacgaggcctccatcatcaacctcttggagacagtgttcttccacaaggaggtgtgtgagtcagcagaagacactgtcttggacttggtagactattgccaccgcaaactgaccctgctggtggcccagagtggctgtggtggcccccctgagggggagggatcccaggacagcaaccccatgcaggagctgcagaagcaggcagagctgatggaatttgagattgcactgaaggccctctcagtactacgctacatcacagactgtgtggacagcctctctctcagcaccttgagccgtatgcttagcacacacaacctgccctgcctcctggtggaactgctggagcatagtccctggagccggcgggaaggaggcaagctgcagcagttcgagggcagccgttggcatactgtggccccctcagagcagcaaaagctgagcaagttggacgggcaagtgtggatcgccctgtacaacctgctgctaagccctgaggctcaggcgcgctactgcctcacaagttttgccaagggacggctactcaagcttcgggccttcctcacagacacactgctggaccagctgcccaacctggcccacttgcagagtttcctggcccatctgaccctaactgaaacccagcctcctaagaaggacctggtgttggaacagatcccagaaatctgggagcggctggagcgagaaaacagaggcaagtggcaggcaattgccaagcaccagctccagcatgtgttcagcccctcagagcaggacctgcggctgcaggcgcgaaggtgggctgagacctacaggctggatgtgctagaggcagtggctccagagcggccccgctgtgcttactgcagtgcagaggcttctaagcgctgctcacgatgccagaatgagtggtattgctgcagggagtgccaagtcaagcactgggaaaagcatggaaagacttgtgtcctggcagcccagggtgacagagccaaatgagggctgcagttgctgagggccgaccacccatgccaagggaatccacccagaatgcacccctgaacctcaagatcacggtccagcctctgccggagccccagtctccgcagtggagagcagagcgggcggtaaagctgctgaccgatctccctcctcctcaccccaagtgaaggctcgagacttcctgccccacccagtgggtaggccaagtgtgttgcttcagcaaaccggaccaggagggccagggccggatgtggggaccctcttcctctagcacagtaaagctggcctccagaaaca

SEQ ID NO: 3983 - protein, 361 aa, Homo sapiens
MWKQKVFPVFCRVEDFKPQNTFPIYMVVHHEASIINLLETVFFHKEVCESAEDTVLDLVDYCHRKLTLLVAQSGCGGPPEGEGSQDSNPMQELQKQAELMEFEIALKALSVLRYITDCVDSLSLSTLSRMLSTHNLPCLLVELLEHSPWSRREGGKLQQFEGSRWHTVAPSEQQKLSKLDGQVWIALYNLLLSPEAQARYCLTSFAKGRLLKLRAFLTDTLLDQLPNLAHLQSFLAHLTLTETQPPKKDLVLEQIPEIWERLERENRGKWQAIAKHQLQHVFSPSEQDLRLQARRWAETYRLDVLEAVAPERPRCAYCSAEASKRCSRCQNEWYCCRECQVKHWEKHGKTCVLAAQGDRAK

SEQ ID NO: 3984 - DNA, 596 bp, Homo sapiens
ggtaatgaaggtccaaggtgcaagagagaagtcaggaaggatactcatgggtctggaatagtttaggggcccagcagtgtttggggatatcagggttgagctgagccggggatgggagggttgccaggcaaaggtaggcccatctcatccctgtcctttaccctacccttcaaaggtcccaacactggtggaggagctgatcgcagtggagatgtggaagcagaaggtgttccctgtgttctgcagggtggaggacttcaagccccagaacaccttccccatctacatggtggtgcaccacgaggcctccatcatcaacctcttggagacagtgttcttccacaaggaggtgtgtgagtcagcagaagacactgtcttggacttggtagactattgccaccgcaaactgaccctgctggtggcccagagtggctgtggtggcccccctgagggggagggatcccaggacagcaaccccatgcaggtgggttgaggttacctagggttgtgaaagcctaggtctgggttccccaaggcctgcgcaggtgagggtggcccagcgtgaacactgtgtgacctcccaggagctgcagaag

SEQ ID NO: 3985 - protein, 93 aa, Homo sapiens
MWKQKVFPVFCRVEDFKPQNTFPIYMVVHHEASIINLLETVFFHKEVCESAEDTVLDLVDYCHRKLTLLVAQSGCGGPPEGEGSQDSNPMQVG

SEQ ID NO: 3986 - DNA, 465 bp, Homo sapiens
atcctgccctacattgatgggttccgccacatccagaagatttcagcagaggcagatgtggagctcaacctggtgcgcattgctatccagaacctgctgtactacggcgttgtgacactggtgtccatcctccaggaagctgatccagttcgggcttatgaagaacctcatcaggcgactacagaagtatcctgtgcgggtgactcgggaagagcagagccaccctgcccggctttatacaggctgccacagctatgacgagatctgctgcaagacaggcatgagctaccatgagctggatgagcggcttgaaaatgaccccaacatcatcatctgctggaagtgaggctggtagtgactggatggacacattgctgtgggtagtccctcctactaggaggcttgtcatactgtctagaggttgactcttagttctgtaaataaagacatccatttcaaacagcc

SEQ ID NO: 3987 - protein, 62 aa, Homo sapiens [sequence omitted]

SEQ ID NO: 3988 - DNA, 2314 bp, Homo sapiens
agttacagcgtgaatcccttagcgcaccgcctccccaagtgctgccagcatgctgcccctccacgctagggacttgcctgcctctgccgcagcgcagatctgatgcggtggtttcctccaaagaaagcgggatactccgggccctgccgcgcgcaccgccgctccgtcacggagccgctttacttccgggtgcgacgtctacccacccaggacttcctgggacgagccgtcccccgccccagccacgcctctgagtcgcgctgcgcaggcgccattgggcagagggattggcaagcttgcgtgccccagcgacacaggcctcgaggctgtctctgacaagtgttcacaggaggtggggacgcctctgcgcgaggaacgaggagctacgggcctgggcccggttattgccatgggcagcggctgccgcatcgaatgcatattcttcagcgagttccaccccacgctgggacccaagatcacctatcaggtgccacccgggctcgcgggactgggcgggaagagggacgttctcgagagctcaactggctgcctgaaggcagtagtttcccgtgctgcacgcaggcatgctgcttcattcgcagacaactgtgaggctagaggatagtcagacccaggcccccggctcccaatgtggcagggaagacatacgtcacattggcagtgtttgtaggatatcgggctgtagggatccggttggggggttccaggtcccacagaaggtgagttgggtgacccatgagtatccctgaactgagtgaagagtaaatgatgcataggaagtttaggtaaggcaggagaaagtgttccaggtagagggaacagcatatgcagaagccaggaaggaggtgagatcatagcgtatgtttggaaacagaaagaagtaataggcctgagtggatgggagagaggggaacgctggagaagaggacttgggcttggggggcatgaggaggtcaccatttgtactacacccagtacagatgtccactgaggggcccattgccactcccctccccaggtccctgaagacttcatctcccgagagctgtttgacacagtccaagtgtacatcatcaccaagccagagctgcagaacaagcttatcactgtcacagctatggaaaagaagctgatcggctgtcctgtgtgcatcgaacacaagaagtacagccgcaatgctctcctcttcaacctgggcttcgtgtgtgatgcccaggccaagacctgcgccctcgagcccattgttaaaaagctggctggctatctgaccacactagagctagagagcagcttcgtgtccatggaggagagcaagcagaagttggtgcccatcatgaccatcttgctggaggagctaaatgcctcaggccggtgcactctgcccattgatgagtccaacaccatccacttgaaggtgattgagcagcggccagaccctccggtggcccaggagtatgatgtacctgtctttaccaaagacaaggaggatttcttcaactcacagtgggacctcactacacaacaagtatgccatccctccctgggtatcatcacctggggctggccacagccctggcctcatcctgtttcttctgaccttgtcccactctgcccagatcctgccctacattgatgggttccgccacatccagaagatttcagcagaggcagatgtggagctcaacctggtgcgcattgctatccagaacctgctgtactacggcgttgtgacactggtgtccatcctccagtactccaatgtatactgcccaacgcccaaggtccaggacctggtagatgacaagtccctgcaagaggcatgtctatcctacgtgaccaagcaagggcacaagagggccagtctccgggatgtgttccagctatactgcagcctgagccctggcactaccgtgcgagacctcattggccgccacccccagcagctgcagcatgttgatgaacggaagctgatccagttcgggcttatgaagaacctcatcaggcgactacagaagtatcctgtgcgggtgactcgggaagagcagagccaccctgcccggctttatacaggctgccacagctatgacgagatctgctgcaagacaggcatgagctaccatgagctggatgagcggcttgaaaatgaccccaacatcatcatctgctggaagtgaggctggtagtgactggatggacacattgctgtgggtagtccctcctactaggaggcttgtcatactgtctagaggttgactcttagttctgtaaataaagacatccatttcaaacagcc

SEQ ID NO: 3989 - protein, 239 aa, Homo sapiens
MMYLSLPKTRRISSTHSGTSLHNKYAIPPWVSSPGAGHSPGLILFLLTLSHSAQILPYIDGFRHIQKISAEADVELNLVRIAIQNLLYYGVVTLVSILQYSNVYCPTPKVQDLVDDKSLQEACLSYVTKQGHKRASLRDVFQLYCSLSPGTTVRDLIGRHPQQLQHVDERKLIQFGLMKNLIRRLQKYPVRVTREEQSHPARLYTGCHSYDEICCKTGMSYHELDERLENDPNIIICWK

SEQ ID NO: 3990 - DNA, 2514 bp, Homo sapiens
agttacagcgtgaatcccttagcgcaccgcctccccaagtgctgccagcatgctgcccctccacgctagggacttgcctgcctctgccgcagcgcagatctgatgcggtggtttcctccaaagaaagcgggatactccgggccctgccgcgcgcaccgccgctccgtcacggagccgctttacttccgggtgcgacgtctacccacccaggacttcctgggacgagccgtcccccgccccagccacgcctctgagtcgcgctgcgcaggcgccattgggcagagggattggcaagcttgcgtgccccagcgacacaggcctcgaggctgtctctgacaagtgttcacaggaggtggggacgcctctgcgcgaggaacgaggagctacgggcctgggcccggttattgccatgggcagcggctgccgcatcgaatgcatattcttcagcgagttccaccccacgctgggacccaagatcacctatcaggtgccacccgggctcgcgggactgggcgggaagagggacgttctcgagagctcaactggctgcctgaaggcagtagtttcccgtgctgcacgcaggcatgctgcttcattcgcagacaactgtgaggctagaggatagtcagacccaggcccccggctcccaatgtggcagggaagacatacgtcacattggcagtgtttgtaggatatcgggctgtagggatccggttggggggttccaggtcccacagaaggtgagttgggtgacccatgagtatccctgaactgagtgaagagtaaatgatgcataggaagtttaggtaaggcaggagaaagtgttccaggtagagggaacagcatatgcagaagccaggaaggaggtgagatcatagcgtatgtttggaaacagaaagaagtaataggcctgagtggatgggagagaggggaacgctggagaagaggacttgggcttggggggcatgaggaggtcaccatttgtactacacccagtacagatgtccactgaggggcccattgccactcccctccccaggtccctgaagacttcatctcccgagagctgtttgacacagtccaagtgtacatcatcaccaagccagagctgcagaacaagcttatcactgtcacagctatggaaaagaagctgatcggctgtcctgtgtgcatcgaacacaagaagtacagccgcaatgctctcctcttcaacctgggcttcgtgtgtgatgcccaggccaagacctgcgccctcgagcccattgttaaaaagctggctggctatctgaccacactagaggtctgcaatgagatgggcttgggtttaccgacaggcagagttggggaaggtgttcccatgtctccaaagtcccccaaacctgggaccctgcaaaccagctcaggactcagggcagccaaccagccaggggtcctgggatgtgcccaccatgctttccatgctctgtctagctagagagcagcttcgtgtccatggaggagagcaagcagaagttggtgcccatcatgaccatcttgctggaggagctaaatgcctcaggccggtgcactctgcccattgatgagtccaacaccatccacttgaaggtgattgagcagcggccagaccctccggtggcccaggagtatgatgtacctgtctttaccaaagacaaggaggatttcttcaactcacagtgggacctcactacacaacaaatcctgccctacattgatgggttccgccacatccagaagatttcagcagaggcagatgtggagctcaacctggtgcgcattgctatccagaacctgctgtgagtgggcctacagtcatacctgggacaaggtcaccagccagggaagacctcaggggccctgggtgtgagggttgggaaggcatggtcctcagaagctgagcacagctctctctctcaggtactacggcgttgtgacactggtgtccatcctccagtactccaatgtatactgcccaacgcccaaggtccaggacctggtagatgacaagtccctgcaagaggcatgtctatcctacgtgaccaagcaagggcacaagagggccagtctccgggatgtgttccagctatactgcagcctgagccctggcactaccgtgcgagacctcattggccgccacccccagcagctgcagcatgttgatgaacggaagctgatccagttcgggcttatgaagaacctcatcaggcgactacagaagtatcctgtgcgggtgactcgggaagagcagagccaccctgcccggctttatacaggctgccacagctatgacgagatctgctgcaagacaggcatgagctaccatgagctggatgagcggcttgaaaatgaccccaacatcatcatctgctggaagtgaggctggtagtgactggatggacacattgctgtgggtagtccctcctactaggaggcttgtcatactgtctagaggttgactcttagttctgtaaataaagacatccatttcaaacagcc

SEQ ID NO: 3991 - protein, 108 aa, Homo sapiens
MEESKQKLVPIMTILLEELNASGRCTLPIDESNTIHLKVIEQRPDPPVAQEYDVPVFTKDKEDFFNSQWDLTTQQILPYIDGFRHIQKISAEADVELNLVRIAIQNLL

SEQ ID NO: 3992 - DNA, 2223 bp, Homo sapiens
agttacagcgtgaatcccttagcgcaccgcctccccaagtgctgccagcatgctgcccctccacgctagggacttgcctgcctctgccgcagcgcagatctgatgcggtggtttcctccaaagaaagcgggatactccgggccctgccgcgcgcaccgccgctccgtcacggagccgctttacttccgggtgcgacgtctacccacccaggacttcctgggacgagccgtcccccgccccagccacgcctctgagtcgcgctgcgcaggcgccattgggcagagggattggcaagcttgcgtgccccagcgacacaggcctcgaggctgtctctgacaagtgttcacaggaggtggggacgcctctgcgcgaggaacgaggagctacgggcctgggcccggttattgccatgggcagcggctgccgcatcgaatgcatattcttcagcgagttccaccccacgctgggacccaagatcacctatcaggtgccacccgggctcgcgggactgggcgggaagagggacgttctcgagagctcaactggctgcctgaaggcagtagtttcccgtgctgcacgcaggcatgctgcttcattcgcagacaactgtgaggctagaggatagtcagacccaggcccccggctcccaatgtggcagggaagacatacgtcacattggcagtgtttgtaggatatcgggctgtagggatccggttggggggttccaggtcccacagaaggtgagttgggtgacccatgagtatccctgaactgagtgaagagtaaatgatgcataggaagtttaggtaaggcaggagaaagtgttccaggtagagggaacagcatatgcagaagccaggaaggaggtgagatcatagcgtatgtttggaaacagaaagaagtaataggcctgagtggatgggagagaggggaacgctggagaagaggacttgggcttggggggcatgaggaggtcaccatttgtactacacccagtacagatgtccactgaggggcccattgccactcccctccccaggtccctgaagacttcatctcccgagagctgtttgacacagtccaagtgtacatcatcaccaagccagagctgcagaacaagcttatcactgtcacagctatggaaaagaagctgatcggctgtcctgtgtgcatcgaacacaagaagtacagccgcaatgctctcctcttcaacctgggcttcgtgtgtgatgcccaggccaagacctgcgccctcgagcccattgttaaaaagctggctggctatctgaccacactagagctagagagcagcttcgtgtccatggaggagagcaagcagaagttggtgcccatcatgaccatcttgctggaggagctaaatgcctcaggccggtgcactctgcccattgatgagtccaacaccatccacttgaaggtgattgagcagcggccagaccctccggtggcccaggagtatgatgtacctgtctttaccaaagacaaggaggatttcttcaactcacagtgggacctcactacacaacaaatcctgccctacattgatgggttccgccacatccagaagatttcagcagaggcagatgtggagctcaacctggtgcgcattgctatccagaacctgctgtactacggcgttgtgacactggtgtccatcctccagtactccaatgtatactgcccaacgcccaaggtccaggacctggtagatgacaagtccctgcaagaggcatgtctatcctacgtgaccaagcaagggcacaagagggccagtctccgggatgtgttccagctatactgcagcctgagccctggcactaccgtgcgagacctcattggccgccacccccagcagctgcagcatgttgatgaacggaagctgatccagttcgggcttatgaagaacctcatcaggcgactacagaagtatcctgtgcgggtgactcgggaagagcagagccaccctgcccggctttatacaggctgccacagctatgacgagatctgctgcaagacaggcatgagctaccatgagctggatgagcggcttgaaaatgaccccaacatcatcatctgctggaagtgaggctggtagtgactggatggacacattgctgtgggtagtccctcctactaggaggcttgtcatactgtctagaggttgactcttagttctgtaaataaagacatccatttcaaacagcc

SEQ ID NO: 3993 - protein, 321 aa, Homo sapiens [sequence omitted]

SEQ ID NO: 3994 - DNA, 1741 bp, Homo sapiens
gtcgccggcagtagagccagctgggagggcgcggagcactatggaaattgtagttccctgctgcggtcccagttacagcgtgaatcccttagcgcaccgcctccccaagtgctgccagcatgctgcccctccacgctagggacttgcctgcctctgccgcagcgcagatctgatgcggtggtttcctccaaagaaagcgggatactccgggccctgccgcgcgcaccgccgctccgtcacggagccgctttacttccgggtgcgacgtctacccacccaggacttcctgggacgagccgtcccccgccccagccacgcctctgagtcgcgctgcgcaggcgccattgggcagagggattggcaagcttgcgtgccccagcgacacaggcctcgaggctgtctctgacaagtgttcacaggaggtggggacgcctctgcgcgaggaacgaggagctacgggcctgggcccggttattgccatgggcagcggctgccgcatcgaatgcatattcttcagcgagttccaccccacgctgggacccaagatcacctatcaggtccctgaagacttcatctcccgagagctgtttgacacagtccaagtgtacatcatcaccaagccagagctgcagaacaagcttatcactgtcacagctatggaaaagaagctgatcggctgtcctgtgtgcatcgaacacaagaagtacagccgcaatgctctcctcttcaacctgggcttcgtgtgtgatgcccaggccaagacctgcgccctcgagcccattgttaaaaagctggctggctatctgaccacactagagctagagagcagcttcgtgtccatggaggagagcaagcagaagttggtgcccatcatgaccatcttgctggaggagctaaatgcctcaggccggtgcactctgcccattgatgagtccaacaccatccacttgaaggtgattgagcagcggccagaccctccggtggcccaggagtatgatgtacctgtctttaccaaagacaaggaggatttcttcaactcacagtgggacctcactacacaacaaatcctgccctacattgatgggttccgccacatccagaagatttcagcagaggcagatgtggagctcaacctggtgcgcattgctatccagaacctgctgtactacggcgttgtgacactggtgtccatcctccagtactccaatgtatactgcccaacgcccaaggtccaggacctggtagatgacaagtccctgcaagaggcatgtctatcctacgtgaccaagcaagggcacaagagggccagtctccgggatgtgttccagctatactgcagcctgagccctggcactaccgtgcgagacctcattggccgccacccccagcagctgcagcatgttgatgaacggaagctgatccagttcgggcttatgaagaacctcatcaggcgactacagaagtatcctgtgcgggtgactcgggaagagcagagccaccctgcccggctttatacaggctgccacagctatgacgagatctgctgcaagacaggcatgagctaccatgagctggatgagcggcttgaaaatgaccccaacatcatcatctgctggaagtgaggctggtagtgactggatggacacattgctgtgggtagtccctcctactaggaggcttgtcatactgtctagaggttgactcttagttctgtaaataaagacatccatttcaaacagcc

SEQ ID NO: 3995 - protein, 380 aa, Homo sapiens; identical to SEQ ID NO: 407

SEQ ID NO: 3996 - DNA, 3018 bp, Homo sapiens
gtgcgacgtctacccacccaggacttcctgggacgagccgtcccccgccccagccacgcctctgagtcgcgctgcgcaggcgccattgggcagagggattggcaagcttgcgtgccccagcgacacaggcctcgaggctgtctctgacaagtgttcacaggaggtggggacgcctctgcgcgaggaacgaggagctacgggcctgggcccggttattgccatgggcagcggctgccgcatcgaatgcatattcttcagcgagttccaccccacgctgggacccaagatcacctatcaggtgccacccgggctcgcgggactgggcgggaagagggacgttctcgagagctcaactggctgcctgaaggcagtagtttcccgtgctgcacgcaggcatgctgcttcattcgcagacaactgtgaggctagaggatagtcagacccaggcccccggctcccaatgtggcagggaagacatacgtcacattggcagtgtttgtaggatatcgggctgtagggatccggttggggggttccaggtcccacagaaggtgagttgggtgacccatgagtatccctgaactgagtgaagagtaaatgatgcataggaagtttaggtaaggcaggagaaagtgttccaggtagagggaacagcatatgcagaagccaggaaggaggtgagatcatagcgtatgtttggaaacagaaagaagtaataggcctgagtggatgggagagaggggaacgctggagaagaggacttgggcttggggggcatgaggaggtcaccatttgtactacacccagtacagatgtccactgaggggcccattgccactcccctccccaggtccctgaagacttcatctcccgagagctgtttgacacagtccaagtgtacatcatcaccaagccagagctgcagaacaagcttatcactgtgtgagaccctagctcggggtgagcggtgggtggcaggggttgtcccaggaggaggaagggacaggcttgggggcctgactgtgttccaattatccagcacagctatggaaaagaagctgatcggctgtcctgtgtgcatcgaacacaagaagtacagccgcaatgctctcctcttcaacctgggcttcgtgtgtgatgcccaggccaagacctgcgccctcgagcccattgttaaaaagctggctggctatctgaccacactagaggtctgcaatgagatgggcttgggtttaccgacaggcagagttggggaaggtgttcccatgtctccaaagtcccccaaacctgggaccctgcaaaccagctcaggactcagggcagccaaccagccaggggtcctgggatgtgcccaccatgctttccatgctctgtctagctagagagcagcttcgtgtccatggaggagagcaagcagaagttggtgcccatcatgaccatcttgctggaggagctaaatgcctcaggccggtgcactctgcccattggtatggccagcctctgcaaggacagcagaggggtagaggagagatgggaaagtgaacccagctagtcagggagaagggcaagactcatgaacacattggtgggcaggaaatagccatgggctgaggtgcccatgtccagggtccaatgcatgatggagctgggactgggggtagggggaaagcagagctctccagctctgccccttgggcaattccttcccctttgtgggcctccgtttctcactccataaaaagagaaagattagccctacccagaggcacctgcttgccccaagggatgctgggaggcctggatggtaattgaggacctcttggaagaagtggcactgaggatatggatggggccccctgcagatgagtccaacaccatccacttgaaggtgattgagcagcggccagaccctccggtggcccaggagtatgatgtacctgtctttaccaaagacaaggaggatttcttcaactcacagtgggacctcactacacaacaaatcctgccctacattgatgggttccgccacatccagaagatttcagcagaggcagatgtggagctcaacctggtgcgcattgctatccagaacctgctgtgagtgggcctacagtcatacctgggacaaggtcaccagccagggaagacctcaggggccctgggtgtgagggttgggaaggcatggtcctcagaagctgagcacagctctctctctcaggtactacggcgttgtgacactggtgtccatcctccagtactccaatgtatactgcccaacgcccaaggtccaggacctggtagatgacaagtccctgcaagaggcatgtctatcctacgtgaccaagcaagggcacaagagggccagtctccgggatgtgttccagctatactgcagcctgagccctggcactaccgtgcgagacctcattggccgccacccccagcagctgcagcatgttgatgaacggtcagaggagaatttgctggggcatttgggagttacctgagggaagctagaccctttatgtctctcaggagccctggatcatggggcactgccaatccaagcaggcttcctggagatgatgggctacagagacaaaattgaagggagactacaggaaagggttggcctgcctgaaagaaggcctggccagggcgtcaccccgtcctctgatcctcaccctaggaagctgatccagttcgggcttatgaagaacctcatcaggcgactacagaagtatcctgtgcgggtgactcgggaagagcagagccaccctgcccggctttatacaggctgccacagctatgacgagatctgctgcaagacaggcatgagctaccatgagctggatgagcggcttgaaaatgaccccaacatcatcatctgctggaagtgaggctggtagtgactggatggacacattgctgtgggtagtccctcctactaggaggcttgtcatactgtctagaggttgactcttagttctgtaaataaagacatccatttcaaacagc

SEQ ID NO: 3997 - protein, 105 aa, Homo sapiens [sequence omitted]

SEQ ID NO: 3998 - DNA, 3392 bp, Homo sapiens
agttacagcgtgaatcccttagcgcaccgcctccccaagtgctgccagcatgctgcccctccacgctagggacttgcctgcctctgccgcagcgcagatctgatgcggtggtttcctccaaagaaagcgggatactccgggccctgccgcgcgcaccgccgctccgtcacggagccgctttacttccgggtgcgacgtctacccacccaggacttcctgggacgagccgtcccccgccccagccacgcctctgagtcgcgctgcgcaggcgccattgggcagagggattggcaagcttgcgtgccccagcgacacaggcctcgaggctgtctctgacaagtgttcacaggaggtggggacgcctctgcgcgaggaacgaggagctacgggcctgggcccggttattgccatgggcagcggctgccgcatcgaatgcatattcttcagcgagttccaccccacgctgggacccaagatcacctatcaggtgccacccgggctcgcgggactgggcgggaagagggacgttctcgagagctcaactggctgcctgaaggcagtagtttcccgtgctgcacgcaggcatgctgcttcattcgcagacaactgtgaggctagaggatagtcagacccaggcccccggctcccaatgtggcagggaagacatacgtcacattggcagtgtttgtaggatatcgggctgtagggatccggttggggggttccaggtcccacagaaggtgagttgggtgacccatgagtatccctgaactgagtgaagagtaaatgatgcataggaagtttaggtaaggcaggagaaagtgttccaggtagagggaacagcatatgcagaagccaggaaggaggtgagatcatagcgtatgtttggaaacagaaagaagtaataggcctgagtggatgggagagaggggaacgctggagaagaggacttgggcttggggggcatgaggaggtcaccatttgtactacacccagtacagatgtccactgaggggcccattgccactcccctccccaggtccctgaagacttcatctcccgagagctgtttgacacagtccaagtgtacatcatcaccaagccagagctgcagaacaagcttatcactgtcacagctatggaaaagaagctgatcggctgtcctgtgtgcatcgaacacaagaagtacagccgcaatgctctcctcttcaacctgggcttcgtgtgtgatgcccaggccaagacctgcgccctcgagcccattgttaaaaagctggctggctatctgaccacactagaggtctgcaatgagatgggcttgggtttaccgacaggcagagttggggaaggtgttcccatgtctccaaagtcccccaaacctgggaccctgcaaaccagctcaggactcagggcagccaaccagccaggggtcctgggatgtgcccaccatgctttccatgctctgtctagctagagagcagcttcgtgtccatggaggagagcaagcagaagttggtgcccatcatgaccatcttgctggaggagctaaatgcctcaggccggtgcactctgcccattggtatggccagcctctgcaaggacagcagaggggtagaggagagatgggaaagtgaacccagctagtcagggagaagggcaagactcatgaacacattggtgggcaggaaatagccatgggctgaggtgcccatgtccagggtccaatgcatgatggagctgggactgggggtagggggaaagcagagctctccagctctgccccttgggcaattccttcccctttgtgggcctccgtttctcactccataaaaagagaaagattagccctacccagaggcacctgcttgccccaagggatgctgggaggcctggatggtaattgaggacctcttggaagaagtggcactgaggatatggatggggccccctgcagatgagtccaacaccatccacttgaaggtgattgagcagcggccagaccctccggtggcccaggagtatgatgtacctgtctttaccaaagacaaggaggatttcttcaactcacagtgggacctcactacacaacaagtatgccatccctccctgggtatcatcacctggggctggccacagccctggcctcatcctgtttcttctgaccttgtcccactctgcccagatcctgccctacattgatgggttccgccacatccagaagatttcagcagaggcagatgtggagctcaacctggtgcgcattgctatccagaacctgctgtgagtgggcctacagtcatacctgggacaaggtcaccagccagggaagacctcaggggccctgggtgtgagggttgggaaggcatggtcctcagaagctgagcacagctctctctctcaggtactacggcgttgtgacactggtgtccatcctccaggtaggtgagttgggtttggttaagtggagagtggatcatgtggctggaccagaccagggctgtgtcagcttcccaagcccctcactcaggcccctatgccttctgctaccctctagtactccaatgtatactgcccaacgcccaaggtccaggacctggtagatgacaagtccctgcaagaggcatgtctatcctacgtgaccaagcaaggtagtggtgggttctgggggaagccatcttggggagggcagggccacatgatgagctgatccctggcacccacagggcacaagagggccagtctccgggatgtgttccagctatactgcagcctgagccctggcactaccgtgcgagacctcattggccgccacccccagcagctgcagcatgttgatgaacggtcagaggagaatttgctggggcatttgggagttacctgagggaagctagaccctttatgtctctcaggagccctggatcatggggcactgccaatccaagcaggcttcctggagatgatgggctacagagacaaaattgaagggagactacaggaaagggttggcctgcctgaaagaaggcctggccagggcgtcaccccgtcctctgatcctcaccctaggaagctgatccagttcgggcttatgaagaacctcatcaggcgactacagaagtatcctgtgcgggtgactcgggaagagcagagccaccctgcccggctttatacaggctgccacagctatgacgagatctgctgcaagacaggcatgagctaccatgagctggatgagcggcttgaaaatgaccccaacatcatcatctgctggaagtgaggctggtagtgactggatggacacattgctgtgggtagtccctcctactaggaggcttgtcatactgtctagaggttgactcttagttctgtaaataaagacatccatttcaaacagc

SEQ ID NO: 3999 - protein, 105 aa, Homo sapiens [sequence omitted]

SEQ ID NO: 4000 - DNA, 1793 bp, Homo sapiens
gtcgccggcagtagagccagctgggagggcgcggagcactatggaaattgtagttccctgctgcggtcccagttacagcgtgaatcccttagcgcaccgcctccccaagtgctgccagcatgctgcccctccacgctagggacttgcctgcctctgccgcagcgcagatctgatgcggtggtttcctccaaagaaagcgggatactccgggccctgccgcgcgcaccgccgctccgtcacggagccgctttacttccgggtgcgacgtctacccacccaggacttcctgggacgagccgtcccccgccccagccacgcctctgagtcgcgctgcgcaggcgccattgggcagagggattggcaagcttgcgtgccccagcgacacaggcctcgaggctgtctctgacaagtgttcacaggaggtggggacgcctctgcgcgaggaacgaggagctacgggcctgggcccggttattgccatgggcagcggctgccgcatcgaatgcatattcttcagcgagttccaccccacgctgggacccaagatcacctatcaggtccctgaagacttcatctcccgagagctgtttgacacagtccaagtgtacatcatcaccaagccagagctgcagaacaagcttatcactgtctagagagcagcttcgtgtccatggaggagagcaagcagaagttggtgcccatcatgaccatcttgctggaggagctaaatgcctcaggccggtgcactctgcccattgatgagtccaacaccatccacttgaaggtgattgagcagcggccagaccctccggtggcccaggagtatgatgtacctgtctttaccaaagacaaggaggatttcttcaactcacagtgggacctcactacacaacaaatcctgccctacattgatgggttccgccacatccagaagatttcagcagaggcagatgtggagctcaacctggtgcgcattgctatccagaacctgctgtactacggcgttgtgacactggtgtccatcctccagtactccaatgtatactgcccaacgcccaaggtccaggacctggtagatgacaagtccctgcaagaggcatgtctatcctacgtgaccaagcaagggcacaagagggccagtctccgggatgtgttccagctatactgcagcctgagccctggcactaccgtgcgagacctcattggccgccacccccagcagctgcagcatgttgatgaacggtcagaggagaatttgctggggcatttgggagttacctgagggaagctagaccctttatgtctctcaggagccctggatcatggggcactgccaatccaagcaggcttcctggagatgatgggctacagagacaaaattgaagggagactacaggaaagggttggcctgcctgaaagaaggcctggccagggcgtcaccccgtcctctgatcctcaccctaggaagctgatccagttcgggcttatgaagaacctcatcaggcgactacagaagtatcctgtgcgggtgactcgggaagagcagagccaccctgcccggctttatacaggctgccacagctatgacgagatctgctgcaagacaggcatgagctaccatgagctggatgagcggcttgaaaatgaccccaacatcatcatctgctggaagtgaggctggtagtgactggatggacacattgctgtgggtagtccctcctactaggaggcttgtcatactgtctagaggttgactcttagttctgtaaataaagacatccatttcaaacagc

SEQ ID NO: 4001 - protein, 203 aa, Homo sapiens
MEESKQKLVPIMTILLEELNASGRCTLPIDESNTIHLKVIEQRPDPPVAQEYDVPVFTKDKEDFFNSQWDLTTQQILPYIDGFRHIQKISAEADVELNLVRIAIQNLLYYGVVTLVSILQYSNVYCPTPKVQDLVDDKSLQEACLSYVTKQGHKRASLRDVFQLYCSLSPGTTVRDLIGRHPQQLQHVDERSEENLLGHLGVT

SEQ ID NO: 4002 - DNA, 1962 bp, Homo sapiens
gtcgccggcagtagagccagctgggagggcgcggagcactatggaaattgtagttccctgctgcggtcccagttacagcgtgaatcccttagcgcaccgcctccccaagtgctgccagcatgctgcccctccacgctagggacttgcctgcctctgccgcagcgcagatctgatgcggtggtttcctccaaagaaagcgggatactccgggccctgccgcgcgcaccgccgctccgtcacggagccgctttacttccgggtgcgacgtctacccacccaggacttcctgggacgagccgtcccccgccccagccacgcctctgagtcgcgctgcgcaggcgccattgggcagagggattggcaagcttgcgtgccccagcgacacaggcctcgaggctgtctctgacaagtgttcacaggaggtggggacgcctctgcgcgaggaacgaggagctacgggcctgggcccggttattgccatgggcagcggctgccgcatcgaatgcatattcttcagcgagttccaccccacgctgggacccaagatcacctatcaggtccctgaagacttcatctcccgagagctgtttgacacagtccaagtgtacatcatcaccaagccagagctgcagaacaagcttatcactgtcacagctatggaaaagaagctgatcggctgtcctgtgtgcatcgaacacaagaagtacagccgcaatgctctcctcttcaacctgggcttcgtgtgtgatgcccaggccaagacctgcgccctcgagcccattgttaaaaagctggctggctatctgaccacactagagctagagagcagcttcgtgtccatggaggagagcaagcagaagttggtgcccatcatgaccatcttgctggaggagctaaatgcctcaggccggtgcactctgcccattgatgagtccaacaccatccacttgaaggtgattgagcagcggccagaccctccggtggcccaggagtatgatgtacctgtctttaccaaagacaaggaggatttcttcaactcacagtgggacctcactacacaacaaatcctgccctacattgatgggttccgccacatccagaagatttcagcagaggcagatgtggagctcaacctggtgcgcattgctatccagaacctgctgtactacggcgttgtgacactggtgtccatcctccagtactccaatgtatactgcccaacgcccaaggtccaggacctggtagatgacaagtccctgcaagaggcatgtctatcctacgtgaccaagcaagggcacaagagggccagtctccgggatgtgttccagctatactgcagcctgagccctggcactaccgtgcgagacctcattggccgccacccccagcagctgcagcatgttgatgaacggtcagaggagaatttgctggggcatttgggagttacctgagggaagctagaccctttatgtctctcaggagccctggatcatggggcactgccaatccaagcaggcttcctggagatgatgggctacagagacaaaattgaagggagactacaggaaagggttggcctgcctgaaagaaggcctggccagggcgtcaccccgtcctctgatcctcaccctaggaagctgatccagttcgggcttatgaagaacctcatcaggcgactacagaagtatcctgtgcgggtgactcgggaagagcagagccaccctgcccggctttatacaggctgccacagctatgacgagatctgctgcaagacaggcatgagctaccatgagctggatgagcggcttgaaaatgaccccaacatcatcatctgctggaagtgaggctggtagtgactggatggacacattgctgtgggtagtccctcctactaggaggcttgtcatactgtctagaggttgactcttagttctgtaaataaagacatccatttcaaacagc

SEQ ID NO: 4003 - protein, 323 aa, Homo sapiens
MGSGCRIECIFFSEFHPTLGPKITYQVPEDFISRELFDTVQVYIITKPELQNKLITVTAMEKKLIGCPVCIEHKKYSRNALLFNLGFVCDAQAKTCALEPIVKKLAGYLTTLELESSFVSMEESKQKLVPIMTILLEELNASGRCTLPIDESNTIHLKVIEQRPDPPVAQEYDVPVFTKDKEDFFNSQWDLTTQQILPYIDGFRHIQKISAEADVELNLVRIAIQNLLYYGVVTLVSILQYSNVYCPTPKVQDLVDDKSLQEACLSYVTKQGHKRASLRDVFQLYCSLSPGTTVRDLIGRHPQQLQHVDERSEENLLGHLGVT

SEQ ID NO: 4004 - DNA, 845 bp, Homo sapiens
cagggagaagggcaagactcatgaacacattggtgggcaggaaatagccatgggctgaggtgcccatgtccagggtccaatgcatgatggagctgggactgggggtagggggaaagcagagctctccagctctgccccttgggcaattccttcccctttgtgggcctccgtttctcactccataaaaagagaaagattagccctacccagaggcacctgcttgccccaagggatgctgggaggcctggatggtaattgaggacctcttggaagaagtggcactgaggatatggatggggccccctgcagatgagtccaacaccatccacttgaaggtgattgagcagcggccagaccctccggtggcccaggagtatgatgtacctgtctttaccaaagacaaggaggatttcttcaactcacagtgggacctcactacacaacaaatcctgccctacattgatgggttccgccacatccagaagatttcagcagaggcagatgtggagctcaacctggtgcgcattgctatccagaacctgctgtgagtgggcctacagtcatacctgggacaaggtcaccagccagggaagacctcaggggccctgggtgtgagggttgggaaggcatggtcctcagaagctgagcacagctctctctctcaggtactacggcgttgtgacactggtgtccatcctccaggtaggtgagttgggtttggttaagtggagagtggatcatgtggctggaccagaccagggctgtgtcagcttcccaagcccctcactcaggcccctatgccttctgctaccctctagtactccaatgtatactgcccaacgccc

SEQ ID NO: 4005 - protein, 99 aa, Homo sapiens
MVIEDLLEEVALRIWMGPPADESNTIHLKVIEQRPDPPVAQEYDVPVFTKDKEDFFNSQWDLTTQQILPYIDGFRHIQKISAEADVELNLVRIAIQNLL

SEQ ID NO: 4006 - DNA, 1064 bp, Homo sapiens
gtcgccggcagtagagccagctgggagggcgcggagcactatggaaattgtagttccctgctgcggtcccagttacagcgtgaatcccttagcgcaccgcctccccaagtgctgccagcatgctgcccctccacgctagggacttgcctgcctctgccgcagcgcagatctgatgcggtggtttcctccaaagaaagcgggatactccgggccctgccgcgcgcaccgccgctccgtcacggagccgctttacttccgggtgcgacgtctacccacccaggacttcctgggacgagccgtcccccgccccagccacgcctctgagtcgcgctgcgcaggcgccattgggcagagggattggcaagcttgcgtgccccagcgacacaggcctcgaggctgtctctgacaagtgttcacaggaggtggggacgcctctgcgcgaggaacgaggagctacgggcctgggcccggttattgccatgggcagcggctgccgcatcgaatgcatattcttcagcgagttccaccccacgctgggacccaagatcacctatcaggtccctgaagacttcatctcccgagagctgtttgacacagtccaagtgtacatcatcaccaagccagagctgcagaacaagcttatcactgtcacagctatggaaaagaagctgatcggctgtcctgtgtgcatcgaacacaagaagtacagccgcaatgctctcctcttcaacctgggcttcgtgtgtgatgcccaggccaagacctgcgccctcgagcccattgttaaaaagctggctggctatctgaccacactagagctagagagcagcttcgtgtccatggaggagagcaagcagaagttggtgcccatcatgaccatcttgctggaggagctaaatgcctcaggccggtgcactctgcccattgatgagtccaacaccatccacttgaaggtgattgagcagcggccagaccctccggtggcccaggagtatgatgtacctgtctttaccaaagacaaggaggatttcttcaactcacagtgggacctcactacacaacaa

SEQ ID NO: 4007 - protein, 194 aa, Homo sapiens
MGSGCRIECIFFSEFHPTLGPKITYQVPEDFISRELFDTVQVYIITKPELQNKLITVTAMEKKLIGCPVCIEHKKYSRNALLFNLGFVCDAQAKTCALEPIVKKLAGYLTTLELESSFVSMEESKQKLVPIMTILLEELNASGRCTLPIDESNTIHLKVIEQRPDPPVAQEYDVPVFTKDKEDFFNSQWDLTTQ

SEQ ID NO: 4008 - DNA, 1607 bp, Homo sapiens
gtcgccggcagtagagccagctgggagggcgcggagcactatggaaattgtagttccctgctgcggtcccagttacagcgtgaatcccttagcgcaccgcctccccaagtgctgccagcatgctgcccctccacgctagggacttgcctgcctctgccgcagcgcagatctgatgcggtggtttcctccaaagaaagcgggatactccgggccctgccgcgcgcaccgccgctccgtcacggagccgctttacttccgggtgcgacgtctacccacccaggacttcctgggacgagccgtcccccgccccagccacgcctctgagtcgcgctgcgcaggcgccattgggcagagggattggcaagcttgcgtgccccagcgacacaggcctcgaggctgtctctgacaagtgttcacaggaggtggggacgcctctgcgcgaggaacgaggagctacgggcctgggcccggttattgccatgggcagcggctgccgcatcgaatgcatattcttcagcgagttccaccccacgctgggacccaagatcacctatcaggtccctgaagacttcatctcccgagagctgtttgacacagtccaagtgtacatcatcaccaagccagagctgcagaacaagcttatcactgtcacagctatggaaaagaagctgatcggctgtcctgtgtgcatcgaacacaagaagtacagccgcaatgctctcctcttcaacctgggcttcgtgtgtgatgcccaggccaagacctgcgccctcgagcccattgttaaaaagctggctggctatctgaccacactagaggtctgcaatgagatgggcttgggtttaccgacaggcagagttggggaaggtgttcccatgtctccaaagtcccccaaacctgggaccctgcaaaccagctcaggactcagggcagccaaccagccaggggtcctgggatgtgcccaccatgctttccatgctctgtctagctagagagcagcttcgtgtccatggaggagagcaagcagaagttggtgcccatcatgaccatcttgctggaggagctaaatgcctcaggccggtgcactctgcccattggtatggccagcctctgcaaggacagcagaggggtagaggagagatgggaaagtgaacccagctagtcagggagaagggcaagactcatgaacacattggtgggcaggaaatagccatgggctgaggtgcccatgtccagggtccaatgcatgatggagctgggactgggggtagggggaaagcagagctctccagctctgccccttgggcaattccttcccctttgtgggcctccgtttctcactccataaaaagagaaagattagccctacccagaggcacctgcttgccccaagggatgctgggaggcctggatggtaattgaggacctcttggaagaagtggcactgaggatatggatggggccccctgcagatgagtccaacaccatccacttgaaggtgattgagcagcggccagaccctccggtggcccaggagtatgatgtacctgtctttaccaaagacaaggaggatttcttcaactcacagtgggacctcactacacaac

SEQ ID NO: 4009 - protein, 170 aa, Homo sapiens
MGSGCRIECIFFSEFHPTLGPKITYQVPEDFISRELFDTVQVYIITKPELQNKLITVTAMEKKLIGCPVCIEHKKYSRNALLFNLGFVCDAQAKTCALEPIVKKLAGYLTTLEVCNEMGLGLPTGRVGEGVPMSPKSPKPGTLQTSSGLRAANQPGVLGCAHHAFHALSS

SEQ ID NO: 4010 - DNA, 1076 bp, Homo sapiens
ccgcctccccaagtgctgccagcatgctgcccctccacgctagggacttgcctgcctctgccgcagcgcagatctgatgcggtggtttcctccaaagaaagcgggatactccgggccctgccgcgcgcaccgccgctccgtcacggagccgctttacttccgggtgcgacgtctacccacccaggacttcctgggacgagccgtcccccgccccagccacgcctctgagtcgcgctgcgcaggcgccattgggcagagggattggcaagcttgcgtgccccagcgacacaggcctcgaggctgtctctgacaagtgttcacaggaggtggggacgcctctgcgcgaggaacgaggagctacgggcctgggcccggttattgccatgggcagcggctgccgcatcgaatgcatattcttcagcgagttccaccccacgctgggacccaagatcacctatcaggtccctgaagacttcatctcccgagagctgtttgacacagtccaagtgtacatcatcaccaagccagagctgcagaacaagcttatcactgtgtgagaccctagctcggggtgagcggtgggtggcaggggttgtcccaggaggaggaagggacaggcttgggggcctgactgtgttccaattatccagcacagctatggaaaagaagctgatcggctgtcctgtgtgcatcgaacacaagaagtacagccgcaatgctctcctcttcaacctgggcttcgtgtgtgatgcccaggccaagacctgcgccctcgagcccattgttaaaaagctggctggctatctgaccacactagaggtctgcaatgagatgggcttgggtttaccgacaggcagagttggggaaggtgttcccatgtctccaaagtcccccaaacctgggaccctgcaaaccagctcaggactcagggcagccaaccagccaggggtcctgggatgtgcccaccatgctttccatgctctgtctagctagagagcagcttcgtgtccatggaggagagcaagcagaagttggtgcccatcatgaccatcttgctggaggagctaaatgcctca

SEQ ID NO: 4011 - protein, 57 aa, Homo sapiens
MGSGCRIECIFFSEFHPTLGPKITYQVPEDFISRELFDTVQVYIITKPELQNKLITV

SEQ ID NO: 4012 - DNA, 978 bp, Homo sapiens
gtcgccggcagtagagccagctgggagggcgcggagcactatggaaattgtagttccctgctgcggtcccagttacagcgtgaatcccttagcgcaccgcctccccaagtgctgccagcatgctgcccctccacgctagggacttgcctgcctctgccgcagcgcagatctgatgcggtggtttcctccaaagaaagcgggatactccgggccctgccgcgcgcaccgccgctccgtcacggagccgctttacttccgggtgcgacgtctacccacccaggacttcctgggacgagccgtcccccgccccagccacgcctctgagtcgcgctgcgcaggcgccattgggcagagggattggcaagcttgcgtgccccagcgacacaggcctcgaggctgtctctgacaagtgttcacaggaggtggggacgcctctgcgcgaggaacgaggagctacgggcctgggcccggttattgccatgggcagcggctgccgcatcgaatgcatattcttcagcgagttccaccccacgctgggacccaagatcacctatcaggtccctgaagacttcatctcccgagagctgtttgacacagtccaagtgtacatcatcaccaagccagagctgcagaacaagcttatcactgtcacagctatggaaaagaagctgatcggctgtcctgtgtgcatcgaacacaagaagtacagccgcaatgctctcctcttcaacctgggcttcgtgtgtgatatgggcttgggtttaccgacaggcagagttggggaaggtgttcccatgtctccaaagtcccccaaacctgggaccctgcaaaccagctcaggactcagggcagccaaccagccaggggtcctgggatgtgcccaccatgctttccatgctctgtctagctagagagcagcttcgtgtccatggaggagagcaagcagaagttggtgcccatcatgaccatcttgctgga

SEQ ID NO: 4013 - protein, 143 aa, Homo sapiens
MGSGCRIECIFFSEFHPTLGPKITYQVPEDFISRELFDTVQVYIITKPELQNKLITVTAMEKKLIGCPVCIEHKKYSRNALLFNLGFVCDMGLGLPTGRVGEGVPMSPKSPKPGTLQTSSGLRAANQPGVLGCAHHAFHALSS

SEQ ID NO: 4014 - DNA, 1778 bp, Homo sapiens
ctggaacactttctcctgccttacctaaacttcctatgcatcatttactcttcactcagttcagggatactcatgggtcacccaactcaccttctgtgggacctggaaccccccaaccggatccctacagcccgatatcctacaaacactgccaatgtgacgtatgtcttccctgccacattgggagccgggggcctgggtctgactatcctctagcctcacagttgtctgcgaatgaagcagcatgcctgcgtgcagcacgggaaactactgccttcaggcagccagttgagctctcgagaacgtccctcttcccgcccagtcccgcgagcccgggtggcacctgataggtgatcttgggtcccagcgtggggtggaactcgctgaagaatatgcattcgatgcggcagccgctgcccatggcaataaccgggcccaggcccgtagctcctcgttcctcgcgcagaggcgtccccacctcctgtgaacacttgtcagagacagcctcgaggcctgtgtcgctggggcacgcaagcttgccaatccctctgcccaatggcgcctgcgcagcgcgactcagaggcgtggctggggcgggggacggctcgtcccaggaagtcctgggtgggtagacgtcgcacccggaagtaaagcggctccgtgacggagcggcggtgcgcgcggcagggcccggagtatcccgctttctttggaggaaaccaccgcatcagatctgcgctgcggcagaggcaggctacaaccactagcacggctgacgatggccctttctgcggagaccgagtcacacatctaccgagctctgcgtactgcttctggcgctgccgcccaccttgtggccctgggctttaccatctttgtggctgtgcttgccaggcctggctccagcctgttctcctggcacccggtgcttatgtctttggctttctccttcctgatgaccgaggcactactggtgttttctcctgagagttcgctgctgcactccctctcacggaaaggccgagcacgctgccactgggtgctgcagctgctggccctgctgtgtgcactgctgggcctcggccttgtcatcctccacaaagagcagcttggcaaagcccacctggttacgcggcatgggcaggcagggctgctggctgtgctgtgggcagggctgcagtgctcaggtggggtggggctgctctaccccaagctgctgccccgatggcccctggcgaagctcaagctataccatgctacttctgggctggtgggctacctgctgggtagtgccagcctcttgctgggcatgtgctcactctggttcactgcctctgtcactggtgcagcctggtacctggctgtattatgccctgtcctcaccagcttggtcattatgaaccaggtgagcaatgcctacctataccgcaagaggatccaaccatgagctcttcccagcctaggggaagcctggatttgcccctccatgtaggagctgggcctagggacctgttgaactctctcagctgagtcaggggacacctcaggcactgggacagttgggcatttggaggcccgtgtgtgaattcctgctcctcatgctggagtgcctcccatttccttcccctttctctgtcatcccagaggaacataggcatcatgtgtctggatgaagctggggctgcaagactgcctctcctgcaaggcagctcatacttgtactgtatgttcagaaattttaggagagaaaaaagtaaaaaatttgtaaaaaatgactg

SEQ ID NO: 4015 - protein, 222 aa, Homo sapiens; identical to SEQ ID NO: 409

SEQ ID NO: 4016 - DNA, 1743 bp, Homo sapiens
cgcgcagaggcgtccccacctcctgtgaacacttgtcagagacagcctcgaggcctgtgtcgctggggcacgcaagcttgccaatccctctgcccaatggcgcctgcgcagcgcgactcagaggcgtggctggggcgggggacggctcgtcccaggaagtcctgggtgggtagacgtcgcacccggaagtaaagcggctccgtgacggagcggcggtgcgcgcggcagggcccggagtatcccgctttctttggaggaaaccaccgcatcagatctgcgctgcggcagaggcaggcaagtccctagcgtggaggggcagcatgctggcagcacttggggaggcggtgcgctaagggattcacgctgtaactgggaccgcagcagggaactacaatttccatagtgctccgcgccctcccagctggctctactgccggcgacggcgtggtacacgctgggatttgtagtcttacatggctttgcgcctcctacctggaaggcgggccagcgattggtaccagttcagacatgggtacacgttgacaggccgccggccgtcgactggcatgttgtgaccattcctggtgctggtcttggtactgttctttcctaccataacttattggaagagggtggcattcctgccttgcagccttttctccagtgaggagtgaacagtgggcacctgagatcctggcccacgctactatgctttcaggctacaaccactagcacggctgacgatggccctttctgcggagaccgagtcacacatctaccgagctctgcgtactgcttctggcgctgccgcccaccttgtggccctgggctttaccatctttgtggctgtgcttgccaggcctggctccagcctgttctcctggcacccggtgcttatgtctttggctttctccttcctgatgaccgaggcactactggtgttttctcctgagagttcgctgctgcactccctctcacggaaaggccgagcacgctgccactgggtgctgcagctgctggccctgctgtgtgcactgctgggcctcggccttgtcatcctccacaaagagcagcttggcaaagcccacctggttacgcggcatgggcaggcagggctgctggctgtgctgtgggcagggctgcagtgctcaggtggggtggggctgctctaccccaagctgctgccccgatggcccctggcgaagctcaagctataccatgctacttctgggctggtgggctacctgctgggtagtgccagcctcttgctgggcatgtgctcactctggttcactgcctctgtcactggtgcagcctggtacctggctgtattatgccctgtcctcaccagcttggtcattatgaaccaggtgagcaatgcctacctataccgcaagaggatccaaccatgagctcttcccagcctaggggaagcctggatttgcccctccatgtaggagctgggcctagggacctgttgaactctctcagctgagtcaggggacacctcaggcactgggacagttgggcatttggaggcccgtgtgtgaattcctgctcctcatgctggagtgcctcccatttccttcccctttctctgtcatcccagaggaacataggcatcatgtgtctggatgaagctggggctgcaagactgcctctcctgcaaggcagctcatacttgtactgtatgttcagaaattttaggagagaaaaaagtaaaaaatttgtaaaaaatgactg

SEQ ID NO: 4017 - protein, 222 aa, Homo sapiens; identical to SEQ ID NO: 409

SEQ ID NO: 4018 - DNA, 1389 bp, Homo sapiens
cgcgcagaggcgtccccacctcctgtgaacacttgtcagagacagcctcgaggcctgtgtcgctggggcacgcaagcttgccaatccctctgcccaatggcgcctgcgcagcgcgactcagaggcgtggctggggcgggggacggctcgtcccaggaagtcctgggtgggtagacgtcgcacccggaagtaaagcggctccgtgacggagcggcggtgcgcgcggcagggcccggagtatcccgctttctttggaggaaaccaccgcatcagatctgcgctgcggcagaggcaggcaaccttttctccagtgaggagtgaacagtgggcacctgagatcctggcccacgctactatgctttcaggctacaaccactagcacggctgacgatggccctttctgcggagaccgagtcacacatctaccgagctctgcgtactgcttctggcgctgccgcccaccttgtggccctgggctttaccatctttgtggctgtgcttgccaggcctggctccagcctgttctcctggcacccggtgcttatgtctttggctttctccttcctgatgaccgaggcactactggtgttttctcctgagagttcgctgctgcactccctctcacggaaaggccgagcacgctgccactgggtgctgcagctgctggccctgctgtgtgcactgctgggcctcggccttgtcatcctccacaaagagcagcttggcaaagcccacctggttacgcggcatgggcaggcagggctgctggctgtgctgtgggcagggctgcagtgctcaggtggggtggggctgctctaccccaagctgctgccccgatggcccctggcgaagctcaagctataccatgctacttctgggctggtgggctacctgctgggtagtgccagcctcttgctgggcatgtgctcactctggttcactgcctctgtcactggtgcagcctggtacctggctgtattatgccctgtcctcaccagcttggtcattatgaaccaggtgagcaatgcctacctataccgcaagaggatccaaccatgagctcttcccagcctaggggaagcctggatttgcccctccatgtaggagctgggcctagggacctgttgaactctctcagctgagtcaggggacacctcaggcactgggacagttgggcatttggaggcccgtgtgtgaattcctgctcctcatgctggagtgcctcccatttccttcccctttctctgtcatcccagaggaacataggcatcatgtgtctggatgaagctggggctgcaagactgcctctcctgcaaggcagctcatacttgtactgtatgttcagaaattttaggagagaaaaaagtaaaaaatttgtaaaaaatgactg

SEQ ID NO: 4019 - protein, 222 aa, Homo sapiens; identical to SEQ ID NO: 409

SEQ ID NO: 4020 - DNA, 1705 bp, Homo sapiens
cgcgcagaggcgtccccacctcctgtgaacacttgtcagagacagcctcgaggcctgtgtcgctggggcacgcaagcttgccaatccctctgcccaatggcgcctgcgcagcgcgactcagaggcgtggctggggcgggggacggctcgtcccaggaagtcctgggtgggtagacgtcgcacccggaagtaaagcggctccgtgacggagcggcggtgcgcgcggcagggcccggagtatcccgctttctttggaggaaaccaccgcatcagatctgcgctgcggcagaggcaggcaagtccctagcgtggaggggcagcatgctggcagcacttggggaggcggtgcgctaagggattcacgctgtaactgggaccgcagcagggaactacaatttccatagtgctccgcgccctcccagctggctctactgccggcgacggcgtggtacacgctgggatttgtagtcttacatggctttgcgcctcctacctggaaggcgggccagcgattggtaccagttcagacatgggtacacgttgacaggccgccggccgtcgactggcatgttgtgaccattcctggtgctggtcttggtactgttctttcctaccataacttattggaagagggtggcattcctgccttgcagccttttctccagtgaggagtgaacagtgggcacctgagatcctggcccacgctactatgctttcaggctacaaccactagcacggctgacgatggccctttctgcggagaccgagtcacacatctaccgagctctgcgtactgcttctggcgctgccgcccaccttgtggccctgggctttaccatctttgtggctgtgcttgccaggcctggctccattctccttcctgatgaccgaggcactactggtgttttctcctgagagttcgctgctgcactccctctcacggaaaggccgagcacgctgccactgggtgctgcagctgctggccctgctgtgtgcactgctgggcctcggccttgtcatcctccacaaagagcagcttggcaaagcccacctggttacgcggcatgggcaggcagggctgctggctgtgctgtgggcagggctgcagtgctcaggtggggtggggctgctctaccccaagctgctgccccgatggcccctggcgaagctcaagctataccatgctacttctgggctggtgggctacctgctgggtagtgccagcctcttgctgggcatgtgctcactctggttcactgcctctgtcactggtgcagcctggtacctggctgtattatgccctgtcctcaccagcttggtcattatgaaccaggtgagcaatgcctacctataccgcaagaggatccaaccatgagctcttcccagcctaggggaagcctggatttgcccctccatgtaggagctgggcctagggacctgttgaactctctcagctgagtcaggggacacctcaggcactgggacagttgggcatttggaggcccgtgtgtgaattcctgctcctcatgctggagtgcctcccatttccttcccctttctctgtcatcccagaggaacataggcatcatgtgtctggatgaagctggggctgcaagactgcctctcctgcaaggcagctcatacttgtactgtatgttcagaaattttaggagagaaaaaagtaaaaaatttgtaaaaaatgactg

SEQ ID NO: 4021 - protein, 56 aa, Homo sapiens
MALSAETESHIYRALRTASGAAAHLVALGFTIFVAVLARPGSILLPDDRGTTGVFS

SEQ ID NO: 4022 - DNA, 1351 bp, Homo sapiens
cgcgcagaggcgtccccacctcctgtgaacacttgtcagagacagcctcgaggcctgtgtcgctggggcacgcaagcttgccaatccctctgcccaatggcgcctgcgcagcgcgactcagaggcgtggctggggcgggggacggctcgtcccaggaagtcctgggtgggtagacgtcgcacccggaagtaaagcggctccgtgacggagcggcggtgcgcgcggcagggcccggagtatcccgctttctttggaggaaaccaccgcatcagatctgcgctgcggcagaggcaggcaaccttttctccagtgaggagtgaacagtgggcacctgagatcctggcccacgctactatgctttcaggctacaaccactagcacggctgacgatggccctttctgcggagaccgagtcacacatctaccgagctctgcgtactgcttctggcgctgccgcccaccttgtggccctgggctttaccatctttgtggctgtgcttgccaggcctggctccattctccttcctgatgaccgaggcactactggtgttttctcctgagagttcgctgctgcactccctctcacggaaaggccgagcacgctgccactgggtgctgcagctgctggccctgctgtgtgcactgctgggcctcggccttgtcatcctccacaaagagcagcttggcaaagcccacctggttacgcggcatgggcaggcagggctgctggctgtgctgtgggcagggctgcagtgctcaggtggggtggggctgctctaccccaagctgctgccccgatggcccctggcgaagctcaagctataccatgctacttctgggctggtgggctacctgctgggtagtgccagcctcttgctgggcatgtgctcactctggttcactgcctctgtcactggtgcagcctggtacctggctgtattatgccctgtcctcaccagcttggtcattatgaaccaggtgagcaatgcctacctataccgcaagaggatccaaccatgagctcttcccagcctaggggaagcctggatttgcccctccatgtaggagctgggcctagggacctgttgaactctctcagctgagtcaggggacacctcaggcactgggacagttgggcatttggaggcccgtgtgtgaattcctgctcctcatgctggagtgcctcccatttccttcccctttctctgtcatcccagaggaacataggcatcatgtgtctggatgaagctggggctgcaagactgcctctcctgcaaggcagctcatacttgtactgtatgttcagaaattttaggagagaaaaaagtaaaaaatttgtaaaaaatgactg

SEQ ID NO: 4023 - protein, 56 aa, Homo sapiens; identical to SEQ ID NO: 4021

SEQ ID NO: 4024 - DNA, 883 bp, Homo sapiens
cgcgcagaggcgtccccacctcctgtgaacacttgtcagagacagcctcgaggcctgtgtcgctggggcacgcaagcttgccaatccctctgcccaatggcgcctgcgcagcgcgactcagaggcgtggctggggcgggggacggctcgtcccaggaagtcctgggtgggtagacgtcgcacccggaagtaaagcggctccgtgacggagcggcggtgcgcgcggcagggcccggagtatcccgctttctttggaggaaaccaccgcatcagatctgcgctgcggcagaggcaggctacaaccactagcacggctgacgatggccctttctgcggagaccgagtcacacatctaccgagctctgcgtactgcttctggcgctgccgcccaccttgtggccctgggctttaccatctttgtggctgtgcttgccaggcctggctccacaccaggaatcctccatcatcaatgaggacacagagctgggtgatgcctacgtgttgagatcctggtccctccacacacgctctaccagctgctgcgtgatgcccgtgtccaagatcaggttgtgcagaaggaagttgttgcctggaacaggaggggaggggtgggggtgggggcatcttcttgcagctccttgcccaccctcacccccacccttaaggctccaccaggagcctcctccatgacctggccctggcccaggcccagcccttagcttgtgcctgcttatttccacacctgcccggcctctgggttcctctgggctggccccatgctgcctgggcactgcccagagccagctgccctgccaggcactcacactgcttggagtctggagtcactttctccatgagctcaataaagtttttcaggaactcgg

SEQ ID NO: 4025 - protein, 50 aa, Homo sapiens
MALSAETESHIYRALRTASGAAAHLVALGFTIFVAVLARPGSTPGILHHQ

SEQ ID NO: 4026 - DNA, 2081 bp, Homo sapiens
agtaaagcggctccgtgacggagcggcggtgcgcgcggcagggcccggagtatcccgctttctttggaggaaaccaccgcatcagatctgcgctgcggcagaggcaggcaagtccctagcgtggaggggcagcatgctggcagcacttggggaggcggtgcgctaagggattcacgctgtaactgggaccgcagcagggaactacaatttccatagtgctccgcgccctcccagctggctctactgccggcgacggcgtggtacacgctgggatttgtagtcttacatggctttgcgcctcctacctggaaggcgggccagcgattggtaccagttcagacatgggtacacgttgacaggccgccggccgtcgactggcatgttgtgaccattcctggtgctggtcttggtactgttctttcctaccataacttattggaagagggtggcattcctgccttgcagccttttctccagtgaggagtgaacagtgggcacctgagatcctggcccacgctactatgctttcaggctacaaccactagcacggctgacgatggccctttctgcggagaccgagtcacacatctaccgagctctgcgtactgcttctggcgctgccgcccaccttgtggccctgggctttaccatctttgtggctgtgcttgccaggcctggctccagtctccacctatgtacagcgaacacctcaacagatggcatgtgactcgaccagtatgctcctagcttgacaagattttggaaaatttcacagtaccttctccgctcggcgtcttgagggtctgtgcctggcaggctgatggtgatggaggatggggcacccacatcgtagcgcttcaccgtcttctggcatatctttaccttcaccaggaggctgtgcaccaagttcgccagcaaacccaccacaggctgcaggatctcagggaagaaagtggcgaaagcaaagtggtcagccatgtcccctcggccccggctatggcgctggtagaagcgaagatatacccaactggagagcagcccgaagccataggaagccagcgccgggctctggagcagcgtggcgagccgcagcaggagcagcagcgccagcagcagcatgggcatcacactgacgcgcacctggggcactcgcaggaccacacagtcccccatggtttgcttgagtgccaccaggacgccacctaggaagcccaaggcgccgtggatacggacagtgaacaggtagaccaggttgaaggaagccatgtaggtgaggaggtaggcgaaggcccccagcagccctacagacacattcaccactgagaagaagatgagcagctccaaggccccccagaggggctccagcaaacgcccggccaccaccaccgttgtcaggctgatggccacgtcccacacatgctgctccatcagcccatgggtggccagggtccagatccagaagttgggaggaaagaggtagcccggggtgaccgccaggcagcctgtgtccacggcgaaggagagcaggtagaggaatagtaccgccgcacacagagccttcaccaccacgctggcgctggccagaatggcccccaagtgctggcgggcgcctggcagggcacgttgcatcttcctggcggctgtcggcctgagaaaagggtctggtaggccaggggcctccccggggcctcgtcctagtccggccccgatgggaggcccaggcccggcctagtcactggcctatggccctggtaaaggatccgcttccgatcgggtggggctctggtcccgaggggccgagtcgggccttgttgccgggccgcagcgtaggcccctcgcccgggacctgagggaaggccctggacggctgcggcacgcccgcctacccaccctgtaggccccgtgccaggctagcctggttggcgttgacctcagggctgggcctcctccatccactgcgaggcccttcggttcgcaaggggactggtgcctcgttctgtacccgagtcaagcctggtcagctcccgctcggcctggctcctggcttcgaccgtacctcttctctcggggggccgacaaac

SEQ ID NO: 4027 - protein, 56 aa, Homo sapiens
MALSAETESHIYRALRTASGAAAHLVALGFTIFVAVLARPGSSLHLCTANTSTDGM

SEQ ID NO: 4028 - DNA, 1158 bp, Homo sapiens
agtaaagcggctccgtgacggagcggcggtgcgcgcggcagggcccggagtatcccgctttctttggaggaaaccaccgcatcagatctgcgctgcggcagaggcaggcaagtccctagcgtggaggggcagcatgctggcagcacttggggaggcggtgcgctaagggattcacgctgtaactgggaccgcagcagggaactacaatttccatagtgctccgcgccctcccagctggctctactgccggcgacggcgtggtacacgctgggatttgtagtcttacatggctttgcgcctcctacctggaaggcgggccagcgattggtaccagttcagacatgggtacacgttgacaggccgccggccgtcgactggcatgttgtgaccattcctggtgctggtcttggtactgttctttcctaccataacttattggaagagggtggcattcctgccttgcagccttttctccagtgaggagtgaacagtgggcacctgagatcctggcccacgctactatgctttcaggctacaaccactagcacggctgacgatggccctttctgcggagaccgagtcacacatctaccgagctctgcgtactgcttctggcgctgccgcccaccttgtggccctgggctttaccatctttgtggctgtgcttgccaggcctggctccagcctgttctcctggcacccggtgcttatgtctttggctcaccaggaatcctccatcatcaatgaggacacagagctgggtgatgcctacgtgttgagatcctggtccctccacacacgctctaccagctgctgcgtgatgcccgtgtccaagatcaggttgtgcagaaggaagttgttgcctggaacaggaggggaggggtgggggtgggggcatcttcttgcagctccttgcccaccctcacccccacccttaaggctccaccaggagcctcctccatgacctggccctggcccaggcccagcccttagcttgtgcctgcttatttccacacctgcccggcctctgggttcctctgggctggccccatgctgcctgggcactgcccagagccagctgccctgccaggcactcacactgcttggagtctggagtcactttctccatgagctcaataaagtttttcaggaactcgg

SEQ ID NO: 4029 - protein, 135 aa, Homo sapiens
MALSAETESHIYRALRTASGAAAHLVALGFTIFVAVLARPGSSLFSWHPVLMSLAHQESSIINEDTELGDAYVLRSWSLHTRSTSCCVMPVSKIRLCRRKLLPGTGGEGWGWGHLLAAPCPPSPPPLRLHQEPPP

SEQ ID NO: 4030 - DNA, 1220 bp, Homo sapiens
cggtgcgcgcggcagggcccggagtatcccgctttctttggaggaaaccaccgcatcagatctgcgctgcggcagaggcaggcaagtccctagcgtggaggggcagcatgctggcagcacttggggaggcggtgcgctaagtgaggagtgaacagtgggcacctgagatcctggcccacgctactatgctttcaggctacaaccactagcacggctgacgatggccctttctgcggagaccgagtcacacatctaccgagctctgcgtactgcttctggcgctgccgcccaccttgtggccctgggctttaccatctttgtggctgtgcttgccaggcctggctccagcctgttctcctggcacccggtgcttatgtctttggctttctccttcctgatgaccgaggcactactggtgttttctcctgagagttcgctgctgcactccctctcacggaaaggccgagcacgctgccactgggtgctgcagctgctggccctgctgtgtgcactgctgggcctcggccttgtcatcctccacaaagagcagcttggcaaagcccacctggttacgcggcatgggcaggcagggctgctggctgtgctgtgggcagggctgcagtgctcaggtggggtggggctgctctaccccaagctgctgccccgatggcccctggcgaagctcaagctataccatgctacttctgggctggtgggctacctgctgggtagtgccagcctcttgctgggcatgtgctcactctggttcactgcctctgtcactggtgcagcctggtacctggctgtattatgccctgtcctcaccagcttggtcattatgaaccaggtgagcaatgcctacctataccgcaagaggatccaaccatgagctcttcccagcctaggggaagcctggatttgcccctccatgtaggagctgggcctagggacctgttgaactctctcagctgagtcaggggacacctcaggcactgggacagttgggcatttggaggcccgtgtgtgaattcctgctcctcatgctggagtgcctcccatttccttcccctttctctgtcatcccagaggaacataggcatcatgtgtctggatgaagctggggctgcaagactgcctctcctgcaaggcagctcatacttgtactgtatgttcagaaattttaggagagaaaaaagtaaaaaatttgtaaaaaatgactg

SEQ ID NO: 4031 - protein, 222 aa, Homo sapiens; identical to SEQ ID NO: 409

SEQ ID NO: 4032 - DNA, 654 bp, Homo sapiens
tcctgatgaccgaggcactactggtgttttctcctgagagttcgctgctgcactccctctcacggaaaggccgagcacgctgccactgggtgctgcagctgctggccctgctgtgtgcactgctgggcctcggccttgtcatcctccacaaagagcagcttggcaaagcccacctggttacgcggcatgggcaggcagggctgctggctgtgctgtgggcagggctgcagtgctcaggtggggtggggctgctctaccccaagctgctgccccgatggcccctggcgaagctcaagctataccgcaagaggatccaaccatgagctcttcccagcctaggggaagcctggatttgcccctccatgtaggagctgggcctagggacctgttgaactctctcagctgagtcaggggacacctcaggcactgggacagttgggcatttggaggcccgtgtgtgaattcctgctcctcatgctggagtgcctcccatttccttcccctttctctgtcatcccagaggaacataggcatcatgtgtctggatgaagctggggctgcaagactgcctctcctgcaaggcagctcatacttgtactgtatgttcagaaattttaggagagaaaaaagtaaaaaatttgtaaaaaatgactg

SEQ ID NO: 4033 - protein, 105 aa, Homo sapiens
MTEALLVFSPESSLLHSLSRKGRARCHWVLQLLALLCALLGLGLVILHKEQLGKAHLVTRHGQAGLLAVLWAGLQCSGGVGLLYPKLLPRWPLAKLKLYRKRIQP

SEQ ID NO: 4034 - DNA, 1546 bp, Homo sapiens
gccataggccagtgactaggccgggcctgggcctcccatcggggccggactaggacgaggccccggggaggcccctggcctaccagacccttttctcaggccgacagccgccaggaagatgcaacgtgccctgccaggcgcccgccagcacttgggggccattctggccagcgccagcgtggtggtgaaggctctgtgtgcggcggtactattcctctacctgctctccttcgccgtggacacaggctgcctggcggtcaccccgggctacctctttcctcccaacttctggatctggaccctggccacccatgggctgatggagcagcatgtgtgggacgtggccatcagcctgacaacggtggtggtggccgggcgtttgctggagcccctctggggggccttggagctgctcatcttcttctcagtggtgaatgtgtctgtagggctgctgggggccttcgcctacctcctcacctacatggcttccttcaacctggtctacctgttcactgtccgtatccacggcgccttgggcttcctaggtggcgtcctggtggcactcaagcaaaccatgggggactgtgtggtcctgcgagtgccccaggtgcgcgtcagtgtgatgcccatgctgctgctggcgctgctgctcctgctgcggctcgccacgctgctccagagcccggcgctggcttcctatggcttcgggctgctctccagttgggtatatcttcgcttctaccagcgccatagccggggccgaggggacatggctgaccactttgctttcgccactttcttccctgagatcctgcagcctgtggtgggtttgctggcgaacttggtgcacagcctcctggtgaaggtaaagatatgccagaagacggtgaagcgctacgatgtgggtgccccatcctccatcaccatcagcctgccaggcacagaccctcaagacgccgagcggagaaggcaactggccctgaaggcactcaatgagcggctgaagagagtggaagaccagtccatctggcccagcatggatgatgatgaagaggagtctggggccaaggtggacagccccctgccctcagacaaagctcccacacccccagggaagggggctgccccagaatccagtctaatcaccttcgaggcagctcccccgacgctgtaatccaggccctcatctgaggtaagaatgtacatcagctggcagccccaagcaagtggctgcagggacactgatgccacagctcctgggccggccctcacatctgaaactggttgccgagagccctgagccaaggcaaggatttgccaaaaatgttctgggggcccagcaaatgcaggagccgacctggggctgcacatccctgcccatccccagaaagactgttcctgtcaggatttgtttccctctgctgtggcggtgactgcttctggaccagaacagctccagctcccaggtattttctacaggaccacttgagtgggcagccaagcccaggctcgcagtatcaataaagcagttctctgaggaatgact

SEQ ID NO: 4035 - protein, 351 aa, Homo sapiens; identical to SEQ ID NO: 411

SEQ ID NO: 4036 - DNA, 1891 bp, Homo sapiens
ggccccccgagagaagaggtacggtcgaagccaggagccaggccgagcgggagctgaccaggcttgactcgggtacagaacgaggcaccagtccccttgcgaaccgaagggcctcgcagtggatggaggaggcccagccctgaggtcaacgccaaccaggctagcctggcacggggcctacagggtgggtaggcgggcgtgccgcagccgtccagggccttccctcaggtcccgggcgaggggcctacgctgcggcccggcaacaaggcccgactcggcccctcgggaccagagccccacccgatcggaagcggatcctttaccagggccataggccagtgactaggccgggcctgggcctcccatcggggccggactaggacgaggccccggggaggcccctggcctaccagacccttttctcaggccgacagccgccaggaagatgcaacgtgccctgccaggcgcccgccagcacttgggggccattctggccagcgccagcgtggtggtgaaggctctgtgtgcggcggtactattcctctacctgctctccttcgccgtggacacaggctgcctggcggtcaccccgggctacctctttcctcccaacttctggatctggaccctggccacccatgggctgatggagcagcatgtgtgggacgtggccatcagcctgacaacggtggtggtggccgggcgtttgctggagcccctctggggggccttggagctgctcatcttcttctcagtggtgaatgtgtctgtagggctgctgggggccttcgcctacctcctcacctacatggcttccttcaacctggtctactgctctccagttgggtatatcttcgcttctaccagcgccatagccggggccgaggggacatggctgaccactttgctttcgccactttcttccctgagatcctgcagcctgtggtgggtttgctggcgaacttggtgcacagcctcctggtgaaggtaaagatatgccagaagacggtgaagcgctacgatgtgggtgccccatcctccatcaccatcagcctgccaggcacagaccctcaagacgccgagcggagaaggcaactggccctgaaggcactcaatgagcggctgaagagagtggaagaccagtccatctggcccagcatggatgatgatgaagaggagtctggggccaaggtggacagccccctgccctcagacaaagctcccacacccccagggaagggggctgccccagaatccagtctaatcaccttcgaggcagctcccccgacgctgtaactccagaccaccttgagtgtggcacctcccctcccaagccccccttgacatcctctcagctactccagggcacctgactgctctgaggagagggaagaaggcctgctggggctttccatggccttctgctgtttctcgccaacactacccaggactcttgctacctggttccaactccagacaaccactatgccaggcccggagcctctgaggcatcggccagtccaggccctcatctgaggtaagaatgtacatcagctggcagccccaagcaagtggctgcagggacactgatgccacagctcctgggccggccctcacatctgaaactggttgccgagagccctgagccaaggcaaggatttgccaaaaatgttctgggggcccagcaaatgcaggagccgacctggggctgcacatccctgcccatccccagaaagactgttcctgtcaggatttgtttccctctgctgtggcggtgactgcttctggaccagaacagctccagctcccaggtattttctacaggaccacttgagtgggcagccaagcccaggctcgcagtatcaataaagcagttctctgaggaatgact

SEQ ID NO: 4037 - protein, 179 aa, Homo sapiens
MQRALPGARQHLGAILASASVVVKALCAAVLFLYLLSFAVDTGCLAVTPGYLFPPNFWIWTLATHGLMEQHVWDVAISLTTVVVAGRLLEPLWGALELLIFFSVVNVSVGLLGAFAYLLTYMASFNLVYCSPVGYIFASTSAIAGAEGTWLTTLLSPLSSLRSCSLWWVCWRTWCTASW

SEQ ID NO: 4038 - DNA, 2162 bp, Homo sapiens
aagacaggcgcttagaggacagcccgctgccgccggggacgcgcaggcgcagcacccctgtttgtcggccccccgagagaagaggtacggtcgaagccaggagccaggccgagcgggagctgaccaggcttgactcgggtacagaacgaggcaccagtccccttgcgaaccgaagggcctcgcagtggatggaggaggcccagccctgaggtcaacgccaaccaggctagcctggcacggggcctacagggtgggtaggcgggcgtgccgcagccgtccagggccttccctcaggtcccgggcgaggggcctacgctgcggcccggcaacaaggcccgactcggcccctcgggaccagagccccacccgatcggaagcggatcctttaccagggccataggccagtgactaggccgggcctgggcctcccatcggggccggactaggacgaggccccggggaggcccctggcctaccagacccttttctcaggccgacagccgccaggaagatgcaacgtgccctgccaggcgcccgccagcacttgggggccattctggccagcgccagcgtggtggtgaaggctctgtgtgcggcggtactattcctctacctgctctccttcgccgtggacacaggctgcctggcggtcaccccgggctacctctttcctcccaacttctggatctggaccctggccacccatgggctgatggagcagcatgtgtgggacgtggccatcagcctgacaacggtggtggtggccgggcgtttgctggagcccctctggggggccttggagctgctcatcttcttctcagtggtgaatgtgtctgtagggctgctgggggccttcgcctacctcctcacctacatggcttccttcaacctggtctacctgttcactgtccgtatccacggcgccttgggcttcctaggtggcgtcctggtggcactcaagcaaaccatgggggactgtgtggtcctgcgagtgccccaggtgcgcgtcagtgtgatgcccatgctgctgctggcgctgctgctcctgctgcggctcgccacgctgctccagagcccggcgctggcttcctatggcttcgggctgctctccagttgggtatatcttcgcttctaccagcgccatagccggggccgaggggacatggctgaccactttgctttcgccactttcttccctgagatcctgcagcctgtggtgggtttgctggcgaacttggtgcacagcctcctggtgaaggtaaagatatgccagaagacggtgaagcgctacgatgtgggtgccccatcctccatcaccatcagcctgccaggcacagaccctcaagacgccgagcggagaaggcaactggccctgaaggcactcaatgagcggctgaagagagtggaagaccagtccatctggcccagcatggatgatgatgaagaggagtctggggccaaggtggacagccccctgccctcagacaaagctcccacacccccagggaagggggctgccccagaatccagtctaatcaccttcgaggcagctcccccgacgctgtaactccagaccaccttgagtgtggcacctcccctcccaagccccccttgacatcctctcagctactccagggcacctgactgctctgaggagagggaagaaggcctgctggggctttccatggccttctgctgtttctcgccaacactacccaggactcttgctacctggttccaactccagacaaccactatgccaggcccggagcctctgaggcatcggccagtccaggccctcatctgaggtaagaatgtacatcagctggcagccccaagcaagtggctgcagggacactgatgccacagctcctgggccggccctcacatctgaaactggttgccgagagccctgagccaaggcaaggatttgccaaaaatgttctgggggcccagcaaatgcaggagccgacctggggctgcacatccctgcccatccccagaaagactgttcctgtcaggatttgtttccctctgctgtggcggtgactgcttctggaccagaacagctccagctcccaggtattttctacaggaccacttgagtgggcagccaagcccaggctcgcagtatcaataaagcagttctctgaggaatgact

SEQ ID NO: 4039 - protein, 351 aa, Homo sapiens; identical to SEQ ID NO: 411

SEQ ID NO: 4040 - DNA, 598 bp, Homo sapiens
agagagtggaagaccagtccatctggcccagcatggatgatgatgaagaggagtctggggccaaggtggacagccccctgccctcagacaaagctcccacacccccagggaagggggctgccccagaatccagtctaatcaccttcgaggcagctcccccgacgctgtaactccagaccaccttgagtgtggcacctcccctcccaagccccccttgacatcctctcagctactccagggcacctgactgctctgaggagagggaagaaggcctgctggggctttccatggccttctgctgtttctcgccaacactacccaggactcttgctacctggttccaactccagacaaccactatgccaggcccggagcctctgaggcatcggccagtccaggccctcatctgaggtaagaatgtacatccctgcccatccccagaaagactgttcctgtcaggatttgtttccctctgctgtggcggtgactgcttctggaccagaacagctccagctcccaggtattttctacaggaccacttgagtgggcagccaagcccaggctcgcagtatcaataaagcagttctctgaggaatga

SEQ ID NO: 4041 - protein, 41 aa, Homo sapiens [sequence omitted]

SEQ ID NO: 4042 - DNA, 1210 bp, Homo sapiens
agcacccctgtttgtcggccccccgagagaagaggtacggtcgaagccaggagccaggccgagcgggagctgaccaggcttgactcgggtacagaacgaggcaccagtccccttgcgaaccgaagggcctcgcagtggatggaggaggcccagccctgaggtcaacgccaaccaggctagcctggcacggggcctacagggtgggtaggcgggcgtgccgcagccgtccagggccttccctcaggtcccgggcgaggggcctacgctgcggcccggcaacaaggcccgactcggcccctcgggaccagagccccacccgatcggaagcggatcctttaccagggccataggccagaagatgcaacgtgccctgccaggcgcccgccagcacttgggggccattctggccagcgccagcgtggtggtgaaggctctgtgtgcggcggtactattcctctacctgctctccttcgccgtggacacaggctgcctggcggtcaccccgggctacctctttcctcccaacttctggatctggaccctggccacccatgggctgatggagcagcatgtgtgggacgtggccatcagcctgacaacggtggtggtggccgggcgtttgctggagcccctctggggggccttggagctgctcatcttcttctcagtggtgaatgtgtctgtagggctgctgggggccttcgcctacctcctcacctacatggcttccttcaacctggtctacctgttcactgtccgtatccacggcgccttgggcttcctaggtggcgtcctggtggcactcaagcaaaccatgggggactgtgtggtcctgcgagtgccccaggtgcgcgtcagtgtgatgcccatgctgctgctggcgctgctgctcctgctgcggctcgccacgctgctccagagcccggcgctggcttcctatggcttcgggctgctctccagttgggtatatcttcgcttctaccagcgccatagccggggccgaggggacatggctgaccactttgctttcgccactttcttccctgagatcctgcagcctgtggtgggtttgctggcgaacttggtgcacagcctcctggtgaaggtaaagatatgccagaagacggtgaagcgctacgatgtgggtgccccatcctccatcaccatcagcctgccaggcacagaccctcaagacgccgagcggagaagg

SEQ ID NO: 4043 - protein, 283 aa, Homo sapiens
MQRALPGARQHLGAILASASVVVKALCAAVLFLYLLSFAVDTGCLAVTPGYLFPPNFWIWTLATHGLMEQHVWDVAISLTTVVVAGRLLEPLWGALELLIFFSVVNVSVGLLGAFAYLLTYMASFNLVYLFTVRIHGALGFLGGVLVALKQTMGDCVVLRVPQVRVSVMPMLLLALLLLLRLATLLQSPALASYGFGLLSSWVYLRFYQRHSRGRGDMADHFAFATFFPEILQPVVGLLANLVHSLLVKVKICQKTVKRYDVGAPSSITISLPGTDPQDAERR

SEQ ID NO: 4044 - DNA, 1527 bp, Homo sapiens
tctggtctgcgccttgggatggggagtcccaaagcgggacgccgcaggtgtttggcacccaaatcacatctcacctccgaactgttcaagtgtccccagacccttcttgcctgctgggctccccccagtgggatgggacagggaggccacacgcactggtgccaaaaccaggcctctgctgccgcccttcctggaggctgcctatgttgggggggaccctgcctcagctgacccggcctctctgccccacccaagcccaaacttggtttctgtgagaatagtggaggaaggtgagatggccagtttgaagcctgtgcctcccagcttaaatcctagcaggagagaggctctggggcagcccccatgggctcctgcccctttcaggcctacagccacatccccaagcccaccaggtgtcaggatagtcacagtgataccagttcagacactaccccatatacacctggaacattgaggatggaaactggactcacattcgacataccccactgggcacacgcacaaacacacacactatggggtggggtgggtgtaggggcttacaaagccttacacagggcgaggggttggtgggagggttggcacctgcacactccatctcctgctcaccacctgcctctaatctgagctgcagcctggctggtcctcccatttctaaagctgaatgtcaaacagtgccaaatgctggggcagggggtgaagaaccctctgtcccacccctagccaccagtgtcctccaagtgccccctcacctctccaggtgctcattgtaaccatttctcactagtgtcaggcccccagtgggaccacatgccactgcctgcacctttcggcagaggaacccccaccagacatcaccctttgccttagcaggggtgactttgtctctcctggctgggccatccttccgccagtggggaactgagggcaaggggatatagtgatggggctcagatggactgggaggagggggagggtgatgcattaattaatggcttcgttaattaatgtcatgttgcttgtcgctttctcagtgtgtgtgtgtggtccatgcccactgctggtgccagggtgggtgtccatgtgcacccggcctggatgccagctgtgtccttcgggggcgtgcgtgtaactgtagtgtagtcaggtgctcaatggagaatataaacatatacagaaaaatatatattttaagtttaaaaaacagaaaaacagacaaaacaatccccatcaggtagctgtctaacccccagctgggtctaatccttctcattacccacccgacctggctgcccctcaccttgggctgggggactggggggccatttccttttctctgccctttttttgttgttctattttgtacagacaagttggaaaaacaacagcgacaaaaaagtcaagaaactttgtaaaatatcgtgtgtgtgattccttgtaaaatattttcaaatggtttattacagaagatcagttattaaataatgttcatattttcacttcaaa

SEQ ID NO: 4045 - protein, 94 aa, Homo sapiens
MGSCPFQAYSHIPKPTRCQDSHSDTSSDTTPYTPGTLRMETGLTFDIPHWAHAQTHTLWGGVGVGAYKALHRARGWWEGWHLHTPSPAHHLPLI

SEQ ID NO: 4046 - DNA, 2582 bp, Homo sapiens
gaaggtgctccctggccgggagggctcagaagagaagtagggcatggcatcgtcctctgctgaccacctgcactcggctccccgtgcgctgcaggtccctgttccagcagcttctctacggcctcatctaccacagctggttccaagcagaccccgcggaggccgaggggagccccgagacgcgcgagagcagctgcgtcatgaaacagacccagtactacttcggctcggtaaacgcctcctacaacgccatcatcgactgcggaaactgctccaggctgttccacgcgcagagactgaccaacaccaatcttctctttgtggtggccgagaagccgctgtgcagccagtgcgaggctggccggctgctgcagaaggagacgcactgtatcctgcccccgccctccccgccgcccgctccccctctgccccgcgcgccccctccgtgccgccgccgccgtccgcctccttgactccccacccatgcccagcggacggcccggagcagtgtgagctagtgcagagaccgcgataccggagaggcccgcacatctgcttcgactacaacgcgacagaagatacctcagactgtggccgcggggcctccttcccgccgtcgctgggcgtcctggtctccctgcaactgctgctcctcctgggcctgccgccccggccgcagcctcaagtcctcgtccacgcctctcgccgcctctgagcaccctgccccaccccacctccactcccacctcacccggcctcttcgcctttcccaccctcctgccccacactccccgccttagagcctcgtccctccctcactgaaggacctgagctggccaggccctgagagtctggtctgcgccttgggatggggagtcccaaagcgggacgccgcaggtgtttggcacccaaatcacatctcacctccgaactgttcaagtgtccccagacccttcttgcctgctgggctccccccagtgggatgggacagggaggccacacgcactggtgccaaaaccaggcctctgctgccgcccttcctggaggctgcctatgttgggggggaccctgcctcagctgacccggcctctctgccccacccaagcccaaacttggtttctgtgagaatagtggaggaaggtgagatggccagtttgaagcctgtgcctcccagcttaaatcctagcaggagagaggctctggggcagcccccatgggctcctgcccctttcaggcctacagccacatccccaagcccaccaggtgtcaggatagtcacagtgataccagttcagacactaccccatatacacctggaacattgaggatggaaactggactcacattcgacataccccactgggcacacgcacaaacacacacactatggggtggggtgggtgtaggggcttacaaagccttacacagggcgaggggttggtgggagggttggcacctgcacactccatctcctgctcaccacctgcctctaatctgagctgcagcctggctggtcctcccatttctaaagctgaatgtcaaacagtgccaaatgctggggcagggggtgaagaaccctctgtcccacccctagccaccagtgtcctccaagtgccccctcacctctccaggtgctcattgtaaccatttctcactagtgtcaggcccccagtgggaccacatgccactgcctgcacctttcggcagaggaacccccaccagacatcaccctttgccttagcaggggtgactttgtctctcctggctgggccatccttccgccaatctggcccttacacactcaggcctgtgcccactccctatctccttcccacccctacacacacactccctgcttgcaggaggccaaactgtccctcccttgctgaacacacacacacacacacacacacaggtggggactgggcacagctcttcacaccattcattctggtcatttcccccaaaggcatcccagcctgggggccagtggggaactgagggcaaggggatatagtgatggggctcagatggactgggaggagggggagggtgatgcattaattaatggcttcgttaattaatgtcatgttgcttgtcgctttctcagtgtgtgtgtgtggtccatgcccactgctggtgccagggtgggtgtccatgtgcacccggcctggatgccagctgtgtccttcgggggcgtgcgtgtaactgtagtgtagtcaggtgctcaatggagaatataaacatatacagaaaaatatatattttaagtttaaaaaacagaaaaacagacaaaacaatccccatcaggtagctgtctaacccccagctgggtctaatccttctcattacccacccgacctggctgcccctcaccttgggctgggggactggggggccatttccttttctctgccctttttttgttgttctattttgtacagacaagttggaaaaacaacagcgacaaaaaagtcaagaaactttgtaaaatatcgtgtgtgtgattccttgtaaaatattttcaaatggtttattacagaagatcagttattaaataatgttcatattttcacttcaaa

SEQ ID NO: 4047 - protein, 223 aa, Homo sapiens
MASSSADHLHSAPRALQVPVPAASLRPHLPQLVPSRPRGGRGEPRDAREQLRHETDPVLLRLGKRLLQRHHRLRKLLQAVPRAETDQHQSSLCGGREAAVQPVRGWPAAAEGDALYPAPALPAARSPSAPRAPSVPPPPSASLTPHPCPADGPEQCELVQRPRYRRGPHICFDYNATEDTSDCGRGASFPPSLGVLVSLQLLLLLGLPPRPQPQVLVHASRRL

SEQ ID NO: 4048 - DNA, 5510 bp, Homo sapiens
agagcgcttggagccagcgctgcagggagatagcagcgcgcagcccgcagaggcgctgcggcccgtgcagccccggaggcccctcgcggagaaggcggcggcggaggagaggccgagttaccgcccgccgcccgcgcccccccaaccccgccgccgccgccgccgccgccactgccccccctccccgcggcgccgcatcttgaatggaaacatggcggtgccggctcggacctgcggcgcctctcggcccggcccagcgcggactgcgcgcccctggcccggctgcggcccccaccctggccccggcacccggcgcccgacgtccgggcccccgcgcccgctgtggctgctgctgccgcttctaccgctgctcgccgcccccggcgcctctgcctacagcttcccccagcagcacacgatgcagcactgggcccggcgtctggagcaggaggtcgacggcgtgatgcggatttttggaggcgtccagcagctccgtgagatttacaaggacaaccggaacctgttcgaggtacaggagaatgagcctcagaagttggtggagaaggtggcaggggacattgagagccttctggacaggaaggtgcaggccctgaagagactggctgatgctgcagagaacttccagaaagcacaccgctggcaggacaacatcaaggaggaagacatcgtgtactatgacgccaaggctgacgctgagctggacgaccctgagagtgaggatgtggaaagggggtctaaggccagcaccctaaggctggacttcatcgaggacccaaacttcaagaacaaggtcaactattcatacgcggctgtacagatccctacggacatctacaaaggctccactgtcatcctcaatgagctcaactggacagaggccctggagaatgtgttcatggaaaaccgcagacaagaccccacactgctgtggcaggtcttcggcagcgccacaggagtcactcgctactacccggccaccccgtggcgagcccccaagaagatcgacctgtacgatgtccgaaggagaccctggtatatccagggggcctcgtcacccaaagacatggtcatcatcgtggatgtgagtggcagtgtgagcggcctgaccctgaagctgatgaagacatctgtctgcgagatgctggacacgctgtctgatgatgactatgtgaatgtggcctcgttcaacgagaaggcacagcctgtgtcatgcttcacacacctggtgcaggccaatgtgcgcaacaagaaggtgttcaaggaagctgtgcagggcatggtggccaagggcaccacaggctacaaggccggctttgagtatgcctttgaccagctgcagaactccaacatcactcgggccaactgcaacaagatgatcatgatgttcacggatggtggtgaggaccgcgtgcaggacgtctttgagaagtacaattggccaaaccggacggtgcgcgtgtttactttctccgtggggcagcataactatgacgtcacaccgctgcagtggatggcctgtgccaacaaaggctactattttgagatcccttccatcggagccatccgcatcaacacacaggaatatctagatgtgttgggcaggcccatggtgctggcaggcaaggaggccaagcaggtgcagtggaccaacgtgtatgaggatgcactgggactggggttggtggtaacagggaccctccctgttttcaacctgacacaggatggccctggggaaaagaagaaccagctgatcctgggcgtgatgggcattgacgtggctctgaatgacatcaagaggctgacccccaactacacgcttggagccaacggctatgtgtttgccattgacctgaacggctacgtgttgctgcaccccaatctcaagccccagaccaccaacttccgggagcctgtgactctggacttcctggatgcggagctagaggatgagaacaaggaagagatccgtcggagcatgattgatggcaacaagggccacaagcagatcagaacgttggtcaagtccctggatgagaggtacatagatgaggtgacacggaactacacctgggtgcctataaggagcactaactacagcctggggctggtgctcccaccctacagcaccttctacctccaagccaatctcagtgaccagatcctgcaggtcaagtattttgagttcctgctccccagcagctttgagtctgaaggacacgttttcattgctcccagagagtactgcaaggacctgaatgcctcagacaacaacaccgagttcctgaaaaactttattgagctcatggagaaagtgactccagactccaagcagtgcaacaacttccttctgcacaacctgatcttggacacgggcatcacgcagcagctggtagagcgtgtgtggagggaccaggatctcaacacgtacagcctactggccgtgttcgctgccacagacggtggcatcacccgagtcttccccaacaaggcagctgaggactggacagagaaccctgagcccttcaatgccagcttctaccgccgcagcctggataaccacggttatgtcttcaagcccccacaccaggatgccctgttaaggccgctggagctggagaatgacactgtgggcatcctcgtcagcacagctgtggagctcagcctaggcaggcgcacactgaggccagcagtggtgggcgtcaagctggacctagaggcttgggctgagaagttcaaggtgctagccagcaaccgtacccaccaagaccagcctcagaagtgcggccccaacagccactgtgagatggactgcgaggttaacaatgaggacttactctgtgtcctcattgatgatggaggattcctggtgctgtcaaaccagaaccatcagtgggaccaggtgggcaggttcttcagtgaggtggatgccaacctgatgctggcactctacaataactccttctacacccgcaaggagtcctatgactatcaggcagcctgtgcccctcagccccctggcaacctgggtgctgcaccccggggtgtctttgtgcccaccgttgcagatttccttaacctggcctggtggacctctgctgccgcctggtccctgttccagcagcttctctacggcctcatctaccacagctggttccaagcagaccccgcggaggccgaggggagccccgagacgcgcgagagcagctgcgtcatgaaacagacccagtactacttcggctcggtaaacgcctcctacaacgccatcatcgactgcggaaactgctccaggctgttccacgcgcagagactgaccaacaccaatcttctctttgtggtggccgagaagccgctgtgcagccagtgcgaggctggccggctgctgcagaaggagacgcactcggacggcccggagcagtgtgagctagtgcagagaccgcgataccggagaggcccgcacatctgcttcgactacaacgcgacagaagatacctcagactgtggccgcggggcctccttcccgccgtcgctgggcgtcctggtctccctgcaactgctgctcctcctgggcctgccgccccggccgcagcctcaagtcctcgtccacgcctctcgccgcctctgagcaccctgccccaccccacctccactcccacctcacccggcctcttcgcctttcccaccctcctgccccacactccccgccttagagcctcgtccctccctcactgaaggacctgagctggccaggccctgagagtctggtctgcgccttgggatggggagtcccaaagcgggacgccgcaggtgtttggcacccaaatcacatctcacctccgaactgttcaagtgtccccagacccttcttgcctgctgggctccccccagtgggatgggacagggaggccacacgcactggtgccaaaaccaggcctctgctgccgcccttcctggaggctgcctatgttgggggggaccctgcctcagctgacccggcctctctgccccacccaagcccaaacttggtttctgtgagaatagtggaggaaggtgagatggccagtttgaagcctgtgcctcccagcttaaatcctagcaggagagaggctctggggcagcccccatgggctcctgcccctttcaggcctacagccacatccccaagcccaccaggtgtcaggatagtcacagtgataccagttcagacactaccccatatacacctggaacattgaggatggaaactggactcacattcgacataccccactgggcacacgcacaaacacacacactatggggtggggtgggtgtaggggcttacaaagccttacacagggcgaggggttggtgggagggttggcacctgcacactccatctcctgctcaccacctgcctctaatctgagctgcagcctggctggtcctcccatttctaaagctgaatgtcaaacagtgccaaatgctggggcagggggtgaagaaccctctgtcccacccctagccaccagtgtcctccaagtgccccctcacctctccaggtgctcattgtaaccatttctcactagtgtcaggcccccagtgggaccacatgccactgcctgcacctttcggcagaggaacccccaccagacatcaccctttgccttagcaggggtgactttgtctctcctggctgggccatccttccgccaatctggcccttacacactcaggcctgtgcccactccctatctccttcccacccctacacacacactccctgcttgcaggaggccaaactgtccctcccttgctgaacacacacacacacacacacacacaggtggggactgggcacagctcttcacaccattcattctggtcatttcccccaaaggcatcccagcctgggggccagtggggaactgagggcaaggggatatagtgatggggctcagatggactgggaggagggggagggtgatgcattaattaatggcttcgttaattaatgtcatgttgcttgtcgctttctcagtgtgtgtgtgtggtccatgcccactgctggtgccagggtgggtgtccatgtgcacccggcctggatgccagctgtgtccttcgggggcgtgcgtgtaactgtagtgtagtcaggtgctcaatggagaatataaacatatacagaaaaatatatattttaagtttaaaaaacagaaaaacagacaaaacaatccccatcaggtagctgtctaacccccagctgggtctaatccttctcattacccacccgacctggctgcccctcaccttgggctgggggactggggggccatttccttttctctgccctttttttgttgttctattttgtacagacaagttggaaaaacaacagcgacaaaaaagtcaagaaactttgtaaaatatcgtgtgtgtgattccttgtaaaatattttcaaatggtttattacagaagatcagttattaaataatgttcatattttcacttcaaa

SEQ ID NO: 4049 - protein, 1143 aa, Homo sapiens; identical to SEQ ID NO: 415

SEQ ID NO: 4050 - DNA, 5395 bp, Homo sapiens
agagcgcttggagccagcgctgcagggagatagcagcgcgcagcccgcagaggcgctgcggcccgtgcagccccggaggcccctcgcggagaaggcggcggcggaggagaggccgagttaccgcccgccgcccgcgcccccccaaccccgccgccgccgccgccgccgccactgccccccctccccgcggcgccgcatcttgaatggaaacatggcggtgccggctcggacctgcggcgcctctcggcccggcccagcgcggactgcggcgcctctgcctacagcttcccccagcagcacacgatgcagcactgggcccggcgtctggagcaggaggtcgacggcgtgatgcggatttttggaggcgtccagcagctccgtgagatttacaaggacaaccggaacctgttcgaggtacaggagaatgagcctcagaagttggtggagaaggtggcaggggacattgagagccttctggacaggaaggtgcaggccctgaagagactggctgatgctgcagagaacttccagaaagcacaccgctggcaggacaacatcaaggaggaagacatcgtgtactatgacgccaaggctgacgctgagctggacgaccctgagagtgaggatgtggaaagggggtctaaggccagcaccctaaggctggacttcatcgaggacccaaacttcaagaacaaggtcaactattcatacgcggctgtacagatccctacggacatctacaaaggctccactgtcatcctcaatgagctcaactggacagaggccctggagaatgtgttcatggaaaaccgcagacaagaccccacactgctgtggcaggtcttcggcagcgccacaggagtcactcgctactacccggccaccccgtggcgagcccccaagaagatcgacctgtacgatgtccgaaggagaccctggtatatccagggggcctcgtcacccaaagacatggtcatcatcgtggatgtgagtggcagtgtgagcggcctgaccctgaagctgatgaagacatctgtctgcgagatgctggacacgctgtctgatgatgactatgtgaatgtggcctcgttcaacgagaaggcacagcctgtgtcatgcttcacacacctggtgcaggccaatgtgcgcaacaagaaggtgttcaaggaagctgtgcagggcatggtggccaagggcaccacaggctacaaggccggctttgagtatgcctttgaccagctgcagaactccaacatcactcgggccaactgcaacaagatgatcatgatgttcacggatggtggtgaggaccgcgtgcaggacgtctttgagaagtacaattggccaaaccggacggtgcgcgtgtttactttctccgtggggcagcataactatgacgtcacaccgctgcagtggatggcctgtgccaacaaaggctactattttgagatcccttccatcggagccatccgcatcaacacacaggaatatctagatgtgttgggcaggcccatggtgctggcaggcaaggaggccaagcaggtgcagtggaccaacgtgtatgaggatgcactgggactggggttggtggtaacagggaccctccctgttttcaacctgacacaggatggccctggggaaaagaagaaccagctgatcctgggcgtgatgggcattgacgtggctctgaatgacatcaagaggctgacccccaactacacgcttggagccaacggctatgtgtttgccattgacctgaacggctacgtgttgctgcaccccaatctcaagccccagaccaccaacttccgggagcctgtgactctggacttcctggatgcggagctagaggatgagaacaaggaagagatccgtcggagcatgattgatggcaacaagggccacaagcagatcagaacgttggtcaagtccctggatgagaggtacatagatgaggtgacacggaactacacctgggtgcctataaggagcactaactacagcctggggctggtgctcccaccctacagcaccttctacctccaagccaatctcagtgaccagatcctgcaggtcaagtattttgagttcctgctccccagcagctttgagtctgaaggacacgttttcattgctcccagagagtactgcaaggacctgaatgcctcagacaacaacaccgagttcctgaaaaactttattgagctcatggagaaagtgactccagactccaagcagtgcaacaacttccttctgcacaacctgatcttggacacgggcatcacgcagcagctggtagagcgtgtgtggagggaccaggatctcaacacgtacagcctactggccgtgttcgctgccacagacggtggcatcacccgagtcttccccaacaaggcagctgaggactggacagagaaccctgagcccttcaatgccagcttctaccgccgcagcctggataaccacggttatgtcttcaagcccccacaccaggatgccctgttaaggccgctggagctggagaatgacactgtgggcatcctcgtcagcacagctgtggagctcagcctaggcaggcgcacactgaggccagcagtggtgggcgtcaagctggacctagaggcttgggctgagaagttcaaggtgctagccagcaaccgtacccaccaagaccagcctcagaagtgcggccccaacagccactgtgagatggactgcgaggttaacaatgaggacttactctgtgtcctcattgatgatggaggattcctggtgctgtcaaaccagaaccatcagtgggaccaggtgggcaggttcttcagtgaggtggatgccaacctgatgctggcactctacaataactccttctacacccgcaaggagtcctatgactatcaggcagcctgtgcccctcagccccctggcaacctgggtgctgcaccccggggtgtctttgtgcccaccgttgcagatttccttaacctggcctggtggacctctgctgccgcctggtccctgttccagcagcttctctacggcctcatctaccacagctggttccaagcagaccccgcggaggccgaggggagccccgagacgcgcgagagcagctgcgtcatgaaacagacccagtactacttcggctcggtaaacgcctcctacaacgccatcatcgactgcggaaactgctccaggctgttccacgcgcagagactgaccaacaccaatcttctctttgtggtggccgagaagccgctgtgcagccagtgcgaggctggccggctgctgcagaaggagacgcactcggacggcccggagcagtgtgagctagtgcagagaccgcgataccggagaggcccgcacatctgcttcgactacaacgcgacagaagatacctcagactgtggccgcggggcctccttcccgccgtcgctgggcgtcctggtctccctgcaactgctgctcctcctgggcctgccgccccggccgcagcctcaagtcctcgtccacgcctctcgccgcctctgagcaccctgccccaccccacctccactcccacctcacccggcctcttcgcctttcccaccctcctgccccacactccccgccttagagcctcgtccctccctcactgaaggacctgagctggccaggccctgagagtctggtctgcgccttgggatggggagtcccaaagcgggacgccgcaggtgtttggcacccaaatcacatctcacctccgaactgttcaagtgtccccagacccttcttgcctgctgggctccccccagtgggatgggacagggaggccacacgcactggtgccaaaaccaggcctctgctgccgcccttcctggaggctgcctatgttgggggggaccctgcctcagctgacccggcctctctgccccacccaagcccaaacttggtttctgtgagaatagtggaggaaggtgagatggccagtttgaagcctgtgcctcccagcttaaatcctagcaggagagaggctctggggcagcccccatgggctcctgcccctttcaggcctacagccacatccccaagcccaccaggtgtcaggatagtcacagtgataccagttcagacactaccccatatacacctggaacattgaggatggaaactggactcacattcgacataccccactgggcacacgcacaaacacacacactatggggtggggtgggtgtaggggcttacaaagccttacacagggcgaggggttggtgggagggttggcacctgcacactccatctcctgctcaccacctgcctctaatctgagctgcagcctggctggtcctcccatttctaaagctgaatgtcaaacagtgccaaatgctggggcagggggtgaagaaccctctgtcccacccctagccaccagtgtcctccaagtgccccctcacctctccaggtgctcattgtaaccatttctcactagtgtcaggcccccagtgggaccacatgccactgcctgcacctttcggcagaggaacccccaccagacatcaccctttgccttagcaggggtgactttgtctctcctggctgggccatccttccgccaatctggcccttacacactcaggcctgtgcccactccctatctccttcccacccctacacacacactccctgcttgcaggaggccaaactgtccctcccttgctgaacacacacacacacacacacacacaggtggggactgggcacagctcttcacaccattcattctggtcatttcccccaaaggcatcccagcctgggggccagtggggaactgagggcaaggggatatagtgatggggctcagatggactgggaggagggggagggtgatgcattaattaatggcttcgttaattaatgtcatgttgcttgtcgctttctcagtgtgtgtgtgtggtccatgcccactgctggtgccagggtgggtgtccatgtgcacccggcctggatgccagctgtgtccttcgggggcgtgcgtgtaactgtagtgtagtcaggtgctcaatggagaatataaacatatacagaaaaatatatattttaagtttaaaaaacagaaaaacagacaaaacaatccccatcaggtagctgtctaacccccagctgggtctaatccttctcattacccacccgacctggctgcccctcaccttgggctgggggactggggggccatttccttttctctgccctttttttgttgttctattttgtacagacaagttggaaaaacaacagcgacaaaaaagtcaagaaactttgtaaaatatcgtgtgtgtgattccttgtaaaatattttcaaatggtttattacagaagatcagttattaaataatgttcatattttcacttcaaa

SEQ ID NO: 4051 - protein, 1074 aa, Homo sapiens
MQHWARRLEQEVDGVMRIFGGVQQLREIYKDNRNLFEVQENEPQKLVEKVAGDIESLLDRKVQALKRLADAAENFQKAHRWQDNIKEEDIVYYDAKADAELDDPESEDVERGSKASTLRLDFIEDPNFKNKVNYSYAAVQIPTDIYKGSTVILNELNWTEALENVFMENRRQDPTLLWQVFGSATGVTRYYPATPWRAPKKIDLYDVRRRPWYIQGASSPKDMVIIVDVSGSVSGLTLKLMKTSVCEMLDTLSDDDYVNVASFNEKAQPVSCFTHLVQANVRNKKVFKEAVQGMVAKGTTGYKAGFEYAFDQLQNSNITRANCNKMIMMFTDGGEDRVQDVFEKYNWPNRTVRVFTFSVGQHNYDVTPLQWMACANKGYYFEIPSIGAIRINTQEYLDVLGRPMVLAGKEAKQVQWTNVYEDALGLGLVVTGTLPVFNLTQDGPGEKKNQLILGVMGIDVALNDIKRLTPNYTLGANGYVFAIDLNGYVLLHPNLKPQTTNFREPVTLDFLDAELEDENKEEIRRSMIDGNKGHKQIRTLVKSLDERYIDEVTRNYTWVPIRSTNYSLGLVLPPYSTFYLQANLSDQILQVKYFEFLLPSSFESEGHVFIAPREYCKDLNASDNNTEFLKNFIELMEKVTPDSKQCNNFLLHNLILDTGITQQLVERVWRDQDLNTYSLLAVFAATDGGITRVFPNKAAEDWTENPEPFNASFYRRSLDNHGYVFKPPHQDALLRPLELENDTVGILVSTAVELSLGRRTLRPAVVGVKLDLEAWAEKFKVLASNRTHQDQPQKCGPNSHCEMDCEVNNEDLLCVLIDDGGFLVLSNQNHQWDQVGRFFSEVDANLMLALYNNSFYTRKESYDYQAACAPQPPGNLGAAPRGVFVPTVADFLNLAWWTSAAAWSLFQQLLYGLIYHSWFQADPAEAEGSPETRESSCVMKQTQYYFGSVNASYNAIIDCGNCSRLFHAQRLTNTNLLFVVAEKPLCSQCEAGRLLQKETHSDGPEQCELVQRPRYRRGPHICFDYNATEDTSDCGRGASFPPSLGVLVSLQLLLLLGLPPRPQPQVLVHASRRL

SEQ ID NO: 4052 - DNA, 5269 bp, Homo sapiens
gcgaagcgagtggctgcagagggctgcatcctgccgtccccagccccccacaaccgtacagccgtgcccaggtttccgcttagggaaccaggaggtccaggccctttctgccagcagccgggcgtgcaagcccccgacagagagaaatcttaaagatagctagagccacgggggctgatgcagcactgggcccggcgtctggagcaggaggtcgacggcgtgatgcggatttttggaggcgtccagcagctccgtgagatttacaaggacaaccggaacctgttcgaggtacaggagaatgagcctcagaagttggtggagaaggtggcaggggacattgagagccttctggacaggaaggtgcaggccctgaagagactggctgatgctgcagagaacttccagaaagcacaccgctggcaggacaacatcaaggaggaagacatcgtgtactatgacgccaaggctgacgctgagctggacgaccctgagagtgaggatgtggaaagggggtctaaggccagcaccctaaggctggacttcatcgaggacccaaacttcaagaacaaggtcaactattcatacgcggctgtacagatccctacggacatctacaaaggctccactgtcatcctcaatgagctcaactggacagaggccctggagaatgtgttcatggaaaaccgcagacaagaccccacactgctgtggcaggtcttcggcagcgccacaggagtcactcgctactacccggccaccccgtggcgagcccccaagaagatcgacctgtacgatgtccgaaggagaccctggtatatccagggggcctcgtcacccaaagacatggtcatcatcgtggatgtgagtggcagtgtgagcggcctgaccctgaagctgatgaagacatctgtctgcgagatgctggacacgctgtctgatgatgactatgtgaatgtggcctcgttcaacgagaaggcacagcctgtgtcatgcttcacacacctggtgcaggccaatgtgcgcaacaagaaggtgttcaaggaagctgtgcagggcatggtggccaagggcaccacaggctacaaggccggctttgagtatgcctttgaccagctgcagaactccaacatcactcgggccaactgcaacaagatgatcatgatgttcacggatggtggtgaggaccgcgtgcaggacgtctttgagaagtacaattggccaaaccggacggtgcgcgtgtttactttctccgtggggcagcataactatgacgtcacaccgctgcagtggatggcctgtgccaacaaaggctactattttgagatcccttccatcggagccatccgcatcaacacacaggaatatctagatgtgttgggcaggcccatggtgctggcaggcaaggaggccaagcaggtgcagtggaccaacgtgtatgaggatgcactgggactggggttggtggtaacagggaccctccctgttttcaacctgacacaggatggccctggggaaaagaagaaccagctgatcctgggcgtgatgggcattgacgtggctctgaatgacatcaagaggctgacccccaactacacgcttggagccaacggctatgtgtttgccattgacctgaacggctacgtgttgctgcaccccaatctcaagccccagaccaccaacttccgggagcctgtgactctggacttcctggatgcggagctagaggatgagaacaaggaagagatccgtcggagcatgattgatggcaacaagggccacaagcagatcagaacgttggtcaagtccctggatgagaggtacatagatgaggtgacacggaactacacctgggtgcctataaggagcactaactacagcctggggctggtgctcccaccctacagcaccttctacctccaagccaatctcagtgaccagatcctgcaggtcaagtattttgagttcctgctccccagcagctttgagtctgaaggacacgttttcattgctcccagagagtactgcaaggacctgaatgcctcagacaacaacaccgagttcctgaaaaactttattgagctcatggagaaagtgactccagactccaagcagtgcaacaacttccttctgcacaacctgatcttggacacgggcatcacgcagcagctggtagagcgtgtgtggagggaccaggatctcaacacgtacagcctactggccgtgttcgctgccacagacggtggcatcacccgagtcttccccaacaaggcagctgaggactggacagagaaccctgagcccttcaatgccagcttctaccgccgcagcctggataaccacggttatgtcttcaagcccccacaccaggatgccctgttaaggccgctggagctggagaatgacactgtgggcatcctcgtcagcacagctgtggagctcagcctaggcaggcgcacactgaggccagcagtggtgggcgtcaagctggacctagaggcttgggctgagaagttcaaggtgctagccagcaaccgtacccaccaagaccagcctcagaagtgcggccccaacagccactgtgagatggactgcgaggttaacaatgaggacttactctgtgtcctcattgatgatggaggattcctggtgctgtcaaaccagaaccatcagtgggaccaggtgggcaggttcttcagtgaggtggatgccaacctgatgctggcactctacaataactccttctacacccgcaaggagtcctatgactatcaggcagcctgtgcccctcagccccctggcaacctgggtgctgcaccccggggtgtctttgtgcccaccgttgcagatttccttaacctggcctggtggacctctgctgccgcctggtccctgttccagcagcttctctacggcctcatctaccacagctggttccaagcagaccccgcggaggccgaggggagccccgagacgcgcgagagcagctgcgtcatgaaacagacccagtactacttcggctcggtaaacgcctcctacaacgccatcatcgactgcggaaactgctccaggctgttccacgcgcagagactgaccaacaccaatcttctctttgtggtggccgagaagccgctgtgcagccagtgcgaggctggccggctgctgcagaaggagacgcactcggacggcccggagcagtgtgagctagtgcagagaccgcgataccggagaggcccgcacatctgcttcgactacaacgcgacagaagatacctcagactgtggccgcggggcctccttcccgccgtcgctgggcgtcctggtctccctgcaactgctgctcctcctgggcctgccgccccggccgcagcctcaagtcctcgtccacgcctctcgccgcctctgagcaccctgccccaccccacctccactcccacctcacccggcctcttcgcctttcccaccctcctgccccacactccccgccttagagcctcgtccctccctcactgaaggacctgagctggccaggccctgagagtctggtctgcgccttgggatggggagtcccaaagcgggacgccgcaggtgtttggcacccaaatcacatctcacctccgaactgttcaagtgtccccagacccttcttgcctgctgggctccccccagtgggatgggacagggaggccacacgcactggtgccaaaaccaggcctctgctgccgcccttcctggaggctgcctatgttgggggggaccctgcctcagctgacccggcctctctgccccacccaagcccaaacttggtttctgtgagaatagtggaggaaggtgagatggccagtttgaagcctgtgcctcccagcttaaatcctagcaggagagaggctctggggcagcccccatgggctcctgcccctttcaggcctacagccacatccccaagcccaccaggtgtcaggatagtcacagtgataccagttcagacactaccccatatacacctggaacattgaggatggaaactggactcacattcgacataccccactgggcacacgcacaaacacacacactatggggtggggtgggtgtaggggcttacaaagccttacacagggcgaggggttggtgggagggttggcacctgcacactccatctcctgctcaccacctgcctctaatctgagctgcagcctggctggtcctcccatttctaaagctgaatgtcaaacagtgccaaatgctggggcagggggtgaagaaccctctgtcccacccctagccaccagtgtcctccaagtgccccctcacctctccaggtgctcattgtaaccatttctcactagtgtcaggcccccagtgggaccacatgccactgcctgcacctttcggcagaggaacccccaccagacatcaccctttgccttagcaggggtgactttgtctctcctggctgggccatccttccgccaatctggcccttacacactcaggcctgtgcccactccctatctccttcccacccctacacacacactccctgcttgcaggaggccaaactgtccctcccttgctgaacacacacacacacacacacacacaggtggggactgggcacagctcttcacaccattcattctggtcatttcccccaaaggcatcccagcctgggggccagtggggaactgagggcaaggggatatagtgatggggctcagatggactgggaggagggggagggtgatgcattaattaatggcttcgttaattaatgtcatgttgcttgtcgctttctcagtgtgtgtgtgtggtccatgcccactgctggtgccagggtgggtgtccatgtgcacccggcctggatgccagctgtgtccttcgggggcgtgcgtgtaactgtagtgtagtcaggtgctcaatggagaatataaacatatacagaaaaatatatattttaagtttaaaaaacagaaaaacagacaaaacaatccccatcaggtagctgtctaacccccagctgggtctaatccttctcattacccacccgacctggctgcccctcaccttgggctgggggactggggggccatttccttttctctgccctttttttgttgttctattttgtacagacaagttggaaaaacaacagcgacaaaaaagtcaagaaactttgtaaaatatcgtgtgtgtgattccttgtaaaatattttcaaatggtttattacagaagatcagttattaaataatgttcatattttcacttcaaa

SEQ ID NO: 4053 - protein, 1074 aa, Homo sapiens; identical to SEQ ID NO: 4051

SEQ ID NO: 4054 - DNA, 1434 bp, Homo sapiens
tctggtctgcgccttgggatggggagtcccaaagcgggacgccgcaggtgtttggcacccaaatcacatctcacctccgaactgttcaagtgtccccagacccttcttgcctgctgggctccccccagtgggatgggacagggaggccacacgcactggtgccaaaaccaggcctctgctgccgcccttcctggaggctgcctatgttgggggggaccctgcctcagctgacccggcctctctgccccacccaagcccaaacttggtttctgtgagaatagtggaggaaggtgagatggccagtttgaagcctgtgcctcccagcttaaatcctagcaggagagaggctctggggcagcccccatgggctcctgcccctttcaggcctacagccacatccccaagcccaccaggtgtcaggatagtcacagtgataccagttcagacactaccccatatacacctggaacattgaggatggaaactggactcacattcgacataccccactgggcacacgcacaaacacacacactatggggtggggtgggtgtaggggcttacaaagccttacacagggcgaggggttggtgggagggttggcacctgcacactccatctcctgctcaccacctgcctctaatctgagctgcagcctggctggtcctcccatttctaaagctgaatgtcaaacagtgccaaatgctggggcagggggtgaagaaccctctgtcccacccctagccaccagtgtcctccaagtgccccctcacctctccaggtgctcattgtaaccatttctcactagtgtcaggcccccagtgggaccacatgccactgcctgcacctttcggcagaggaacccccaccagacatcaccctttgccttagcaggggtgactttgtctctcctggctgggccatccttccgccagtggggaactgagggcaaggggatatagtgatggggctcagatggactgggaggagggggagggtgatgcattaattaatggcttcgttaattaatgtcatgttgcttgtcgctttctcagtgtgtgtgtgtggtccatgcccactgctggtgccagggtgggtgtccatgtgcacccggcctggatgccagctgtgtccttcgggggcgtgcgtgtaactgtagtgtagtcaggtgctcaatggagaatataaacatatacagaaaaatatatattttaagtttaaaaaacagaaaaacagacaaaacaatccccatcaggtagctgtctaacccccagctgggtctaatccttctcattacccacccgacctggctgcccctcaccttgggctgggggactggggggccatttccttttctctgccctttttttgttgttctattttgtacagacaagttggaaaaacaacagcgacaaaaaagtcaagaaactttgt

SEQ ID NO: 4055 - protein, 94 aa, Homo sapiens; identical to SEQ ID NO: 4045

SEQ ID NO: 4056 - DNA, 2489 bp, Homo sapiens
gaaggtgctccctggccgggagggctcagaagagaagtagggcatggcatcgtcctctgctgaccacctgcactcggctccccgtgcgctgcaggtccctgttccagcagcttctctacggcctcatctaccacagctggttccaagcagaccccgcggaggccgaggggagccccgagacgcgcgagagcagctgcgtcatgaaacagacccagtactacttcggctcggtaaacgcctcctacaacgccatcatcgactgcggaaactgctccaggctgttccacgcgcagagactgaccaacaccaatcttctctttgtggtggccgagaagccgctgtgcagccagtgcgaggctggccggctgctgcagaaggagacgcactgtatcctgcccccgccctccccgccgcccgctccccctctgccccgcgcgccccctccgtgccgccgccgccgtccgcctccttgactccccacccatgcccagcggacggcccggagcagtgtgagctagtgcagagaccgcgataccggagaggcccgcacatctgcttcgactacaacgcgacagaagatacctcagactgtggccgcggggcctccttcccgccgtcgctgggcgtcctggtctccctgcaactgctgctcctcctgggcctgccgccccggccgcagcctcaagtcctcgtccacgcctctcgccgcctctgagcaccctgccccaccccacctccactcccacctcacccggcctcttcgcctttcccaccctcctgccccacactccccgccttagagcctcgtccctccctcactgaaggacctgagctggccaggccctgagagtctggtctgcgccttgggatggggagtcccaaagcgggacgccgcaggtgtttggcacccaaatcacatctcacctccgaactgttcaagtgtccccagacccttcttgcctgctgggctccccccagtgggatgggacagggaggccacacgcactggtgccaaaaccaggcctctgctgccgcccttcctggaggctgcctatgttgggggggaccctgcctcagctgacccggcctctctgccccacccaagcccaaacttggtttctgtgagaatagtggaggaaggtgagatggccagtttgaagcctgtgcctcccagcttaaatcctagcaggagagaggctctggggcagcccccatgggctcctgcccctttcaggcctacagccacatccccaagcccaccaggtgtcaggatagtcacagtgataccagttcagacactaccccatatacacctggaacattgaggatggaaactggactcacattcgacataccccactgggcacacgcacaaacacacacactatggggtggggtgggtgtaggggcttacaaagccttacacagggcgaggggttggtgggagggttggcacctgcacactccatctcctgctcaccacctgcctctaatctgagctgcagcctggctggtcctcccatttctaaagctgaatgtcaaacagtgccaaatgctggggcagggggtgaagaaccctctgtcccacccctagccaccagtgtcctccaagtgccccctcacctctccaggtgctcattgtaaccatttctcactagtgtcaggcccccagtgggaccacatgccactgcctgcacctttcggcagaggaacccccaccagacatcaccctttgccttagcaggggtgactttgtctctcctggctgggccatccttccgccaatctggcccttacacactcaggcctgtgcccactccctatctccttcccacccctacacacacactccctgcttgcaggaggccaaactgtccctcccttgctgaacacacacacacacacacacacacaggtggggactgggcacagctcttcacaccattcattctggtcatttcccccaaaggcatcccagcctgggggccagtggggaactgagggcaaggggatatagtgatggggctcagatggactgggaggagggggagggtgatgcattaattaatggcttcgttaattaatgtcatgttgcttgtcgctttctcagtgtgtgtgtgtggtccatgcccactgctggtgccagggtgggtgtccatgtgcacccggcctggatgccagctgtgtccttcgggggcgtgcgtgtaactgtagtgtagtcaggtgctcaatggagaatataaacatatacagaaaaatatatattttaagtttaaaaaacagaaaaacagacaaaacaatccccatcaggtagctgtctaacccccagctgggtctaatccttctcattacccacccgacctggctgcccctcaccttgggctgggggactggggggccatttccttttctctgccctttttttgttgttctattttgtacagacaagttggaaaaacaacagcgacaaaaaagtcaagaaactttgt

SEQ ID NO: 4057 - protein, 223 aa, Homo sapiens; identical to SEQ ID NO: 4047

SEQ ID NO: 4058 - DNA, 5302 bp, Homo sapiens
agagcgcttggagccagcgctgcagggagatagcagcgcgcagcccgcagaggcgctgcggcccgtgcagccccggaggcccctcgcggagaaggcggcggcggaggagaggccgagttaccgcccgccgcccgcgcccccccaaccccgccgccgccgccgccgccgccactgccccccctccccgcggcgccgcatcttgaatggaaacatggcggtgccggctcggacctgcggcgcctctcggcccggcccagcgcggactgcggcgcctctgcctacagcttcccccagcagcacacgatgcagcactgggcccggcgtctggagcaggaggtcgacggcgtgatgcggatttttggaggcgtccagcagctccgtgagatttacaaggacaaccggaacctgttcgaggtacaggagaatgagcctcagaagttggtggagaaggtggcaggggacattgagagccttctggacaggaaggtgcaggccctgaagagactggctgatgctgcagagaacttccagaaagcacaccgctggcaggacaacatcaaggaggaagacatcgtgtactatgacgccaaggctgacgctgagctggacgaccctgagagtgaggatgtggaaagggggtctaaggccagcaccctaaggctggacttcatcgaggacccaaacttcaagaacaaggtcaactattcatacgcggctgtacagatccctacggacatctacaaaggctccactgtcatcctcaatgagctcaactggacagaggccctggagaatgtgttcatggaaaaccgcagacaagaccccacactgctgtggcaggtcttcggcagcgccacaggagtcactcgctactacccggccaccccgtggcgagcccccaagaagatcgacctgtacgatgtccgaaggagaccctggtatatccagggggcctcgtcacccaaagacatggtcatcatcgtggatgtgagtggcagtgtgagcggcctgaccctgaagctgatgaagacatctgtctgcgagatgctggacacgctgtctgatgatgactatgtgaatgtggcctcgttcaacgagaaggcacagcctgtgtcatgcttcacacacctggtgcaggccaatgtgcgcaacaagaaggtgttcaaggaagctgtgcagggcatggtggccaagggcaccacaggctacaaggccggctttgagtatgcctttgaccagctgcagaactccaacatcactcgggccaactgcaacaagatgatcatgatgttcacggatggtggtgaggaccgcgtgcaggacgtctttgagaagtacaattggccaaaccggacggtgcgcgtgtttactttctccgtggggcagcataactatgacgtcacaccgctgcagtggatggcctgtgccaacaaaggctactattttgagatcccttccatcggagccatccgcatcaacacacaggaatatctagatgtgttgggcaggcccatggtgctggcaggcaaggaggccaagcaggtgcagtggaccaacgtgtatgaggatgcactgggactggggttggtggtaacagggaccctccctgttttcaacctgacacaggatggccctggggaaaagaagaaccagctgatcctgggcgtgatgggcattgacgtggctctgaatgacatcaagaggctgacccccaactacacgcttggagccaacggctatgtgtttgccattgacctgaacggctacgtgttgctgcaccccaatctcaagccccagaccaccaacttccgggagcctgtgactctggacttcctggatgcggagctagaggatgagaacaaggaagagatccgtcggagcatgattgatggcaacaagggccacaagcagatcagaacgttggtcaagtccctggatgagaggtacatagatgaggtgacacggaactacacctgggtgcctataaggagcactaactacagcctggggctggtgctcccaccctacagcaccttctacctccaagccaatctcagtgaccagatcctgcaggtcaagtattttgagttcctgctccccagcagctttgagtctgaaggacacgttttcattgctcccagagagtactgcaaggacctgaatgcctcagacaacaacaccgagttcctgaaaaactttattgagctcatggagaaagtgactccagactccaagcagtgcaacaacttccttctgcacaacctgatcttggacacgggcatcacgcagcagctggtagagcgtgtgtggagggaccaggatctcaacacgtacagcctactggccgtgttcgctgccacagacggtggcatcacccgagtcttccccaacaaggcagctgaggactggacagagaaccctgagcccttcaatgccagcttctaccgccgcagcctggataaccacggttatgtcttcaagcccccacaccaggatgccctgttaaggccgctggagctggagaatgacactgtgggcatcctcgtcagcacagctgtggagctcagcctaggcaggcgcacactgaggccagcagtggtgggcgtcaagctggacctagaggcttgggctgagaagttcaaggtgctagccagcaaccgtacccaccaagaccagcctcagaagtgcggccccaacagccactgtgagatggactgcgaggttaacaatgaggacttactctgtgtcctcattgatgatggaggattcctggtgctgtcaaaccagaaccatcagtgggaccaggtgggcaggttcttcagtgaggtggatgccaacctgatgctggcactctacaataactccttctacacccgcaaggagtcctatgactatcaggcagcctgtgcccctcagccccctggcaacctgggtgctgcaccccggggtgtctttgtgcccaccgttgcagatttccttaacctggcctggtggacctctgctgccgcctggtccctgttccagcagcttctctacggcctcatctaccacagctggttccaagcagaccccgcggaggccgaggggagccccgagacgcgcgagagcagctgcgtcatgaaacagacccagtactacttcggctcggtaaacgcctcctacaacgccatcatcgactgcggaaactgctccaggctgttccacgcgcagagactgaccaacaccaatcttctctttgtggtggccgagaagccgctgtgcagccagtgcgaggctggccggctgctgcagaaggagacgcactcggacggcccggagcagtgtgagctagtgcagagaccgcgataccggagaggcccgcacatctgcttcgactacaacgcgacagaagatacctcagactgtggccgcggggcctccttcccgccgtcgctgggcgtcctggtctccctgcaactgctgctcctcctgggcctgccgccccggccgcagcctcaagtcctcgtccacgcctctcgccgcctctgagcaccctgccccaccccacctccactcccacctcacccggcctcttcgcctttcccaccctcctgccccacactccccgccttagagcctcgtccctccctcactgaaggacctgagctggccaggccctgagagtctggtctgcgccttgggatggggagtcccaaagcgggacgccgcaggtgtttggcacccaaatcacatctcacctccgaactgttcaagtgtccccagacccttcttgcctgctgggctccccccagtgggatgggacagggaggccacacgcactggtgccaaaaccaggcctctgctgccgcccttcctggaggctgcctatgttgggggggaccctgcctcagctgacccggcctctctgccccacccaagcccaaacttggtttctgtgagaatagtggaggaaggtgagatggccagtttgaagcctgtgcctcccagcttaaatcctagcaggagagaggctctggggcagcccccatgggctcctgcccctttcaggcctacagccacatccccaagcccaccaggtgtcaggatagtcacagtgataccagttcagacactaccccatatacacctggaacattgaggatggaaactggactcacattcgacataccccactgggcacacgcacaaacacacacactatggggtggggtgggtgtaggggcttacaaagccttacacagggcgaggggttggtgggagggttggcacctgcacactccatctcctgctcaccacctgcctctaatctgagctgcagcctggctggtcctcccatttctaaagctgaatgtcaaacagtgccaaatgctggggcagggggtgaagaaccctctgtcccacccctagccaccagtgtcctccaagtgccccctcacctctccaggtgctcattgtaaccatttctcactagtgtcaggcccccagtgggaccacatgccactgcctgcacctttcggcagaggaacccccaccagacatcaccctttgccttagcaggggtgactttgtctctcctggctgggccatccttccgccaatctggcccttacacactcaggcctgtgcccactccctatctccttcccacccctacacacacactccctgcttgcaggaggccaaactgtccctcccttgctgaacacacacacacacacacacacacaggtggggactgggcacagctcttcacaccattcattctggtcatttcccccaaaggcatcccagcctgggggccagtggggaactgagggcaaggggatatagtgatggggctcagatggactgggaggagggggagggtgatgcattaattaatggcttcgttaattaatgtcatgttgcttgtcgctttctcagtgtgtgtgtgtggtccatgcccactgctggtgccagggtgggtgtccatgtgcacccggcctggatgccagctgtgtccttcgggggcgtgcgtgtaactgtagtgtagtcaggtgctcaatggagaatataaacatatacagaaaaatatatattttaagtttaaaaaacagaaaaacagacaaaacaatccccatcaggtagctgtctaacccccagctgggtctaatccttctcattacccacccgacctggctgcccctcaccttgggctgggggactggggggccatttccttttctctgccctttttttgttgttctattttgtacagacaagttggaaaaacaacagcgacaaaaaagtcaagaaactttgt

SEQ ID NO: 4059 - protein, 1074 aa, Homo sapiens; identical to SEQ ID NO: 4051

SEQ ID NO: 4060 - DNA, 5417 bp, Homo sapiens
agagcgcttggagccagcgctgcagggagatagcagcgcgcagcccgcagaggcgctgcggcccgtgcagccccggaggcccctcgcggagaaggcggcggcggaggagaggccgagttaccgcccgccgcccgcgcccccccaaccccgccgccgccgccgccgccgccactgccccccctccccgcggcgccgcatcttgaatggaaacatggcggtgccggctcggacctgcggcgcctctcggcccggcccagcgcggactgcgcgcccctggcccggctgcggcccccaccctggccccggcacccggcgcccgacgtccgggcccccgcgcccgctgtggctgctgctgccgcttctaccgctgctcgccgcccccggcgcctctgcctacagcttcccccagcagcacacgatgcagcactgggcccggcgtctggagcaggaggtcgacggcgtgatgcggatttttggaggcgtccagcagctccgtgagatttacaaggacaaccggaacctgttcgaggtacaggagaatgagcctcagaagttggtggagaaggtggcaggggacattgagagccttctggacaggaaggtgcaggccctgaagagactggctgatgctgcagagaacttccagaaagcacaccgctggcaggacaacatcaaggaggaagacatcgtgtactatgacgccaaggctgacgctgagctggacgaccctgagagtgaggatgtggaaagggggtctaaggccagcaccctaaggctggacttcatcgaggacccaaacttcaagaacaaggtcaactattcatacgcggctgtacagatccctacggacatctacaaaggctccactgtcatcctcaatgagctcaactggacagaggccctggagaatgtgttcatggaaaaccgcagacaagaccccacactgctgtggcaggtcttcggcagcgccacaggagtcactcgctactacccggccaccccgtggcgagcccccaagaagatcgacctgtacgatgtccgaaggagaccctggtatatccagggggcctcgtcacccaaagacatggtcatcatcgtggatgtgagtggcagtgtgagcggcctgaccctgaagctgatgaagacatctgtctgcgagatgctggacacgctgtctgatgatgactatgtgaatgtggcctcgttcaacgagaaggcacagcctgtgtcatgcttcacacacctggtgcaggccaatgtgcgcaacaagaaggtgttcaaggaagctgtgcagggcatggtggccaagggcaccacaggctacaaggccggctttgagtatgcctttgaccagctgcagaactccaacatcactcgggccaactgcaacaagatgatcatgatgttcacggatggtggtgaggaccgcgtgcaggacgtctttgagaagtacaattggccaaaccggacggtgcgcgtgtttactttctccgtggggcagcataactatgacgtcacaccgctgcagtggatggcctgtgccaacaaaggctactattttgagatcccttccatcggagccatccgcatcaacacacaggaatatctagatgtgttgggcaggcccatggtgctggcaggcaaggaggccaagcaggtgcagtggaccaacgtgtatgaggatgcactgggactggggttggtggtaacagggaccctccctgttttcaacctgacacaggatggccctggggaaaagaagaaccagctgatcctgggcgtgatgggcattgacgtggctctgaatgacatcaagaggctgacccccaactacacgcttggagccaacggctatgtgtttgccattgacctgaacggctacgtgttgctgcaccccaatctcaagccccagaccaccaacttccgggagcctgtgactctggacttcctggatgcggagctagaggatgagaacaaggaagagatccgtcggagcatgattgatggcaacaagggccacaagcagatcagaacgttggtcaagtccctggatgagaggtacatagatgaggtgacacggaactacacctgggtgcctataaggagcactaactacagcctggggctggtgctcccaccctacagcaccttctacctccaagccaatctcagtgaccagatcctgcaggtcaagtattttgagttcctgctccccagcagctttgagtctgaaggacacgttttcattgctcccagagagtactgcaaggacctgaatgcctcagacaacaacaccgagttcctgaaaaactttattgagctcatggagaaagtgactccagactccaagcagtgcaacaacttccttctgcacaacctgatcttggacacgggcatcacgcagcagctggtagagcgtgtgtggagggaccaggatctcaacacgtacagcctactggccgtgttcgctgccacagacggtggcatcacccgagtcttccccaacaaggcagctgaggactggacagagaaccctgagcccttcaatgccagcttctaccgccgcagcctggataaccacggttatgtcttcaagcccccacaccaggatgccctgttaaggccgctggagctggagaatgacactgtgggcatcctcgtcagcacagctgtggagctcagcctaggcaggcgcacactgaggccagcagtggtgggcgtcaagctggacctagaggcttgggctgagaagttcaaggtgctagccagcaaccgtacccaccaagaccagcctcagaagtgcggccccaacagccactgtgagatggactgcgaggttaacaatgaggacttactctgtgtcctcattgatgatggaggattcctggtgctgtcaaaccagaaccatcagtgggaccaggtgggcaggttcttcagtgaggtggatgccaacctgatgctggcactctacaataactccttctacacccgcaaggagtcctatgactatcaggcagcctgtgcccctcagccccctggcaacctgggtgctgcaccccggggtgtctttgtgcccaccgttgcagatttccttaacctggcctggtggacctctgctgccgcctggtccctgttccagcagcttctctacggcctcatctaccacagctggttccaagcagaccccgcggaggccgaggggagccccgagacgcgcgagagcagctgcgtcatgaaacagacccagtactacttcggctcggtaaacgcctcctacaacgccatcatcgactgcggaaactgctccaggctgttccacgcgcagagactgaccaacaccaatcttctctttgtggtggccgagaagccgctgtgcagccagtgcgaggctggccggctgctgcagaaggagacgcactcggacggcccggagcagtgtgagctagtgcagagaccgcgataccggagaggcccgcacatctgcttcgactacaacgcgacagaagatacctcagactgtggccgcggggcctccttcccgccgtcgctgggcgtcctggtctccctgcaactgctgctcctcctgggcctgccgccccggccgcagcctcaagtcctcgtccacgcctctcgccgcctctgagcaccctgccccaccccacctccactcccacctcacccggcctcttcgcctttcccaccctcctgccccacactccccgccttagagcctcgtccctccctcactgaaggacctgagctggccaggccctgagagtctggtctgcgccttgggatggggagtcccaaagcgggacgccgcaggtgtttggcacccaaatcacatctcacctccgaactgttcaagtgtccccagacccttcttgcctgctgggctccccccagtgggatgggacagggaggccacacgcactggtgccaaaaccaggcctctgctgccgcccttcctggaggctgcctatgttgggggggaccctgcctcagctgacccggcctctctgccccacccaagcccaaacttggtttctgtgagaatagtggaggaaggtgagatggccagtttgaagcctgtgcctcccagcttaaatcctagcaggagagaggctctggggcagcccccatgggctcctgcccctttcaggcctacagccacatccccaagcccaccaggtgtcaggatagtcacagtgataccagttcagacactaccccatatacacctggaacattgaggatggaaactggactcacattcgacataccccactgggcacacgcacaaacacacacactatggggtggggtgggtgtaggggcttacaaagccttacacagggcgaggggttggtgggagggttggcacctgcacactccatctcctgctcaccacctgcctctaatctgagctgcagcctggctggtcctcccatttctaaagctgaatgtcaaacagtgccaaatgctggggcagggggtgaagaaccctctgtcccacccctagccaccagtgtcctccaagtgccccctcacctctccaggtgctcattgtaaccatttctcactagtgtcaggcccccagtgggaccacatgccactgcctgcacctttcggcagaggaacccccaccagacatcaccctttgccttagcaggggtgactttgtctctcctggctgggccatccttccgccaatctggcccttacacactcaggcctgtgcccactccctatctccttcccacccctacacacacactccctgcttgcaggaggccaaactgtccctcccttgctgaacacacacacacacacacacacacaggtggggactgggcacagctcttcacaccattcattctggtcatttcccccaaaggcatcccagcctgggggccagtggggaactgagggcaaggggatatagtgatggggctcagatggactgggaggagggggagggtgatgcattaattaatggcttcgttaattaatgtcatgttgcttgtcgctttctcagtgtgtgtgtgtggtccatgcccactgctggtgccagggtgggtgtccatgtgcacccggcctggatgccagctgtgtccttcgggggcgtgcgtgtaactgtagtgtagtcaggtgctcaatggagaatataaacatatacagaaaaatatatattttaagtttaaaaaacagaaaaacagacaaaacaatccccatcaggtagctgtctaacccccagctgggtctaatccttctcattacccacccgacctggctgcccctcaccttgggctgggggactggggggccatttccttttctctgccctttttttgttgttctattttgtacagacaagttggaaaaacaacagcgacaaaaaagtcaagaaactttgt

SEQ ID NO: 4061 - protein, 1143 aa, Homo sapiens; identical to SEQ ID NO: 415

SEQ ID NO: 4062 - DNA, 845 bp, Homo sapiens
cagtgcgtctccttctgcagcagccggccagcctcgcactggctgcacagcggcttctcggccaccacaaagagaagattggtgttggtcagtctctgcgcgtggaacagcctgcgggcagcccggaaaggcggggcgttgagtttgccccgccctgacccacccccatcctgcggccccgcccccggccgctcggaggccccgccccttccatcctcccgagcgtctcgccccgctcacaggttccgcccttggcctctggtcccgccccactgccagcacctggagcagtttccgcagtcgatgatggcgttgtaggaggcgtttaccgagccgaagtagtactgggtctgtttcatgacgcagctgctctcgcgcgtctcggggctcccctcggcctccgcggggtctgcgagggcccagagcgcctcagctccgcccacagaccctggcaaggtctccggcctccctcagtcgtagaccccaccctccccatggagtcgtcttagctcagattggggacccggacttgaggaggcgcctccaaagccctacctacctgcttggaaccagctgtggtagatgaggccgtagagaagctgctggaacagggacctgcagcgcacggggagccgagtgcaggtggtcagcagaggacgatgccatgccctacttctcttctgagccctcccggccagggagcaccttcttcaaatccctactctcttctttcactctcttcctgatcctcacctggtcccactgatggttctggtttgacagcaccaggaatcctccatcatcaatgaggacacagagtaagtcctaggaggaagggaatgggg

SEQ ID NO: 4063 - protein, 33 aa, Homo sapiens [sequence omitted]

SEQ ID NO: 4064 - DNA, 1304 bp, Homo sapiens
cagtgcgtctccttctgcagcagccggccagcctcgcactggctgcacagcggcttctcggccaccacaaagagaagattggtgttggtcagtctctgcgcgtggaacagcctgcgggcagcccggaaaggcggggcgttgagtttgccccgccctgacccacccccatcctgcggccccgcccccggccgctcggaggccccgccccttccatcctcccgagcgtctcgccccgctcacaggttccgcccttggcctctggtcccgccccactgccagcacctggagcagtttccgcagtcgatgatggcgttgtaggaggcgtttaccgagccgaagtagtactgggtctgtttcatgacgcagctgctctcgcgcgtctcggggctcccctcggcctccgcggggtctgcgagggcccagagcgcctcagctccgcccacagaccctggcaaggtctccggcctccctcagtcgtagaccccaccctccccatggagtcgtcttagctcagattggggacccggacttgaggaggcgcctccaaagccctacctacctgcttggaaccagctgtggtagatgaggccgtagagaagctgctggaacagggacctgcagcgcacggggagccgagtgcaggtggtcagcagaggacgatgccatgccctacttctcttctgagccctcccggccagggagcaccttctctacccacctcccgctcaggactcaccaggcggcagcagaggtccaccaggccaggttaaggaaatctgcaacggtgggctgcagtggagagaggggcgtggactgccactgctgcccctcgccctaggtcacccccagctttatcaaatgtcagagcaccaggaatcctccatcatcaatgaggacacagagctgggtgatgcctacgtgttgagatcctggtccctccacacacgctctaccagctgctgcgtgatgcccgtgtccaagatcaggttgtgcagaaggaagttgttgcctggaacaggaggggaggggtgggggtgggggcatcttcttgcagctccttgcccaccctcacccccacccttaaggctccaccaggagcctcctccatgacctggccctggcccaggcccagcccttagcttgtgcctgcttatttccacacctgcccggcctctgggttcctctgggctggccccatgctgcctgggcactgcccagagccagctgccctgccaggcactcacactgcttggagtctggagtcactttctccatgagctcaataaagtttttcaggaactcgg

SEQ ID NO: 4065 - protein, 83 aa, Homo sapiens
MSEHQESSIINEDTELGDAYVLRSWSLHTRSTSCCVMPVSKIRLCRRKLLPGTGGEGWGWGHLLAAPCPPSPPPLRLHQEPPP

SEQ ID NO: 4066 - DNA, 1221 bp, Homo sapiens
cagtgcgtctccttctgcagcagccggccagcctcgcactggctgcacagcggcttctcggccaccacaaagagaagattggtgttggtcagtctctgcgcgtggaacagcctgcgggcagcccggaaaggcggggcgttgagtttgccccgccctgacccacccccatcctgcggccccgcccccggccgctcggaggccccgccccttccatcctcccgagcgtctcgccccgctcacaggttccgcccttggcctctggtcccgccccactgccagcacctggagcagtttccgcagtcgatgatggcgttgtaggaggcgtttaccgagccgaagtagtactgggtctgtttcatgacgcagctgctctcgcgcgtctcggggctcccctcggcctccgcggggtctgcgagggcccagagcgcctcagctccgcccacagaccctggcaaggtctccggcctccctcagtcgtagaccccaccctccccatggagtcgtcttagctcagattggggacccggacttgaggaggcgcctccaaagccctacctacctgcttggaaccagctgtggtagatgaggccgtagagaagctgctggaacagggacctgcagcgcacggggagccgagtgcaggtggtcagcagaggacgatgccatgccctacttctcttctgagccctcccggccagggagcaccttctctacccacctcccgctcaggactcaccaggcggcagcagaggtccaccaggccaggttaaggaaatctgcaacgcaccaggaatcctccatcatcaatgaggacacagagctgggtgatgcctacgtgttgagatcctggtccctccacacacgctctaccagctgctgcgtgatgcccgtgtccaagatcaggttgtgcagaaggaagttgttgcctggaacaggaggggaggggtgggggtgggggcatcttcttgcagctccttgcccaccctcacccccacccttaaggctccaccaggagcctcctccatgacctggccctggcccaggcccagcccttagcttgtgcctgcttatttccacacctgcccggcctctgggttcctctgggctggccccatgctgcctgggcactgcccagagccagctgccctgccaggcactcacactgcttggagtctggagtcactttctccatgagctcaataaagtttttcaggaactcgg

SEQ ID NO: 4067 - protein, 120 aa, Homo sapiens
MPYFSSEPSRPGSTFSTHLPLRTHQAAAEVHQARLRKSATHQESSIINEDTELGDAYVLRSWSLHTRSTSCCVMPVSKIRLCRRKLLPGTGGEGWGWGHLLAAPCPPSPPPLRLHQEPPP

SEQ ID NO: 4068 - DNA, 461 bp, Homo sapiens
agggctcagggttctctgtccagtcctcagctgccctggagcacccaagaggcagactggctgggtgatgcctacgtgttgagatcctggtccctccacacacgctctaccagctgctgcgtgatgcccgtgtccaagatcaggttgtgcagaaggaagttgttgcctggaacaggaggggaggggtgggggtgggggcatcttcttgcagctccttgcccaccctcacccccacccttaaggctccaccaggagcctcctccatgacctggccctggcccaggcccagcccttagcttgtgcctgcttatttccacacctgcccggcctctgggttcctctgggctggccccatgctgcctgggcactgcccagagccagctgccctgccaggcactcacactgcttggagtctggagtcactttctccatgagctcaataaagtttttcaggaactcgg

SEQ ID NO: 4069 - protein, 47 aa, Homo sapiens
MPVSKIRLCRRKLLPGTGGEGWGWGHLLAAPCPPSPPPLRLHQEPPP

SEQ ID NO: 4070 - DNA, 562 bp, Homo sapiens
atgctccgaggctgcctgccctggctctacccagcacccgagggcttctagggtgtgccaggggtgggcagatgggtggcacactgcggaagggcagtgggaggacagcagacagcttggattctgctgtacaaaatccaccttcaaagagatgaaaagagtgtctgccacaggcccttcagagccgtacccctgtggtgtggagagcgcatctggctgggtggagaggacgaccctgagagtgaggatgtggaaagggggtctaaggccagcaccctaaggctggacttcatcgaggacccaaacttcaagaacaaggtcaactattcatacgcggctgtacagatccctacggacatctacaaaggctccactgtcatcctcaatgagctcaactggacagaggccctggagaatgtgttcatggaaaaccgcagacaagaccccacactgctgtggcaggtcttcggcagcgccacaggagtcactcgctactacccggccaccccgtggcgagcccccaagaagatcgacctgtacgatgtccgaaggagaccctggt

SEQ ID NO: 4071 - protein, 58 aa, Homo sapiens
MSSTGQRPWRMCSWKTADKTPHCCGRSSAAPQESLATTRPPRGEPPRRSTCTMSEGDP

SEQ ID NO: 4072 - DNA, 544 bp, Homo sapiens
acagtcggccgcttccactctggcctccatgctccgaggctgcctgccctggctctacccagcacccgagggcttctagggtgtgccaggggtgggcagatgggtggcacactgcggaagggcagtgggaggacagcagacagcttggattctgctgtacaaaatccaccttcaaagagatgaaaagagtgtctgccacaggcccttcagagccgtacccctgtggtgtggagagcgcatctggctgggtggagagaatgtggagaagaggacgaccctgagagtgaggatgtggaaagggggtctaaggccagcaccctaaggctggacttcatcgaggacccaaacttcaagaacaaggtcaactattcatacgcggctgtacagatccctacggacatctacaaaggctccactgtcatcctcaatgagctcaactggacagaggccctggagaatgtgttcatggaaaaccgcagacaagaccccacactgctgtggcaggtcttcggcagcgccacaggagtcactcgctactacccgg

SEQ ID NO: 4073 - protein, 33 aa, Homo sapiens
MKRVSATGPSEPYPCGVESASGWVERMWRRGRP

SEQ ID NO: 4074 - DNA, 3603 bp, Homo sapiens
cggccgctctcgtcgccgccgcagcgggcgcgtcggagggagcccagcatggccgggccgggctcgccgcgccgcgcgtcccggggggcctcggcgcttctcgctgccgcgcttctctacgccgcgctgggggacgtggtgcgctcggagcagcagataccgctctccgtggtgaagctctgggcctcggcttttggtggggagataaaatccattgctgctaagtactccggttcccagcttctgcaaaagaaatacaaagagtatgagaaagacgttgccatagaagaaattgatggcctccaactggtaaagaagctggcaaagaacatggaagagatgtttcacaagaagtctgaggccgtcaggcagtatgaatacttcaatgctgtgctgataaatgaaagggacaaagacgggaattttttggagctgggaaaggaattcatcttagccccaaatgaccattttaataatttgcctgtgaacatcagtctaagtgacgtccaagtaccaacgaacatgtacaacaaagaccctgcaattgtcaatggggtttattggtctgaatctctaaacaaagtttttgtagataactttgaccgtgacccatctctcatatggcagtactttggaagtgcaaagggcttttttaggcagtatccggggattaaatgggaaccagatgagaatggagtcattgccttcgactgcaggaaccgaaaatggtacatccaggcagcaacttctccgaaagacgtggtcattttagttgacgtcagtggcagcatgaaaggactccgtctgactatcgcgaagcaaacagtctcatccattttggatacacttggggatgatgacttcttcaacataattgcttataatgaggagcttcactatgtggaaccttgcctgaatggaactttggtgcaagccgacaggacaaacaaagagcacttcagggagcatctggacaaacttttcgccaaaggaattggaatgttggatatagctctgaatgaggccttcaacattctgagtgatttcaaccacacgggacaaggaagtatctgcagtcaggccatcatgctcataactgatggggcggtggacacctatgatacaatctttgcaaaatacaattggccagatcgaaaggttcgcatcttcacatacctcattggacgagaggctgcgtttgcagacaatctaaagtggatggcctgtgccaacaaaggattttttacccagatctccaccttggctgatgtgcaggagaatgtcatggaataccttcacgtgcttagccggcccaaagtcatcgaccaggagcatgatgtggtgtggaccgaagcttacattgacagcactctgactgatgatcagggccccgtcctgatgaccactgtagccatgcctgtgtttagtaagcagaacgaaaccagatcgaagggcattcttctgggagtggttggcacagatgtcccagtgaaagaacttctgaagaccatccccaaatacaagttagggattcacggttatgcctttgcaatcacaaataatggatatatcctgacgcatccggaactcaggctgctgtacgaagaaggaaaaaagcgaaggaaacctaactatagtagcgttgacctctctgaggtggagtgggaagaccgagatgacgtgttgagaaatgctatggtgaatcgaaagacggggaagttttccatggaggtgaagaagacagtggacaaagggaaacgggttttggtgatgacaaatgactactattatacagacatcaagggtactcctttcagtttaggtgtggcgctttccagaggtcatgggaaatatttcttccgagggaatgtaaccatcgaagaaggcctgcatgacttagaacatcccgatgtgtccttggcagatgaatggtcctactgcaacactgacctacaccctgagcaccgccatctgtctcagttagaagcgattaagctctacctaaaaggcaaagaacctctgctccagtgtgataaagaattgatccaagaagtcctttttgacgcggtggtgagtgcccccattgaagcgtattggaccagcctggccctcaacaaatctgaaaattctgacaagggcgtggaggttgccttcctcggcactcgcacgggcctctccagaatcaacctgtttgtcggggctgagcagctcaccaatcaggacttcctgaaagctggcgacaaggagaacatttttaacgcagaccatttccctctctggtaccgaagagccgctgagcagattccagggagcttcgtctactcgatcccattcagcactggaccagtcaataaaagcaatgtggtgacagcaagtacatccatccagctcctggatgaacggaaatctcctgtggtggcagctgtaggcattcagatgaaacttgaatttttccaaaggaagttctggactgccagcagacagtgtgcttccctggatggcaaatgctccatcagctgtgatgatgagactgtgaattgttacctcatagacaataatggatttattttggtgtctgaagactacacacagactggagacttttttggtgagatcgagggagctgtgatgaacaaattgctaacaatgggctcctttaaaagaattaccctttatgactaccaagccatgtgtagagccaacaaggaaagcagcgatggcgcccatggcctcctggatccttataatgccttcctctctgcagtaaaatggatcatgacagaacttgtcttgttcctggtggaatttaacctctgcagttggtggcactccgatatgacagctaaagcccagaaattgaaacagaccctggagccttgtgatactgaatatccagcattcgtctctgagcgcaccatcaaggagactacagggaatattgcttgtgaagactgctccaagtcctttgtcatccagcaaatcccaagcagcaacctgttcatggtggtggtggacagcagctgcctctgtgaatctgtggcccccatcaccatggcacccattgaaatcagtcaacataatgaatcccttaagtgtgaacgtctaaaggcccagaagatcagaaggcgcccagaatcttgtcatggcttccatcctgaggagaatgcaagggagtgtgggggtgcgccgagtctccaagcccagacagtcctccttctgctccctctgcttttgatgctcttctcaaggtgacactgactgagatgttctcttactgactgagatgttctcttggcatgctaaatcatggataaactgtgaaccaaaatatggtgcaacatacgagacatgaatatagtccaaccatcagcatctcatcatgattttaaactgtgcgtgatataaactcttaaagatatgttgacaaaaagttatctatcatctttttactttgccagtcatgcaaatgtgagtttgccacatgataatcacccttcatcagaaatgggaccgcaagtggtaggcagtgtcccttctgcttgaaacctattgaaaccaatttaaaactgtgtactttttaaataaagtatattaaaatcataa

SEQ ID NO: 4075 - protein, 1067 aa, Homo sapiens
MAGPGSPRRASRGASALLAAALLYAALGDVVRSEQQIPLSVVKLWASAFGGEIKSIAAKYSGSQLLQKKYKEYEKDVAIEEIDGLQLVKKLAKNMEEMFHKKSEAVRQYEYFNAVLINERDKDGNFLELGKEFILAPNDHFNNLPVNISLSDVQVPTNMYNKDPAIVNGVYWSESLNKVFVDNFDRDPSLIWQYFGSAKGFFRQYPGIKWEPDENGVIAFDCRNRKWYIQAATSPKDVVILVDVSGSMKGLRLTIAKQTVSSILDTLGDDDFFNIIAYNEELHYVEPCLNGTLVQADRTNKEHFREHLDKLFAKGIGMLDIALNEAFNILSDFNHTGQGSICSQAIMLITDGAVDTYDTIFAKYNWPDRKVRIFTYLIGREAAFADNLKWMACANKGFFTQISTLADVQENVMEYLHVLSRPKVIDQEHDVVWTEAYIDSTLTDDQGPVLMTTVAMPVFSKQNETRSKGILLGVVGTDVPVKELLKTIPKYKLGIHGYAFAITNNGYILTHPELRLLYEEGKKRRKPNYSSVDLSEVEWEDRDDVLRNAMVNRKTGKFSMEVKKTVDKGKRVLVMTNDYYYTDIKGTPFSLGVALSRGHGKYFFRGNVTIEEGLHDLEHPDVSLADEWSYCNTDLHPEHRHLSQLEAIKLYLKGKEPLLQCDKELIQEVLFDAVVSAPIEAYWTSLALNKSENSDKGVEVAFLGTRTGLSRINLFVGAEQLTNQDFLKAGDKENIFNADHFPLWYRRAAEQIPGSFVYSIPFSTGPVNKSNVVTASTSIQLLDERKSPVVAAVGIQMKLEFFQRKFWTASRQCASLDGKCSISCDDETVNCYLIDNNGFILVSEDYTQTGDFFGEIEGAVMNKLLTMGSFKRITLYDYQAMCRANKESSDGAHGLLDPYNAFLSAVKWIMTELVLFLVEFNLCSWWHSDMTAKAQKLKQTLEPCDTEYPAFVSERTIKETTGNIACEDCSKSFVIQQIPSSNLFMVVVDSSCLCESVAPITMAPIEISQHNESLKCERLKAQKIRRRPESCHGFHPEENARECGGAPSLQAQTVLLLLPLLLMLFSR

SEQ ID NO: 4076 - DNA, 3368 bp, Homo sapiens
gttgactgtgacacgggtgttacatatcttcctgtgccccttctccctgtagggtgaagctctgggcctcggcttttggtggggagataaaatccattgctgctaagtactccggttcccagcttctgcaaaagcagtatgaatacttcaatgctgtgctgataaatgaaagggacaaagacgggaattttttggagctgggaaaggaattcatcttagccccaaatgaccattttaataatttgcctgtgaacatcagtctaagtgacgtccaagtaccaacgaacatgtacaacaaagaccctgcaattgtcaatggggtttattggtctgaatctctaaacaaagtttttgtagataactttgaccgtgacccatctctcatatggcagtactttggaagtgcaaagggcttttttaggcagtatccggggattaaatgggaaccagatgagaatggagtcattgccttcgactgcaggaaccgaaaatggtacatccaggcagcaacttctccgaaagacgtggtcattttagttgacgtcagtggcagcatgaaaggactccgtctgactatcgcgaagcaaacagtctcatccattttggatacacttggggatgatgacttcttcaacataattgcttataatgaggagcttcactatgtggaaccttgcctgaatggaactttggtgcaagccgacaggacaaacaaagagcacttcagggagcatctggacaaacttttcgccaaaggaattggaatgttggatatagctctgaatgaggccttcaacattctgagtgatttcaaccacacgggacaaggaagtatctgcagtcaggccatcatgctcataactgatggggcggtggacacctatgatacaatctttgcaaaatacaattggccagatcgaaaggttcgcatcttcacatacctcattggacgagaggctgcgtttgcagacaatctaaagtggatggcctgtgccaacaaaggattttttacccagatctccaccttggctgatgtgcaggagaatgtcatggaataccttcacgtgcttagccggcccaaagtcatcgaccaggagcatgatgtggtgtggaccgaagcttacattgacagcactctgactgatgatcagggccccgtcctgatgaccactgtagccatgcctgtgtttagtaagcagaacgaaaccagatcgaagggcattcttctgggagtggttggcacagatgtcccagtgaaagaacttctgaagaccatccccaaatacaagttagggattcacggttatgcctttgcaatcacaaataatggatatatcctgacgcatccggaactcaggctgctgtacgaagaaggaaaaaagcgaaggaaacctaactatagtagcgttgacctctctgaggtggagtgggaagaccgagatgacgtgttgagaaatgctatggtgaatcgaaagacggggaagttttccatggaggtgaagaagacagtggacaaagggaaacgggttttggtgatgacaaatgactactattatacagacatcaagggtactcctttcagtttaggtgtggcgctttccagaggtcatgggaaatatttcttccgagggaatgtaaccatcgaagaaggcctgcatgacttagaacatcccgatgtgtccttggcagatgaatggtcctactgcaacactgacctacaccctgagcaccgccatctgtctcagttagaagcgattaagctctacctaaaaggcaaagaacctctgctccagtgtgataaagaattgatccaagaagtcctttttgacgcggtggtgagtgcccccattgaagcgtattggaccagcctggccctcaacaaatctgaaaattctgacaagggcgtggaggttgccttcctcggcactcgcacgggcctctccagaatcaacctgtttgtcggggctgagcagctcaccaatcaggacttcctgaaagctggcgacaaggagaacatttttaacgcagaccatttccctctctggtaccgaagagccgctgagcagattccagggagcttcgtctactcgatcccattcagcactggaccagtcaataaaagcaatgtggtgacagcaagtacatccatccagctcctggatgaacggaaatctcctgtggtggcagctgtaggcattcagatgaaacttgaatttttccaaaggaagttctggactgccagcagacagtgtgcttccctggatggcaaatgctccatcagctgtgatgatgagactgtgaattgttacctcatagacaataatggatttattttggtgtctgaagactacacacagactggagacttttttggtgagatcgagggagctgtgatgaacaaattgctaacaatgggctcctttaaaagaattaccctttatgactaccaagccatgtgtagagccaacaaggaaagcagcgatggcgcccatggcctcctggatccttataatgccttcctctctgcagtaaaatggatcatgacagaacttgtcttgttcctggtggaatttaacctctgcagttggtggcactccgatatgacagctaaagcccagaaattgaaacagaccctggagccttgtgatactgaatatccagcattcgtctctgagcgcaccatcaaggagactacagggaatattgcttgtgaagactgctccaagtcctttgtcatccagcaaatcccaagcagcaacctgttcatggtggtggtggacagcagctgcctctgtgaatctgtggcccccatcaccatggcacccattgaaatcagtcaacataatgaatcccttaagtgtgaacgtctaaaggcccagaagatcagaaggcgcccagaatcttgtcatggcttccatcctgaggagaatgcaagggagtgtgggggtgcgccgagtctccaagcccagacagtcctccttctgctccctctgcttttgatgctcttctcaaggtgacactgactgagatgttctcttactgactgagatgttctcttggcatgctaaatcatggataaactgtgaaccaaaatatggtgcaacatacgagacatgaatatagtccaaccatcagcatctcatcatgattttaaactgtgcgtgatataaactcttaaagatatgttgacaaaaagttatctatcatctttttactttgccagtcatgcaaatgtgagtttgccacatgataatcacccttcatcagaaatgggaccgcaagtggtaggcagtgtcccttctgcttgaaacctattgaaaccaatttaaaactgtgtactttttaaataaagtatattaaaatcataa

SEQ ID NO: 4077 - protein, 909 aa, Homo sapiens
MYNKDPAIVNGVYWSESLNKVFVDNFDRDPSLIWQYFGSAKGFFRQYPGIKWEPDENGVIAFDCRNRKWYIQAATSPKDVVILVDVSGSMKGLRLTIAKQTVSSILDTLGDDDFFNIIAYNEELHYVEPCLNGTLVQADRTNKEHFREHLDKLFAKGIGMLDIALNEAFNILSDFNHTGQGSICSQAIMLITDGAVDTYDTIFAKYNWPDRKVRIFTYLIGREAAFADNLKWMACANKGFFTQISTLADVQENVMEYLHVLSRPKVIDQEHDVVWTEAYIDSTLTDDQGPVLMTTVAMPVFSKQNETRSKGILLGVVGTDVPVKELLKTIPKYKLGIHGYAFAITNNGYILTHPELRLLYEEGKKRRKPNYSSVDLSEVEWEDRDDVLRNAMVNRKTGKFSMEVKKTVDKGKRVLVMTNDYYYTDIKGTPFSLGVALSRGHGKYFFRGNVTIEEGLHDLEHPDVSLADEWSYCNTDLHPEHRHLSQLEAIKLYLKGKEPLLQCDKELIQEVLFDAVVSAPIEAYWTSLALNKSENSDKGVEVAFLGTRTGLSRINLFVGAEQLTNQDFLKAGDKENIFNADHFPLWYRRAAEQIPGSFVYSIPFSTGPVNKSNVVTASTSIQLLDERKSPVVAAVGIQMKLEFFQRKFWTASRQCASLDGKCSISCDDETVNCYLIDNNGFILVSEDYTQTGDFFGEIEGAVMNKLLTMGSFKRITLYDYQAMCRANKESSDGAHGLLDPYNAFLSAVKWIMTELVLFLVEFNLCSWWHSDMTAKAQKLKQTLEPCDTEYPAFVSERTIKETTGNIACEDCSKSFVIQQIPSSNLFMVVVDSSCLCESVAPITMAPIEISQHNESLKCERLKAQKIRRRPESCHGFHPEENARECGGAPSLQAQTVLLLLPLLLMLFSR

SEQ ID NO: 4078 - DNA, 3306 bp, Homo sapiens
gttgactgtgacacgggtgttacatatcttcctgtgccccttctccctgtagggtgaagctctgggcctcggcttttggtggggagataaaatccattgctgctaagtactccggttcccagcttctgcaaaagcagtatgaatacttcaatgctgtgctgataaatgaaagggacaaagacgggaattttttggagctgggaaaggaattcatcttagccccaaatgaccattttaataatttgcctgtgaacatcagtctaagtgacgtccaagtaccaacgaacatgtacaacaaagaccctgcaattgtcaatggggtttattggtctgaatctctaaacaaagtttttgtagataactttgaccgtgacccatctctcatatggcagtactttggaagtgcaaagggcttttttaggcagtatccggggattaaatgggaaccagatgagaatggagtcattgccttcgactgcaggaaccgaaaatggtacatccaggcagcaacttctccgaaagacgtggtcattttagttgacgtcagtggcagcatgaaaggactccgtctgactatcgcgaagcaaacagtctcatccattttggatacacttggggatgatgacttcttcaacataattgcttataatgaggagcttcactatgtggaaccttgcctgaatggaactttggtgcaagccgacaggacaaacaaagagcacttcagggagcatctggacaaacttttcgccaaaggaattggaatgttggatatagctctgaatgaggccttcaacattctgagtgatttcaaccacacgggacaaggaagtatctgcagtcaggccatcatgctcataactgatggggcggtggacacctatgatacaatctttgcaaaatacaattggccagatcgaaaggttcgcatcttcacatacctcattggacgagaggctgcgtttgcagacaatctaaagtggatggcctgtgccaacaaaggattttttacccagatctccaccttggctgatgtgcaggagaatgtcatggaataccttcacgtgcttagccggcccaaagtcatcgaccaggagcatgatgtggtgtggaccgaagcttacattgacagcactctgactgatgatcagggccccgtcctgatgaccactgtagccatgcctgtgtttagtaagcagaacgaaaccagatcgaagggcattcttctgggagtggttggcacagatgtcccagtgaaagaacttctgaagaccatccccaaatacaagttagggattcacggttatgcctttgcaatcacaaataatggatatatcctgacgcatccggaactcaggctgctgtacgaagaaggaaaaaagcgaaggaaacctaactatagtagcgttgacctctctgaggtggagtgggaagaccgagatgacgtgttgagaaatgctatggtgaatcgaaagacggggaagttttccatggaggtgaagaagacagtggacaaagggtttaggtgtggcgctttccagaggtcatgggaaatatttcttccgagggaatgtaaccatcgaagaaggcctgcatgacttagaacatcccgatgtgtccttggcagatgaatggtcctactgcaacactgacctacaccctgagcaccgccatctgtctcagttagaagcgattaagctctacctaaaaggcaaagaacctctgctccagtgtgataaagaattgatccaagaagtcctttttgacgcggtggtgagtgcccccattgaagcgtattggaccagcctggccctcaacaaatctgaaaattctgacaagggcgtggaggttgccttcctcggcactcgcacgggcctctccagaatcaacctgtttgtcggggctgagcagctcaccaatcaggacttcctgaaagctggcgacaaggagaacatttttaacgcagaccatttccctctctggtaccgaagagccgctgagcagattccagggagcttcgtctactcgatcccattcagcactggaccagtcaataaaagcaatgtggtgacagcaagtacatccatccagctcctggatgaacggaaatctcctgtggtggcagctgtaggcattcagatgaaacttgaatttttccaaaggaagttctggactgccagcagacagtgtgcttccctggatggcaaatgctccatcagctgtgatgatgagactgtgaattgttacctcatagacaataatggatttattttggtgtctgaagactacacacagactggagacttttttggtgagatcgagggagctgtgatgaacaaattgctaacaatgggctcctttaaaagaattaccctttatgactaccaagccatgtgtagagccaacaaggaaagcagcgatggcgcccatggcctcctggatccttataatgccttcctctctgcagtaaaatggatcatgacagaacttgtcttgttcctggtggaatttaacctctgcagttggtggcactccgatatgacagctaaagcccagaaattgaaacagaccctggagccttgtgatactgaatatccagcattcgtctctgagcgcaccatcaaggagactacagggaatattgcttgtgaagactgctccaagtcctttgtcatccagcaaatcccaagcagcaacctgttcatggtggtggtggacagcagctgcctctgtgaatctgtggcccccatcaccatggcacccattgaaatcagtcaacataatgaatcccttaagtgtgaacgtctaaaggcccagaagatcagaaggcgcccagaatcttgtcatggcttccatcctgaggagaatgcaagggagtgtgggggtgcgccgagtctccaagcccagacagtcctccttctgctccctctgcttttgatgctcttctcaaggtgacactgactgagatgttctcttactgactgagatgttctcttggcatgctaaatcatggataaactgtgaaccaaaatatggtgcaacatacgagacatgaatatagtccaaccatcagcatctcatcatgattttaaactgtgcgtgatataaactcttaaagatatgttgacaaaaagttatctatcatctttttactttgccagtcatgcaaatgtgagtttgccacatgataatcacccttcatcagaaatgggaccgcaagtggtaggcagtgtcccttctgcttgaaacctattgaaaccaatttaaaactgtgtactttttaaataaagtatattaaaatcataa

SEQ ID NO: 4079 - protein, 436 aa, Homo sapiens
MYNKDPAIVNGVYWSESLNKVFVDNFDRDPSLIWQYFGSAKGFFRQYPGIKWEPDENGVIAFDCRNRKWYIQAATSPKDVVILVDVSGSMKGLRLTIAKQTVSSILDTLGDDDFFNIIAYNEELHYVEPCLNGTLVQADRTNKEHFREHLDKLFAKGIGMLDIALNEAFNILSDFNHTGQGSICSQAIMLITDGAVDTYDTIFAKYNWPDRKVRIFTYLIGREAAFADNLKWMACANKGFFTQISTLADVQENVMEYLHVLSRPKVIDQEHDVVWTEAYIDSTLTDDQGPVLMTTVAMPVFSKQNETRSKGILLGVVGTDVPVKELLKTIPKYKLGIHGYAFAITNNGYILTHPELRLLYEEGKKRRKPNYSSVDLSEVEWEDRDDVLRNAMVNRKTGKFSMEVKKTVDKGFRCGAFQRSWEIFLPRECNHRRRPA

SEQ ID NO: 4080 - DNA, 541 bp, Homo sapiens
gggtgttacatatcttcctgtgccccttctccctgtagggtgaagctctgggcctcggcttttggtggggagataaaatccattgctgctaagtactccggttcccagcttctgcaaaagaaatacaaagagtatgagaaagacgttgccatagaagaaattgatggcctccaactggtaaagaagctggcaaagaacatggaagagatgtttcacaagaagtctgaggccgtcaggcgtctggtggaggctgcagaagaagcacacctgaaacatgaatttgatgcagacttacagtatgaatacttcaatgctgtgctgataaatgaaagggacaaagacgggaattttttggagctgggaaaggaattcatcttagccccaaatgaccattttaataatttgcctgtgaacatcagtctaagtgacgtccaagtaccaacgaacatgtacaacaaagaccctgcaattgtcaatggggtttattggtctgaatctctaaacaaagtttttgtagataactttgaccgtgacccatctc

SEQ ID NO: 4081 - protein, 113 aa, Homo sapiens
MEEMFHKKSEAVRRLVEAAEEAHLKHEFDADLQYEYFNAVLINERDKDGNFLELGKEFILAPNDHFNNLPVNISLSDVQVPTNMYNKDPAIVNGVYWSESLNKVFVDNFDRDP

SEQ ID NO: 4082 - DNA, 559 bp, Homo sapiens
cccctatatttatctttaacctcaagtgaatgttgctgcctttgtagttcatgagcaatgtatactcttgaattccagctctgtgaaatcggtagaaaatgagaaatacaaagagtatgagaaagacgttgccatagaagaaattgatggcctccaactggtaaagaagctggcaaagaacatggaagagatgtttcacaagaagtctgaggccgtcaggcgtctggtggaggctgcagaagaagcacacctgaaacatgaatttgatgcagacttacagtatgaatacttcaatgctgtgctgataaatgaaagggacaaagacgggaattttttggagctgggaaaggaattcatcttagccccaaatgaccattttaataatttgcctgtgaacatcagtctaagtgacgtccaagtaccaacgaacatgtacaacaaagaccctgcaattgtcaatggggtttattggtctgaatctctaaacaaagtttttgtagataactttgaccgtgacccatctctcatatggcagtactttggaagtgcaaagggcttt

SEQ ID NO: 4083 - protein, 125 aa, Homo sapiens
MEEMFHKKSEAVRRLVEAAEEAHLKHEFDADLQYEYFNAVLINERDKDGNFLELGKEFILAPNDHFNNLPVNISLSDVQVPTNMYNKDPAIVNGVYWSESLNKVFVDNFDRDPSLIWQYFGSAKG

SEQ ID NO: 4084 - DNA, 542 bp, Homo sapiens
tatttaagcatctgtaggaacatgctgacagcctacttcaagtcctcctctcctttcagttttcaggaaactgtgtactgcctgacttcagtgtgggtccacctctggcatctttatagtagcagaacttattcgaaaaatacaaagagtatgagaaagacgttgccatagaagaaattgatggcctccaactggtaaagaagctggcaaagaacatggaagagatgtttcacaagaagtctgaggccgtcaggcgtctggtggaggctgcagaagaagcacacctgaaacatgaatttgatgcagacttacagaccctgcaattgtcaatggggtttattggtctgaatctctaaacaaagtttttgtagataactttgaccgtgacccatctctcatatggcagtactttggaagtgcaaagggcttttttaggcagtatccggggattaaatgggaaccagatgagaatggagtcattgccttcgactgcaggaaccgaaaatggtacatccaggcagcaacttctccgaaagacgtgg

SEQ ID NO: 4085 - protein, 49 aa, Homo sapiens
MLTAYFKSSSPFSFQETVYCLTSVWVHLWHLYSSRTYSKNTKSMRKTLP

SEQ ID NO: 4086 - DNA, 2084 bp, Homo sapiens
aggattcctcatgggatgacaaggccttgctccagggatgatgtttcccactgtaggagaacagctactgtctttgatgaactgagtctacagggctattgaagggtcttgctgtgctgcccagcctggagtgtggtggtgcgatcatggctcactgaagcctccacttacaactcctggactcaagtgatcctcccacctgagcctcctgagtagctaggactataggcacttggcaccacacctggcaaattttttttatcataggatctcgctacattggccaggctggtctcaaacttctggccccaagtgattttcccacctctgcctcccaaagtgctgagactacagtctggcccttcatgatctctagatattaccaaaagtcccagagaaatgagtgcatggatggcttaatgacaacccactttcttctctggaagaaagaacttagtacagccctaccagaaggtgggatggcaatgccatcttcagacttgagtgttggggaggccttttctgctaaccaacagcaaatgttttacaagagaaacaggacacacagtagatgaaggcagccatggaaaatctgtatgaattatccactctgttgatctgtgcttaaaatatagaagggaaagtgaagaataaaaatgtgtccatgagcatcccacctggcttgcatccagattgaacaatttgaatgctaagagcaggattttgatagtatggcagacattgctcattgctcagccaacccattctcccctttgtccttactaacaacatcctgattttgtgtaggcaacaatgctcccagctaaaattacctactttaccagactcctatgcagttagaggtggcccagtaaccctggcaaataagatgcatgcaggcattactggactgagcttccaaaaacagcttttaaaaggggcaagctcaactgcatgaccctttgggcttttgaacctctttacctggaaatgagacctaaagctaaaaatgaaacaactgtcttgttatcatgaggtgactatcatgaagatgaaaacctccacaccaaataagtggaaagaaaagttggaaagaggtggagagaatgactcaatctttgatgtatcagtgctgcattgcctccctcaaaatgtctcaactgttttatgcagctgagcaaattcgtgatctcaaacagcaactcaagcaactccaggaaagaaaaaaaattgaccactggaggagatacctaagataatcctggtgatactttcggtgctacaagaaaaaaataatcctcgcacccaagaagaaacaatgaaaccttatttttcatgtaaatttctactcctgtttggttcaagcatttgaactgttgcataagatttttttgagtgccgctgagaaaagtattatcaatctagaatgcaccagaaagaaagcagcagaaagattacaaacagcttttctaaacccttgtccagcatttaccagaaagagcagcatgaattaacaaaagcagaaattttagttaaaaaaaaaaagcaactcaactctgattcctgagacatataatacaggacgtctatcgcccatttaccctcatccaactcaaatggctaccaaactctaaaattagcagggcatgtcgggaagacttcttattccttgtattacagatctgttgacgtgtcagtagcattttcctttgcaagttataaaatttcctttccccagtcttcaaataggcacttccccctccccaaagtctcttttgtcaccaactgccataacccaccaatcagggaaacaaatttcagttcataaaagaaaaccatgggtgacctactgaggaccacagtttcatttccataacaaagactgacatacaacccatgcccaaagtctggaacagctatgaataactgtggctgaatagtctattttctgttgggattcatatcaaactctatatttgaacttgagatatcagaacttttgtattataatacataaaacctaggtagtgagtttgaattgtctgcatttattctccatgggtaataaaaactcattgtttctc

SEQ ID NO: 4087 - protein, 69 aa, Homo sapiens
MISRYYQKSQRNECMDGLMTTHFLLWKKELSTALPEGGMAMPSSDLSVGEAFSANQQQMFYKRNRTHSR

SEQ ID NO: 4088 - DNA, 416 bp, Homo sapiens
gataacacattgtctgtcactggctggttgtaatgcaaggaagggacaaagatgaaatggaaacatgttccttttttggtcatgatatcactcctcagcttatccccaaatcacctgtttctggcccagcttattccagaccctgaagatgtagagagggggaacgaccacgggacgccaatccccacctctgataacgatgacaattcgctgggctatacaggtagagtgtctctttcccaaatactaacttcctcctgaaatgcctccacctccatcaaccatcaaccacctgtataaaattaatcgaatcatccctgcttccagctaacaaccacaatttctcatttttcaaacttcattctgttcatatcagatcatattgctaaagtaaacacttttaagaacagaaatgt

SEQ ID NO: 4089 - protein, 69 aa, Homo sapiens
MKWKHVPFLVMISLLSLSPNHLFLAQLIPDPEDVERGNDHGTPIPTSDNDDNSLGYTGRVSLSQILTSS

SEQ ID NO: 4090 - DNA, 562 bp, Homo sapiens
agatgtgtggagcttacggaatgtggagcccatttattttgcatgcacatttaatgtgaaaaattatttttaagttctaaagcaacctctcggaaatgctaagaactgcaaagctacgcagaccctgatgcattcctaaatataatgaagaaaaaacagaaatgcaccaagaattgaaaaccctggttactcacgattcttttcacctttccaccttgacccagctttcgttctgtccgagacacccacaggagaagttatctcagccatcgagagcagcagcatcagtaacagcacagccatgccagactcagcaattctgctcttagaagttttacccaagagaaaaggaaaacacatgcccacatgaagagtgtttatatcagctttattcataatcacctccacctggtaacaaccaattgtccaccgaatgagacaaagtctagctctgttgcccagactggactacagtggtgtgattatagctcacatcctcacatcagacttgcactcctagactcaagcaatccttctgcctcagcctaaagagtagctggct

SEQ ID NO: 4091 - protein, 60 aa, Homo sapiens
MKSVYISFIHNHLHLVTTNCPPNETKSSSVAQTGLQWCDYSSHPHIRLALLDSSNPSASA

SEQ ID NO: 4092 - DNA, 308 bp, Homo sapiens
gctgccttgaaaatctgaactccttaatgccatttccttcagcaaaacaggcatctcttagagtgtcaagacaagacccagagtcttggttcctgtgtttgctccctgagtgaaaaatcatgcttcaaattgattcatagatctggcaaataccactgatactagcagctgtttgctaatattctgaatagagcttgccacagagagttcacggatttaagacatacttgaaaaaaatttgaaatgatttcattacatgaagaaaaaaataggtattgcagcatcctgttaccaagaaataaagatag

SEQ ID NO: 4093 - protein, 43 aa, Homo sapiens
CHFLQQNRHLLECQDKTQSLGSCVCSLSEKSCFKLIHRSGKYH

SEQ ID NO: 4094 - DNA, 444 bp, Homo sapiens
tggctggttgtaatgcaaggaagggacaaagatgaaatggaaacatgttccttttttggtcatgatatcactcctcagcttatccccaaatcacctgtttctggcccagcttattccagggctcaagcctactaaagaaccaagaaaaattctgtaatacaataaaattcgtctccaccctttttaatggtttaaaggatcaattcttctccaagcccatcactgaccttcctgctgaacttcaactggatgcaaaacaaacccacaaattctattttagagaattatggaagtcaaatgacgtatgtattcaggtcacagaaaatgtatgatgcatggtgccatttaaaaaaatatttgctctgtgaagatctgctttctgcattatggaagaaaagcaattcatatttttcaacggcttgcattaaaatcctacactgtgta

SEQ ID NO: 4095 - protein, 64 aa, Homo sapiens
MQNKPTNSILENYGSQMTYVFRSQKMYDAWCHLKKYLLCEDLLSALWKKSNSYFSTACIKILHC

SEQ ID NO: 4096 - DNA, 632 bp, Homo sapiens
atgagagacctggaggagacttcatgattttattcatcccccaagatttcctcaggactggtaccattttccatcactgtcttctgccgtcagcaacatgtgagctttctccacagtctgatccgtgtctctctctcactgcgggctgccaccccaccaaatctttggcatggctaaggcaagaacctttggcgttacattttggcaagcctgccaggaggatctccaggaaaggcatctggaccatcacgtggttcgagaccatcaagctacaagaggtcttacaaatggaatctcaaatgagctcaactcacggcttctaccgaggacccctggatcgacccgctggtccctcactaggctaaaaagttcccctctggaggacaccacaactgcagggccccttcttcgcccctaatcagcagaaagtagccagaacgacagccgcccaggtcccaacaggagttggggtgtccaatctagagggggaactgagaggaggttccagctgggcttcctgggttgagtaggggctcagaaagttgtgaaactcactcatttcttacatcaggacttactttggtcctggatgaataatattgaatatatatgcttaaaatattcctaacacc

SEQ ID NO: 4097 - protein, 113 aa, Homo sapiens [sequence omitted]

SEQ ID NO: 4098 - DNA, 591 bp, Homo sapiens
atctagaattaagacactgagtgggaagagagatacaaatatgtccatagaaatatggaaggttttaagccagaaaatccttaaatgaaggtctgtagcagtatctctccagatatttaaaaatacaatgatcaccaaaatatgctataaatgtttaaaatggactcctatcgaaagttcagaggttaaagatgatgttgtttatggtactcctagaaattgattcttctttattttttcttttcgttgagtttaattgccactagaattattttcaagttaagaagataagaggattgactttttaaacttcaaaatgaacttccctgctgtgactgactatattccccagtatggagaattatttccacggggggcagagatgattttcctggctctgggcctcatggtttcacactacctttgtaatttctcttggagcctttcattacagaactaaagttgcctctgctcagctgtattcttctttgagctaggattggactggccgtgtgacacaattctgaccaatgagatgtaggtggaattctgtcagttacgttgcctcacgtggatatataagataaagca

SEQ ID NO: 4099 - protein, 47 aa, Homo sapiens
MNFPAVTDYIPQYGELFPRGAEMIFLALGLMVSHYLCNFSWSLSLQN

SEQ ID NO: 4100 - DNA, 1951 bp, Homo sapiens
ctgtgtggaaactgggatttgaacggcgggcaggaagtactcgagtagggagtctggcctagtgaaagtctctgtttcctccttttcttacttttcactcaataaaaccctgctttacacacccttcaaaccatctgtgagcctgaatttttacggccatgggacagacaaggatcctgtctttatctaaactaaggaaaagtcctgcaacatttgtggtgcacaacgtggggctcgagaagtggaaaacgcctattttggagtgaaaccagggccgccttatgagctaaacagagtgtgttacagcttcaatagactaaacaagctctaaatttatcttcctatggtcacgggatctcatatattctggctgtcattgtcataataagccactcttggtcatatggaaaagcattcagctgctccctgcctttgctcacagcgtgtggtactctcttagaagctattcctggttcattggtaatttgctaaaagaatgccagtgggaacagaacagaagcattttcaagattaaattggcaatggttgtgactgattggatgaaggaagtaagggggagagattcatcagagaaagaaggcttctttaagcagcagaattgaggaatgagtcagaaaataaaagagcaaacaggctcattggcagaagggactagccttatctgagtctttgaacttgaacctttgagttaatgctagaatgaggaatgctgaagatcacagggagcccttggaagctaggaaaaggcaatgaaaggcttttacctagaacctgcagagacaacatggccctactacctcttgatttcagaattctggtctcctgaactaaaagattaaggaataagaatatctatcttatgcctattccaacttcagagggagcatcactctgtagaaaccttgatttgaacttctggccttctgcactggaagagagtaaatttctgttgttttaagctaccaagttcatggttgtttccatttctttttaagtttaagagcatattttagattccatcttaagacaatgtaacagctgtgagtcttttcatgagaaagaaaagaaggcagttagtctataatgaagatgaactgtcaagagcatgtgaaggggaaaggggtcttccctggcaccaatcagtcatttatattttacaaaacaatgcagcaaccttaattcctgcctcctcagaagaaagaatttgactaaggagcataaggcagaagaagagacagaggcaagtttccgagcagaaatgaatgttgatttaaaaactttagagcagaaatgaaaggaagtaaattacacttggaagaaggccaagctggcagattgacagatcaagtgcacagtttgactttttgacttggggttttctatgttggcatgcttccagaggcttccatcccttcccccgattcttctcttggggtggactctttgcctgtacagcgacctaccagcatgtgggaggggttgtacacgcagtgtgtttactggagttgtgcacatgctcacttgaggtgttctgcctgtaccagcctgaatgttcctaggtcgtataccagttaaactctgcctttttgccacttaatgcacatgcttgagcccactcgcccacctcctgagatctaattgggaagctggtgattaccagtttcaggtttgtctgtttattaagaggtgtttattttccttggtgctggctgtgaccaattttttttttagagatacagctaacaacagtctgactgtcatctaatggtcacctgaattcctggcgtgtgtgtgtgtgtgtgtgtgtgtgtgtgtgtgtgtgtgtctggtgtgctctcctactgtgctcatgtctgacctactgtaaccaaatgggccatcaaattagagaaaatttttgtgtttcaatagaaacctgtattttctacag

SEQ ID NO: 4101 - protein, 51 aa, Homo sapiens
MRKKRRQLVYNEDELSRACEGERGLPWHQSVIYILQNNAATLIPASSEERI

SEQ ID NO: 4102 - DNA, 3329 bp, Homo sapiens
atgtttgttctcttcttgtgcaacctttccttggtaccagcggctgcttcaaagaataaagttaaaggcagccaagggcagtttccactaacacagaatgtaaccgttgttgaaggtggaactgcaattttgacctgcagggttgatcaaaatgataacacctccctccagtggtcaaatccagctcaacagactctgtactttgacgacaagaaagctttaagggacaataggatcgagctggttcgcgcttcctggcatgaattgagtattagtgtcagtgatgtgtctctctctgatgaaggacagtacacctgttctttatttacaatgcctgtcaaaacttccaaggcatatctcaccgttctgggtgttcctgaaaagcctcagattagtggattctcatcaccagttatggagggtgacttgatgcagctgacttgcaaaacatctggtagtaaacctgcagctgatataagatggttcaaaaatgacaaagagattaaagatgtaaaatatttaaaagaagaggatgcaaatcgcaagacattcactgtcagcagcacactggacttccgagtggaccggagtgatgatggagtggcggtcatctgcagagtagatcacgaatccctcaatgccacccctcaggtagccatgcaggtgctagaaatacactatacaccatcagttaagattataccatcgactccttttccacaagaaggacagcctttaattttgacttgtgaatccaaaggaaaaccactgccagaacctgttttgtggacaaaggatggcggagaattaccagatcctgaccgaatggttgtgagtggtagggagctaaacattcttttcctgaacaaaacggataatggtacatatcgatgtgaagccacaaacaccattggccaaagcagtgcggaatatgttctcattgtgcatgatgttcccaacactttgcttcccactactatcatcccctcccttaccactgcaacagtcacaaccactgtagccataacaaccagcccaaccacatctgcaacaaccagcagcatcagagatcctaatgctttggctggccagaatggccctgaccatgctctcataggaggaatagtggctgtagttgtatttgtcacgctgtgttctatctttctgcttggtcgatatctggcaaggcataaaggaacgtatttaacaaatgaagctaaaggagctgaagatgcaccagatgctgatacagccattatcaatgctgaaggcagccaagtcaatgctgaagagaaaaaagagtatttcatttaagatgcaggccaagattctgagttttactaccaggctgaatgctggagaaaactggctatcatctttcagaagtcatttctaccatcgtctgctacccttattaactcccatactgtactgctatcagtagccagtgtataccaacaatcagctgttgaaagcatcattctttaattactgtaccatccataatgcaggacatttcttactgcctaaatttcacaccattgctcttttaacatacagtgcttgaatatacagccttaacaatgttaatcatctccttggatcattatattgagtggtttttatacattaaaaaatgtatgcagagtttttttcccccattttttcccctttaagtcatagaccttatcagtttgccattggacagctttcacaagtaacaggattagggaaggacataatgtatttaagaataagtgaaggttagaggtttacaattaatgttttctacatgtctgtcttcaaagacaacatgctttggaaacatatgtcctagaaaacataaaattaaaaaaaaacactatagtgtagtttttggaatgttggagattatactggtaaagctgtatcgatttgctattgaaatatagtatttgatacaggagccatgtgtacgaattgcaatcatgacatggtattttctataattatagagatcttactattaggatattgtagcttcatttaccaataaattattccaaatgatttactgcttttggaatcacaaatatttaattcatttctctaatttgattctataatttatttgcttcataaagattcacctgcctaaacaatattgaagtatccatagggcacaattttcagacattttagtatctgtatatagtgcatataataaatccaattaaacattatttgatacatatttaacttttttggctgtatgtaattcagtcataagtaagcattttctaacgtccattatatccctttaggtattacttaaaccaatattataagtagataacatgtattagtatttttgtctgtatgtcctagcactgttcaacaacaaatttttctagttcttgttaatttttatttgttatacaatggaagcacaatgttataaggaaaggtaattttaagctaacaaccagtgcacagcctcaggttttaaattacaaccacagttgaataataacctaaaaataaattttagtttgctaaaaatttacaaattttcattttgcagttccagagctgcttacctatgttggtttgccaaaaagaagtgtttaagatatgttttctgtataaatgaactaattctttatattaaattcctgtctatgcattttgtgaggtacaaactgatgaaacagtgagtgatagagaatttctgccatgcttttaactccaaagtgaaagtctctttctctggattattttaaaattttggcgtgtttaaccattaagaaatgctgtattcttaaatatgaaacagttaatctaaagtcttattatttcttctagtaaaataaaatattgttagattagttctcattaaatttattatatgctaaagaataaaactccagttagatttaaaaaaatcccatttacaagcattgcacctttaagaagaaaacaaatatgacagtatggtagctatacttgtgatgtctgacgcatgatggcctatggttttaaaaatagtattgtggaatatatttttgggtaataagaatggttgagtgcaacatcatgtattaatatcaaatgaaagacaagggtgctgtatctttgattatttatcaaaaaagtataaatcttttaaggaaaatgttagaattttaaagtttttttttgattgttgaagcatttatcttgttgatttcttacaaaagaaaaaggacgatgtcagtcaagcagcactttttcagaatatacagaacataaataatatgatgtggttgagtgttaacataataaatcatatacagtatgacattttaagg

SEQ ID NO: 4103 - protein, 437 aa, Homo sapiens; identical to SEQ ID NO: 425

SEQ ID NO: 4104 - DNA, 682 bp, Homo sapiens
aggtattactgtccaagaatcccttcaactaagatatcacatagaaattgaaccactcttgggaacagatagtgaggacgagaaaagaaaaaaaaagaagaaggaaattgaagcactgacatatgagggaatagttttgtaatgattcaataattactacaagcaccacttgaggttatgctggaactattggcgtaagaatcttattaccagggattccccggccagatggccaaataggaacagctccagtctgcagctcccagtgagaccaaggcagaagtagtgcctggaactccagcaagacagaactgttcactccaatggaaagacggctgaagccagggagccaagaggtcttctcagtggatcccaccaccatggagcccagcaagctaaaatccactggcttgaaattcttgctgccagcagagcagtctgaagtcaacctgggatactcgagcttcgtagagggaggggtgtctgctattactgaggcttgagtaggcagtttgcccctcacaatgtaaacaaagcctccaggaagttcagactaggtggagcccactgcagcgacaaaaatcctctgtttccacactgcctctctagattcctcctctctgagcagggcatccctaaaagaaaggcagcagccgtagtcaggggcttatagatgaaactt

SEQ ID NO: 4105 - protein, 59 aa, Homo sapiens
MERRLKPGSQEVFSVDPTTMEPSKLKSTGLKFLLPAEQSEVNLGYSSFVEGGVSAITEA

SEQ ID NO: 4106 - DNA, 2893 bp, Homo sapiens
gttctttatttacaatgcctgtcaaaacttccaaggcatatctcaccgttctgggtgttcctgaaaagcctcagattagtggattctcatcaccagttatggagggtgacttgatgcagctgacttgcaaaacatctggtagtaaacctgcagctgatataagatggttcaaaaatgacaaagagattaaagatgtaaaatatttaaaagaagaggatgcaaatcgcaagacattcactgtcagcagcacactggacttccgagtggaccggagtgatgatggagtggcggtcatctgcagagtagatcacgaatccctcaatgccacccctcaggtagccatgcaggtgctagaaatacactatacaccatcagttaagattataccatcgactccttttccacaagaaggacagcctttaattttgacttgtgaatccaaaggaaaaccactgccagaacctgttttgtggacaaaggatggcggagaattaccagatcctgaccgaatggttgtgagtggtagggagctaaacattcttttcctgaacaaaacggataatggtacatatcgatgtgaagccacaaacaccattggccaaagcagtgcggaatatgttctcattgtgcatgatcctaatgctttggctggccagaatggccctgaccatgctctcataggaggaatagtggctgtagttgtatttgtcacgctgtgttctatctttctgcttggtcgatatctggcaaggcataaaggaacgtatttaacaaatgaagctaaaggagctgaagatgcaccagatgctgatacagccattatcaatgctgaaggcagccaagtcaatgctgaagagaaaaaagagtatttcatttaagatgcaggccaagattctgagttttactaccaggctgaatgctggagaaaactggctatcatctttcagaagtcatttctaccatcgtctgctacccttattaactcccatactgtactgctatcagtagccagtgtataccaacaatcagctgttgaaagcatcattctttaattactgtaccatccataatgcaggacatttcttactgcctaaatttcacaccattgctcttttaacatacagtgcttgaatatacagccttaacaatgttaatcatctccttggatcattatattgagtggtttttatacattaaaaaatgtatgcagagtttttttcccccattttttcccctttaagtcatagaccttatcagtttgccattggacagctttcacaagtaacaggattagggaaggacataatgtatttaagaataagtgaaggttagaggtttacaattaatgttttctacatgtctgtcttcaaagacaacatgctttggaaacatatgtcctagaaaacataaaattaaaaaaaaacactatagtgtagtttttggaatgttggagattatactggtaaagctgtatcgatttgctattgaaatatagtatttgatacaggagccatgtgtacgaattgcaatcatgacatggtattttctataattatagagatcttactattaggatattgtagcttcatttaccaataaattattccaaatgatttactgcttttggaatcacaaatatttaattcatttctctaatttgattctataatttatttgcttcataaagattcacctgcctaaacaatattgaagtatccatagggcacaattttcagacattttagtatctgtatatagtgcatataataaatccaattaaacattatttgatacatatttaacttttttggctgtatgtaattcagtcataagtaagcattttctaacgtccattatatccctttaggtattacttaaaccaatattataagtagataacatgtattagtatttttgtctgtatgtcctagcactgttcaacaacaaatttttctagttcttgttaatttttatttgttatacaatggaagcacaatgttataaggaaaggtaattttaagctaacaaccagtgcacagcctcaggttttaaattacaaccacagttgaataataacctaaaaataaattttagtttgctaaaaatttacaaattttcattttgcagttccagagctgcttacctatgttggtttgccaaaaagaagtgtttaagatatgttttctgtataaatgaactaattctttatattaaattcctgtctatgcattttgtgaggtacaaactgatgaaacagtgagtgatagagaatttctgccatgcttttaactccaaagtgaaagtctctttctctggattattttaaaattttggcgtgtttaaccattaagaaatgctgtattcttaaatatgaaacagttaatctaaagtcttattatttcttctagtaaaataaaatattgttagattagttctcattaaatttattatatgctaaagaataaaactccagttagatttaaaaaaatcccatttacaagcattgcacctttaagaagaaaacaaatatgacagtatggtagctatacttgtgatgtctgacgcatgatggcctatggttttaaaaatagtattgtggaatatatttttgggtaataagaatggttgagtgcaacatcatgtattaatatcaaatgaaagacaagggtgctgtatctttgattatttatcaaaaaagtataaatcttttaaggaaaatgttagaattttaaagtttttttttgattgttgaagcatttatcttgttgatttcttacaaaagaaaaaggacgatgtcagtcaagcagcactttttcagaatatacagaacataaataatatgatgtggttgagtgttaacataataaatcatatacagtatgacattttaagg

SEQ ID NO: 4107 - protein, 287 aa, Homo sapiens
MPVKTSKAYLTVLGVPEKPQISGFSSPVMEGDLMQLTCKTSGSKPAADIRWFKNDKEIKDVKYLKEEDANRKTFTVSSTLDFRVDRSDDGVAVICRVDHESLNATPQVAMQVLEIHYTPSVKIIPSTPFPQEGQPLILTCESKGKPLPEPVLWTKDGGELPDPDRMVVSGRELNILFLNKTDNGTYRCEATNTIGQSSAEYVLIVHDPNALAGQNGPDHALIGGIVAVVVFVTLCSIFLLGRYLARHKGTYLTNEAKGAEDAPDADTAIINAEGSQVNAEEKKEYFI

SEQ ID NO: 4108 - DNA, 676 bp, Homo sapiens
ttcatttcactcagcttttattgttaataataaatgtcaaaaaacactcaaagacagaaaatcgtacacatagatattatagactgctggatcaagccaaacttccaagctttgttgctcatgtagacacatatcgttttcagagactgtaggtaaacacaggttccctcttccatcctgggtagtgattctccatttcagttaacttgcttacttaatttaaagttgttttattactaaaaaatgctaatgatcgtctgagtcttcagtgagttgtaatttctttgctgctggagcatcttgctttgatgttgatggctgctgactgatcagtgagtgattgctgaaggttagagtggtaaggcaatttcttaaaataaaacaacaataaggtttgacacattgattgattattcttttcctgaaaatttctgtgcgatttctgtttgatgaaattttatccacagtagaactgctttaaaaattaaagtcaatcctctgatacccttccattgctttatcaactaaatttatgtaatattctaaatcctttgtgattatttcagcaatcttcacagggctaggcacagtgacttatgcctataatcccaggacttcgagaggccaaggtgtgaggattgcttgaggccaggagttcaagaccaccgtgggcaac

SEQ ID NO: 4109 - protein, 30 aa, Homo sapiens
MSKNTQRQKIVHIDIIDCWIKPNFQALLLM

SEQ ID NO: 4110 - DNA, 404 bp, Homo sapiens
ttcatttcactcagcttttattgttaataataaatgtcaaaaaacactcaaagacagaaaatcgtacacatagatattatagactgctggatcaagccaaacttccaagctttgttgctcatgtagacacatatcgttttcagagactgtaggtaaacacaggttccctcttccatcctgggtagtgattctccatttcagttaacttgcttacttaatttaaagttgttttattactaaaaaatgctaatgatcgtctgagtcttcagtgagttgtaatttctttgctgctggagcatcttgctttgatgttgatggctgctgattccaccactgaagtcttgaatgtctcaaagtcatctataaagtttgggataagcttcttccaaactcctgccagtgtt

SEQ ID NO: 4111 - protein, 31 aa, Homo sapiens
MLMAADSTTEVLNVSKSSIKFGISFFQTPAS

SEQ ID NO: 4112 - DNA, 2656 bp, Homo sapiens
gttctcattgttcttaaataagttagaagagagtacctgtatcctggatcttttgaacttctgtgaagtaatgtgacaatacagatacttactgatctgattcgggatgttcctgagaaaacaggctccctagttcctgagacattgacattaggccaattaagaatcctacaatgatctctaagtattcaaatgaaaggaggtggcacacatttctaactttgaatcagaagctagaaatgatgaagcttagtgaggaaggcatgctgaaagccacgagaggctgaaagctacacgtcttgtgccagtcaagttgtaaatgcagacaaaaagttcttgaaggagatgaaaagtgctactccggtggacatgtaaattataagggagcaaaacagccttattgctgatatagagaaagtttaagtggtcttgattaagaccaaatctgccacagcattctcttaaaccaaagcctaatccagaccaaggccctaactctcttcaattctgtgaagattgaaagacatgaaggagctgcagaaaaaaagtctgaagctagtggaggttggttcataaggcttaagaaaataggtcatcttcagaacatagaagtgcaaggtgaagcaacaagggctgatggagaagctatagcatgttatccagaacatctacctaagatcactaatgaaggcagctgcactaagcaacagcatttaaatgtagatgaaacagtcctctattggaagaagatgccatttataactttcacaagtagagaatagaagccagtgcctgacttcaaagcttctaagaacagattgacttgcttgttaggggttaatgcagctggtgattttaagttgaaaccaatgttcatttaccattctgaaaatcctaaggcctttaataaatatactatatctaatctgtgctccatcaatgttataacaaggcctgggtgttagcacatctatttatagcatgttttattgaatattttaagctcaatgttgagactgagacctactgctcagaaaaagaaaaaaaaaaagattcctttcaagatattactgctcattgacaatgcatctagttacccaagagctctaaaggagatgtataaggtcattaatgttgttttcatgcctgttaaacacaacatccattctgtagcccatggatcaaggaataattttaactttcaaattttgttatttaagagatacattttttaaagctatagctgccaagacagtgattcttctgatgaatctgtgcaaagtaaattaaaaacctactggaaatgattcaccattctagatgtcattacgatcatttgtgattcctgggaggaagtcaaaatatcaacactggcaggagtttggaagaagcttatcccaaactttatagatgactttgagacattcaagacttcagtggtggaagtaagtgcagatatggtaaaaatagcaagataactataagtagagcctaaagatgtgagtgaatcactgtaatctcatcatcaaacttaatggatagggagttgattcttatggtggagcaaataaaatgatttcttaagctgaaatctactcctggtgaagatacagtgaccaatgtttttattttgcttttattttttgtttgttttgaattttttgcagaatcaaggtcttgctatgttgcccacggtggtcttgaactcctggcctcaagcaatcctcacaccttggcctctcgaagtcctgggattataggcataagtcactgtgcctagccctgtgaagattgctgaaataatcacaaaggatttagaatattacataaatttagttgataaagcaatggaagggtatcagaggattgactttaatttttaaagcagttctactgtggataaaatttcatcaaacagaaatcgcacagaaattttcaggaaaagaataatcaatcaatgtgtcaaaccttattgttgttttattttaagaaattgccttaccactctaaccttcagcaatcactcactgatcagtcagcagccatcaacatcaaagcaagatgctccagcagcaaagaaattacaactcactgaagactcagacgatcattagcattttttagtaataaaacaactttaaattaaggtacgtacattgtttttatggacatgatgctattgcacactgaatagactatgggatagttaacttttatatgcactaagaaacaaacaaaaatgtgtgagactcatgatattgtaatatgtgctttattgcggtgatctggaactgaacccatgatatctccaaagcatgcctgtactttaaatatacacatgaaaacttaaacttatctgtattcaaatgtttcactatagttttatacctaacaacaaatgcaaaaaatattgtaaaattattattcttataaatttagaaaaataaaatgactccatatattaatattttcatattcagaggaaggtcattaaaacttactaaaaacttaagaaatacagaattacaattattgacatattaagatgatcatgacataaatgataaaaagcatgcaaaataaaaatatttcacatcaatttttttgtataagcagtacacatgcatatgtttaaaataaaatctctgagaatatt

SEQ ID NO: 4113 - protein, 75 aa, Homo sapiens [sequence omitted]

SEQ ID NO: 4114 - DNA, 705 bp, Homo sapiens
acacaagaaaaagtcttgggttgatggtgctgttctgtatttttattatggttgtgattacataacactatgtacttatcagaatttataaaactacacaaaatcggtaaattttacagtaggtaaaattttaaaattgcatcttcttagcagtacctgctctttcataagttttctagctccatcttcttttccatttattcactgaaaaagtaattattagtggctacaagttgccatacattggaattagagataaacattaaaaaacaagatgaaaatatgtttgctttcatggagcttactatccactcagaggaaataggagttacgaaggaaaatgtataatgtcgtctgatgatacagggatattataaccaattaatggaaagaaacatttaagacaacaccttcctctatgtttacatcaggatgcatttttgtaattgagtatgtatattaattatattacaacagacaacaagtataccacaaataattcaacaagttgaatttttacatcccattactgtaaactcacattcttaagaggatataaacgtcatgttatgaacatacaccaattaaattttccctacatatatccaacatctttttaatgtcacttgctttattacaatctacactcacttgttattgtggccattactttgctgctgcttaataaaggtcttgttcttatta

SEQ ID NO: 4115 - protein, 38 aa, Homo sapiens
IFPTYIQHLFNVTCFITIYTHLLLWPLLCCCLIKVLFL

SEQ ID NO: 4116 - DNA, 533 bp, Homo sapiens
ataagatagcttctcagctttcagctttacttcacggttttaactatcaaaagaagcaagccatctgaagatttgcctgagactgaaggatccacttctgcgacgactccctcaggacttataatgcagatggaaccagattgagaaaaaccagccaaccaaccaaccaacatgatggctgaaccagacaagagaagtcccgaagtaaaatacccaccaattaccagaatctgtgcctgccatacatcgaagtctctgacttctttattccacatgactctgcaaatctacgtctgaacttatattctcctgaaaccagaacggatgaaactcattagatgctccagcctgggggattaatgtttaccttgatttaatgtctcatcagaagcatgacatccacagcactctggctgcagcaggattaaatgaagcatggccgtttcttcaagagagacttaaacttcaagcctttagccctagagggaatgggcaggagatgaagagagagtaaaaatctattgaactaccaa

SEQ ID NO: 4117 - protein, 41 aa, Homo sapiens
MMAEPDKRSPEVKYPPITRICACHTSKSLTSLFHMTLQIYV

SEQ ID NO: 4118 - DNA, 1583 bp, Homo sapiens
aagcaagcctaggcaatggtgggcgcccctcccccagcctcgctgccgccttgcagtttgatctcagactgccctgctagcaatcagcgagactccgtggacgtaggaccctccgagccaggtgcaggatatgatctcctggtgcgccgcttttttaagcccgtcggaaaagcgcagtattcgggtgggagggaccggattttccagtgagatgaacccagtacctcagatggaaatgcagaaatcacccgtcttctgcgtcgctcacgctgggagctgtagaccggagctgttcctattcggccatcttggctcctcccgacattcgatgtttcaccatcaagtatgacattagctgttgaaaaaaatgatgacgaccaaaagattgaacaagatggtatcaaaccagaagataaagctcataaggccgcaaccaaaattcaggctagcttccgtggacacataacaaggaaaaagctcaaaggagagaagaaggatgatgtccaagctgctgaggctgaagctaataagaaggatgaagcccctgttgccgatggggtggagaagaagggagaaggcaccactactgccgaagcagccccagccactggctccaagcctgatgagcccggcaaagcaggagaaactccttccgaggagaagaagggggagggtgatgctgccacagagcaggcagccccccaggctcctgcatcctcagaggagaaggccggctcagctgagacagaaagtgccactaaagcttccactgataactcgccgtcctccaaggctgaagatgccccagccaaggaggagcctaaacaagccgatgtgcctgctgctgtcactgctgctgctgccaccacccctgccgcagaggatgctgctgccaaggcaacagcccagcctccaacggagactggggagagcagccaagctgaagagaacatagaagctgtagatgaaaccaaacctaaggaaagtgcccggcaggacgagggtaaagaagaggaacctgaggctgaccaagaacatgcctgaactctaagaaatggctttccacatccccaccctcccctctcctgagcctgtctctccctaccctcttctcagctccactctgaagtcccttcctgtcctgctcacgtctgtgagtctgtcctttcccacccactagccctctttctctctgtgtggcaaacatttaaaaaaaaaaaaaaaaagcaggaaagatcccaagtcaaacagtgtggcttaaacattttttgtttcttggtgttgttatggcaagtttttggtaatgatgattcaatcattttgggaaattcttgcactgtatccaagttatttgatctggtgcgtgtggccctgtgggagtccactttcctctctctctctctctctgttccaagtgtgtgtgcaatgttccgttcatctgaggagtccaaaatatcgagtgaattcaaaatcatttttgttttcctccttttcaatgtgatggaatgaacaaaaaggaaaaaattcaaaaaacccagtttgttttaaaaataaataaataaagcaaatgtgccaattagcgt

SEQ ID NO: 4119 - protein, 232 aa, Homo sapiens
MTLAVEKNDDDQKIEQDGIKPEDKAHKAATKIQASFRGHITRKKLKGEKKDDVQAAEAEANKKDEAPVADGVEKKGEGTTTAEAAPATGSKPDEPGKAGETPSEEKKGEGDAATEQAAPQAPASSEEKAGSAETESATKASTDNSPSSKAEDAPAKEEPKQADVPAAVTAAAATTPAAEDAAAKATAQPPTETGESSQAEENIEAVDETKPKESARQDEGKEEEPEADQEHA

SEQ ID NO: 4120 - DNA, 1647 bp, Homo sapiens
aagcaagcctaggcaatggtgggcgcccctcccccagcctcgctgccgccttgcagtttgatctcagactgccctgctagcaatcagcgagactccgtggacgtaggaccctccgagccaggtgcaggatatgatctcctggtgcgccgcttttttaagcccgtcggaaaagcgcagtattcgggtgggagggaccggattttccagtgagatgaacccagtacctcagatggaaatgcagaaatcacccgtcttctgcgtcgctcacgctgggagctgtagaccggagctgttcctattcggccatcttggctcctcccgacattcgatgtttcaccatcaagtatgacattagctgttgaaaaaaatgatgacgaccaaaagattgaacaagatggtatcaaaccagaagataaagctcataaggccgcaaccaaaattcaggctagcttccgtggacacataacaaggaaaaagctcaaaggagagaagaaggatgatgtccaagctgctgaggctgaagctaataagaaggatgaagcccctgttgccgatggggtggagaagaagggagaaggcaccactactgccgaagcagccccagccactggctccaagcctgatgagcccggcaaagcaggagaaactccttccgaggagaagaagggggagggtgatgctgccacagagcaggcagccccccaggctcctgcatcctcagaggagaaggccggctcagctgagacagaaagtgccactaaagcttccactgataactcgccgtcctccaaggctgaagatgccccagccaaggaggagcctaaacaagccgatgtgcctgctgctgtcactgctgctgctgccaccacccctgccgcagaggatgctgctgccaaggcaacagcccagcctccaacggagactggggagagcagccaagctgaagagaacatagaagctgtagatgaaaccaaacctaaggaaagtgcccggcaggacgagggtaaagaagaggaacctgaggctgaccaagaacatgcctgaactctaagaaatggctttccacatccccaccctcccctctcctgagcctgtctctccctaccctcttctcagctccactctgaagtcccttcctgtcctgctcacgtctgtgagtctgtcctttcccacccactagccctctttctctctgtgtggcaaacatttaaaaaaaaaaaaaaaaagcaggaaagatcccaagtcaaacagtgtggcttaaacattttttgtttcttggtgttgttatggcaagtttttggtaatgatgattcaatcattttgggaaattcttgcactgtatccaagttatttgatctggtgcgtgtggccctgtgggagtccactttcctctctctctctctctctgttccaagtgtgtgtgcaatgttccgttcatctgaggagtccaaaatatcgagtgaattcaaaatcatttttgttttcctccttttcaatgtgatggaatgaacaaaaaggaaaaaattcaaaaaacccagtttgttttaaaaataaataaataaagcaaatgtgccaattagcgtaaacttgcggctctaaggctcctttttcaacccgaatattaataaatcatgagagtaatcaagg

SEQ ID NO: 4121 - protein, 232 aa, Homo sapiens; identical to SEQ ID NO: 4119

SEQ ID NO: 4122 - DNA, 1750 bp, Homo sapiens
gagaagatctgggaaggagtcagtcagagagccttgggccagagttccaggggctctgggagtggctgccaggtcctgcagagcaaaagaggagagagaaaaagagaatgagttacatgggcccactgtatgttatagctgactgctgatggtatcagagattttaacactgcagtcaactgcagacaaagccgcaatcttgtgacttcacagagcctcatgggcttttgagttgaccaacttgagaaaaatttctgacttgatgcatgaaatgaaacgaaggcaggtgacacataaaggaaatgacaagacacgattgaaaactattgaccctcaagttatcacaaatggttatgaaatggaaatggaatgggaaggagtatgaaaaaataagctgaatactgacaaacctaaggtttcagaatcactggaccattagaccacatcagcactggacccagctaaagggcagagattcagagatccccaactgtgactagttgtgcaagaagcatgcagaatgatgagaaacctacagctcagaaaagaaacaaatcgtctatatggaagtccagtcttgctgtggaaaggctcagaaaaacaagacccttagcatatctcagggaactgaaaggctgtggggaaaccaacagcttgctgcaaccacagccacaagtcaggtaagcattgagcctgacagctcaggaaaatgacccacttcttgccaactcagacaaaaaggcttcacttaggcctagggaaactgtctctaataaggccatctgttaaccgtgtcgcctgagtccctctcagcaattcctcattccctccctttccaccttccaccctgaagccagacattaaggcagcagagactgagtaaaatcaagctgttgggctcagtaaacattactgagctccatgagggaacacggtcccattttttaggttcccatgtccaaggcacattttgatcacattcatttagcagagaggtgaaggaagaaagcatgctggctgtgcagcagcatcgtgctgcatccccttgcttaggcaaagtcataacagacagcaaaaaataagaacttggctacagttcccaagggtttgaacctgaatacacagaacacgagaaaccacacaactcaggaagaaagcactgggcaagtgttcagaggccttattgacaatgggcccgctctcctattgacttgatttgtaacacataaagtcacttaaatcaggggtccccagccccatactggtctgtgccctgttaggaacccagctgcacagcaggaggtaaggggcaggcctgagctccacctcctgtcagatcagcagcagcattagatcctcataggagcgtgaacccttttgtgaactgcgcatatgaaggatctaggttgcatgcttcttatgagaatctaactaatacctgatgatctgagactctaactaatacttgatgatctgaagtttcatcccaaaaccactccccctaccccagtttgtggaaaaatcgccttctatgaaaccagcccctggtgccaaaaagtttggggatggctgacttaaacttctagcaatgatctgtcaagtctcttcatctcatcacataagtcggcatgtaatattcacaaaagaccaatccaacctctgaaaacgaaatgctcattttggggaagtgacttaactcttccagctcatctctgtccctcttaataaaaaaggaaaaataaaaataaat

SEQ ID NO: 4123 - protein, 40 aa, Homo sapiens
MHEMKRRQVTHKGNDKTRLKTIDPQVITNGYEMEMEWEGV

SEQ ID NO: 4124 - DNA, 3649 bp, Homo sapiens
aaagggaggagggggagagaggctctgggttgctgctgcttctgctgctgctgctgctgtgtggctgtttctgtacactcactggcaggcttggtgccggctccctcgcccgcccgcccgccagcctgggaaagtgggttacagagcgaaggagctcagctcagacactggcagaggagcatccagtcacagagagaccaaacaagaaccctttcctttggcttcctcttcagctcttccagagggcttgctatttgcactctctcttttgaaattgtgttgcttttacttttcacccttctgcttgggttttatgagggctttgttaagtcttagagggaaaagagactgagcgagggaaagagagaggcaaagtggaaaggaccataaactggcaaagcccgctctgcgctcgctgtggatgaaagccccgtgttggtgaagcctctcctcgcgagcagcgcgcacccctccagagcaccccgcggacccgcacctcggcgtggccaccatggtcaggagagttcagccggatcggaaacagttgccactggtcctactgagattgctctgccttcttcccacaggactgcctgttcgcagcgtggattttaaccgaggcacggacaacatcaccgtgaggcagggggacacagccatcctcaggtgcgttgtagaagacaagaactcaaaggtggcctggttgaaccgttctggcatcatttttgctggacatgacaagtggtctctggacccacgggttgagctggagaaacgccattctctggaatacagcctccgaatccagaaggtggatgtctatgatgagggttcctacacttgctcagttcagacacagcatgagcccaagacctcccaagtttacttgatcgtacaagtcccaccaaagatctccaatatctcctcggatgtcactgtgaatgagggcagcaacgtgactctggtctgcatggccaatggccgtcctgaacctgttatcacctggagacaccttacaccaactggaagggaatttgaaggagaagaagaatatctggagatccttggcatcaccagggagcagtcaggcaaatatgagtgcaaagctgccaacgaggtctcctcggcggatgtcaaacaagtcaaggtcactgtgaactatcctcccactatcacagaatccaagagcaatgaagccaccacaggacgacaagcttcactcaaatgtgaggcctcggcagtgcctgcacctgactttgagtggtaccgggatgacactaggataaatagtgccaatggccttgagattaagagcacggagggccagtcttccctgacggtgaccaacgtcactgaggagcactacggcaactacacctgtgtggctgccaacaagctgggggtcaccaatgccagcctagtccttttcagacctgggtcggtgagaggaataaatggatccatcagtctggccgtaccactgtggctgctggcagcatctctgctctgccttctcagcaaatgttaatagaataaaaatttaaaaataatttaaaaaacacacaaaaatgcgtcacacagaatacagagagagagagacagagagagagagagagagagagatgggggagaccgtttatttcacaactttgtgtgtttatacatgaagggggaaataagaaagtgaagaagaaaatacaacatttaaaacaattttacagtccatcattaaaaatttatgtatcattcaggatggagaaggttctactgggatatgtttatatctactaagcaaatgtatgctgtgtaaagactacaccacactaaggacatctggatgctgtaaaaataagagaagaaccagatggatattaagccccccaacacacactttatccttccttccttcatcttttttcatctgtggggaagaaaataaggtcttgcctttggtgtttatatttccataaccttttaattctatttttcatttgagctgacttgtagccacttcagactatcaatggaatcttatgttgagcctttctctggctttccttcctccactatctctccaactttagagatcatcccctctccctccagtgcgttctatctcccccacacccaccctagatactcccttttcacccacctttcctccctcacctctcctcacctccaccccctccccagagcactagtcatgccgcaaatgctaggaagtgccattttcattttctccactgtgcgtgtgtgctcaagtctttcgctctcacgtgggtgtacatgtgtgtgagcgtgtgtgtgtctctctctaaagcatgccaagggaatggtccatgtgtacatagactcattgtgctgtagatactgtcctgcattgtaattgtgagatgcggctgtaacaagttgctgggggagatggcggggaaagaggcaaggagcagagtcctccctacatccatggctgtcacatggcatcagtgtgtattcaaaccaagctatgctccttccaagggcaggaccccatattcctcctagtcccatcatcagaaccgagtggggagtcactcagaatatcactgtaaatgaaagtgcctactatcgatggggtaagcaaacagcataaggaattatgacgtggacgaggtgacctaggagagaaaatttcagattttactctcatttcatgagtctgagggattcttatatttcctggcatttaacagggtaggccctgctccactgtgaaaatgagcagcatgtgttgagtaaatccccagaaacaggaaggtctccaagtgtcaactcccagtgaaagaatgatgaaccacttggagatcctaagcagccctgttttacctcctccctaatcttaaataacatttgtcccatgaattcccctgagcagagattgtttcctatttcagataaaatacagtgaaagtgagcaaggcagaaaaagtcaacagatgcccaggctcctactgtattctggagatactgtcagagctctaatacagagcactggccataatgaaaagcagttcactccttgtgctcctctgcagatgtttttcccagtgttctaggttaatgttttatttggttgcctgcataatccctgttctgtttcactgatggtgtttgcagcaccactgttcatggtggtccactgttatcctatgccagggtgctaagaattgcatgatattcatcttccctgctctatttaaatttacatctataagagtcatcttgacattaacactgaaatgtgatctaggtccttaaccaaaattgctgggcaacttgtaataaatttagacagaaattttatgagtaccacaaagcttggtgttaccacatcaccagaaggatttcttaggaaatgtcttgccgagagagctggctctctgcatatagatgtctttgtcagaaaaccaacccttgctctcacttacacagtagtaagcactgaaagtggttcagttcatgagaggacagagaattattttgagattatatttgaatgtaatcttgcagagccaaatatggtatgtcattaagttggaaccttgtaaatagctgttccatgttataaaatgagaaactttgtaactggaaaaaaagaaaggaaagaagg

SEQ ID NO: 4125 - protein, 338 aa, Homo sapiens; identical to SEQ ID NO: 429

SEQ ID NO: 4126 - DNA, 1562 bp, Homo sapiens
aaagggaggagggggagagaggctctgggttgctgctgcttctgctgctgctgctgctgtgtggctgtttctgtacactcactggcaggcttggtgccggctccctcgcccgcccgcccgccagcctgggaaagtgggttacagagcgaaggagctcagctcagacactggcagaggagcatccagtcacagagagaccaaacaagaaccctttcctttggcttcctcttcagctcttccagagggcttgctatttgcactctctcttttgaaattgtgttgcttttacttttcacccttctgcttgggttttatgagggctttgttaagtcttagagggaaaagagactgagcgagggaaagagagaggcaaagtggaaaggaccataaactggcaaagcccgctctgcgctcgctgtggatgaaagccccgtgttggtgaagcctctcctcgcgagcagcgcgcacccctccagagcaccccgcggacccgcacctcggcgtggccaccatggtcaggagagttcagccggatcggaaacagttgccactggtcctactgagattgctctgccttcttcccacaggactgcctgttcgcagcgtggattttaaccgaggcacggacaacatcaccgtgaggcagggggacacagccatcctcaggtgcgttgtagaagacaagaactcaaaggtggcctggttgaaccgttctggcatcatttttgctggacatgacaagtggtctctggacccacgggttgagctggagaaacgccattctctggaatacagcctccgaatccagaaggtggatgtctatgatgagggttcctacacttgctcagttcagacacagcatgagcccaagacctcccaagtttacttgatcgtacaagtcccaccaaagatctccaatatctcctcggatgtcactgtgaatgagggcagcaacgtgactctggtctgcatggccaatggccgtcctgaacctgttatcacctggagacaccttacaccaactggaagggaatttgaaggagaagaagaatatctggagatccttggcatcaccagggagcagtcaggcaaatatgagtgcaaagctgccaacgaggtctcctcggcggatgtcaaacaagtcaaggtcactgtgaactatcctcccactatcacagaatccaagagcaatgaagccaccacaggacgacaagcttcactcaaatgtgaggcctcggcagtgcctgcacctgactttgagtggtaccgggatgacactaggataaatagtgccaatggccttgagattaagagcacggagggccagtcttccctgacggtgaccaacgtcactgaggagcactacggcaactacacctgtgtggctgccaacaagctgggggtcaccaatgccagcctagtccttttcagacctgggtcggtgagaggaataaatggatccatcagtctggccgtaccactgtggctgctggcagcatctctgctctgccttctcagcaaatgttaatagaataaaaatttaaaaataatttaaaaaacac

SEQ ID NO: 4127 - protein, 338 aa, Homo sapiens; identical to SEQ ID NO: 429

SEQ ID NO: 4128 - DNA, 1617 bp, Homo sapiens
ccagacactcattcccattgaccatctggtcccaggagctcaggaggaggaccccaggggagaggagagctgtgagagcaccggcacccccagaagactctgcttcttagcccacattcctccgggccttatggagaatgaggattcagccttgacttcttgcccaaggcctgctactggggtagcaactgacagctcagaaaggagctgagctccctctgccctgccagttgtcagtcaggcagggagggagtggctgtgttggtttggggaactaatttccacggacggctgcccgtggacaccaggtggactggttcactaatcaagtcagccatattgttctctggctaagtttggttccagccaacgtcatctgctcttcagttcctcactgccttcttgggatactaagacttgaattttttggggactattaagggtgttagtcttggagaagacacagcctcaccttctcacttgctgtgggtgaggggccatttaagtggactgggagacagtgcgcagtttgtatataattccctttcttgtggaacagaagactgaggcctgcaggttccgatgtgtctccatgggctgtgctcccctcttcctactgtcagtttctgaaacttctgactggcctcccagttatgcctcctcctcaagttcctggcccgtggatgttaaagctgctcgattcccaggatctcggctgccttttcctctatcttgagccctataaatgcccacgggacccccaccaccagcctcttgaagtggctccacagctcctgtccctggaacatcctgtcagtttggtcataaaccctgagccagatgaaatgagccaccgtgaacagacatctgccatgcccccaggtgggcttcggtggccctacccggtaccagttctttctgagaaactggagatgtcttgttagcataagtgtcttcattcccacctggagggtttgggagaggagcaaagcagttgaaaactagttaatgagctacaagagtcaaatagtcctctgaatggagcccccatcacaaaacagtgcccaggaggctggctcctcaagctacccatgcccagcgccctaaagcagcaccagatgctttggaattggggtgaaacacccacatggcagcctgctagcagcagtgactttgacttctggtcttaaagagtccctcacttcagccccaggagctattgtgtgtgtttggctccgcctctctccatgtcttctcacaagactttcaagattaagcaattcctggccaagaaacaaaagcaaaatcgtcccattccccagtggattcggatgaaaactggtaataaaatcaggtacaactccaagaggagacattggaaaagaaccaagctaggtctgtaaggaattgaacatgagatggcacacatatttatgctgtctaaaggtcacaatcatgttaccatatcaagctgaaaatgtcaccactatctggacagttggacatgtttttttgggaatatactttttctctctgaatctgttaggaactttctggttggctgggttccgtaataaatacatgagacctttcatttcaaaaaaaagaaaaataggc

SEQ ID NO: 4129 - protein, 96 aa, Homo sapiens [sequence omitted]

SEQ ID NO: 4130 - DNA, 1690 bp, Homo sapiens
gactctgtagctacatccagagtccaggacttgtcagacatggtggagatactgatctgaaggaggtggtgcttcaggactctgagccattctctcccctcctctgccctgtgccactctcagccatttcagcagccccgtcaaccgctgctccgtccctttccccagccagacactcattcccattgaccatctggtcccaggagctcaggaggaggaccccaggggagaggagagctgtgagagcaccggcacccccagaagactctgcttcttagcccacattcctccgggccttatggagaatgaggattcagccttgacttcttgcccaaggcctgctactggggtagcaactgacagctcagaaaggagctgagctccctctgccctgccagttgtcagtcaggcagggagggagtggctgtgttggtttggggaactaatttccacggacggctgcccgtggacaccaggtggactggttcactaatcaagtcagccatattgttctctggctaagtttggttccagccaacgtcatctgctcttcagttcctcactgccttcttgggatactaagacttgaattttttggggactattaagggtgttagtcttggagaagacacagcctcacttcagccccaggagctattggtgggttttagcagttttgtctttaccgtttttagttctccttgattctttgttttcttcctttatcgtttttaggtttggtatgtgttgttttatttccatggttcctcaagtttcctttttaaacatttgcatttgctggacaattgcaattttttttaaaaaattcccctacccctgtttaaagctgaaaaatacatttggttcatgtgcattgtttacaaagcaaaaagaaaaaagaggaaaaaaaggcaaaaaatattgtgaaagaaaaaaaacaacttaatatattttggattaatatttggtatttcttttaaagtattttttgtgctgtgaacattttctgccaaagaccatgatgtgtgtctgtatgtttaagttatcgtaaatatttaaaatgtaaacatggctgttttgttatgccaccctgtaccaggattgctgccgcattccactgggtataacagtattttaattaaaaaaaaataattaaaagtgatgtctttgcacaggtgagactttgcactgagggaagggaaagggtgaggattttggggggccacccaagtcatagtccaatctcttcaaggacccaagatagaatttaggaattttgtgaagctgcattaaggatagagttggaatgaggatgtggctggcatttttcccctttcatagataacatttcttgaaggctgggaggggaaggagggcctggcagatggcagcctcccgaggtagggctgtgttctaatcagctttgttcggccacacgctgtggttatccacagtgggagtgggtgtccaaagatggctttatccttcccccactccttttcccactcccacctagcacataaagttttgtccgaaaccatccagaaggccaggcaccatgcagaggacattcaagaatgtgcatgttcttagccaccgcctccctcctttgctgtgacatcaccactctttcctgatgctcaggaaagcatattgctccaattcaaaattaaagaaagccattctcagt

SEQ ID NO: 4131 - protein, 67 aa, Homo sapiens [sequence omitted]

SEQ ID NO: 4132 - DNA, 2563 bp, Homo sapiens
aaatgcatcctacacatcggaggttggtgggctgggctgagcactgaaagggggcagagcattgtgcttggttggccgagttctgggaacctgggcagcagaggtgggaaaagttggtgaagaacgatctttgtctttcaaatgtgccaggattttaaaagcaatctagtaacactcattggcatgtgcctgtgttcttgtctgtctccagactctgtagctacatccagagtccaggacttgtcagacatggtggagatactgatctgaaggaggtggtgcttcaggactctgagccattctctcccctcctctgccctgtgccactctcagccatttcagcagccccgtcaaccgctgctccgtccctttccccagccagacactcattcccattgaccatctggtcccaggagctcaggaggaggaccccaggggagaggagagctgtgagagcaccggcacccccagaagactctgcttcttagcccacattcctccgggccttatggagaatgaggattcagccttgacttcttgcccaaggcctgctactggggtagcaactgacagctcagaaaggagctgagctccctctgccctgccagttgtcagtcaggcagggagggagtggctgtgttggtttggggaactaatttccacggacggctgcccgtggacaccaggtggactggttcactaatcaagtcagccatattgttctctggctaagtttggttccagccaacgtcatctgctcttcagttcctcactgccttcttgggatactaagacttgaattttttggggactattaagggtgttagtcttggagaagacacagcctcaccttctcacttgctgtgggtgaggggccatttaagtggactgggagacagtgcgcagtttgtatataattccctttcttgtggaacagaagactgaggcctgcaggttccgatttatgcctcctcctcaagttcctggcccgtggatgttaaagctgctcgattcccaggatctcggctgccttttcctctatcttgagccctataaatgcccacgggacccccaccaccagcctcttgaagtggctccacagctcctgtccctggaacatcctgtcagtttggtcataaaccctgagccagatgaaatgagccaccgtgaacagacatctgccatgcccccaggtgggcttcggtggccctacccggtaccagttctttctgagaaactggagatgtcttgttagcataagtgtcttcattcccacctggagggtttgggagaggagcaaagcagttgaaaactagttaatgagctacaagagtcaaatagtcctctgaatggagcccccatcacaaaacagtgcccaggaggctggctcctcaagctacccatgcccagcgccctaaagcagcaccagatgctttggaattggggtgaaacacccacatggcagcctgctagcagcagtgactttgacttctggtcttaaagagtccctcacttcagccccaggagctattggtgggttttagcagttttgtctttaccgtttttagttctccttgattctttgttttcttcctttatcgtttttaggtttggtatgtgttgttttatttccatggttcctcaagtttcctttttaaacatttgcatttgctggacaattgcaattttttttaaaaaattcccctacccctgtttaaagctgaaaaatacatttggttcatgtgcattgtttacaaagcaaaaagaaaaaagaggaaaaaaaggcaaaaaatattgtgaaagaaaaaaaacaacttaatatattttggattaatatttggtatttcttttaaagtattttttgtgctgtgaacattttctgccaaagaccatgatgtgtgtctgtatgtttaagttatcgtaaatatttaaaatgtaaacatggctgttttgttatgccaccctgtaccaggattgctgccgcattccactgggtataacagtattttaattaaaaaaaaataattaaaagtgatgtctttgcacaggtgagactttgcactgagggaagggaaagggtgaggattttggggggccacccaagtcatagtccaatctcttcaaggacccaagatagaatttaggaattttgtgaagctgcattaaggatagagttggaatgaggatgtggctggcatttttcccctttcatagataacatttcttgaaggctgggaggggaaggagggcctggcagatggcagcctcccgaggtagggctgtgttctaatcagctttgttcggccacacgctgtggttatccacagtgggagtgggtgtccaaagatggctttatccttcccccactccttttcccactcccacctagcacataaagttttgtccgaaaccatccagaaggccaggcaccatgcagaggacattcaagaatgtgcatgttcttagccaccgcctccctcctttgctgtgacatcaccactctttcctgatgctcaggaaagcatattgctccaattcaaaattaaagaaagccattctcagt

SEQ ID NO: 4133 - protein, 96 aa, Homo sapiens [sequence omitted]

SEQ ID NO: 4134 - DNA, 2753 bp, Homo sapiens
atggatgcggctgccacggctgctgctcagcgtgacaccactctcatccgactgccatctgttttcgcggctgcggcagcaggaacccagggctggcaagggctctcttctagtgagcgacaaacagcagacgcccctgctcggctgactacagcagacagagcacccacagaggagccagtggtcacagctccccctgctgcccatgccaaacacgggagcagagatgggagcacccagactgagggccccccagacagcacctccacctgcctgccaccggagcctgacagccttctggggtgcagcagtagccagagagcagcctctctggactctgtagctacatccagagtccaggacttgtcagacatggtggagatactgatctgaaggaggtggtgcttcaggactctgagccattctctcccctcctctgccctgtgccactctcagccatttcagcagccccgtcaaccgctgctccgtccctttccccagccagacactcattcccattgaccatctggtcccaggagctcaggaggaggaccccaggggagaggagagctgtgagagcaccggcacccccagaagactctgcttcttagcccacattcctccgggccttatggagaatgaggattcagccttgacttcttgcccaaggcctgctactggggtagcaactgacagctcagaaaggagctgagctccctctgccctgccagttgtcagtcaggcagggagggagtggctgtgttggtttggggaactaatttccacggacggctgcccgtggacaccaggtggactggttcactaatcaagtcagccatattgttctctggctaagtttggttccagccaacgtcatctgctcttcagttcctcactgccttcttgggatactaagacttgaattttttggggactattaagggtgttagtcttggagaagacacagcctcaccttctcacttgctgtgggtgaggggccatttaagtggactgggagacagtgcgcagtttgtatataattccctttcttgtggaacagaagactgaggcctgcaggttccgatgtgtctccatgggctgtgctcccctcttcctactgtcagtttctgaaacttctgactggcctcccagttatgcctcctcctcaagttcctggcccgtggatgttaaagctgctcgattcccaggatctcggctgccttttcctctatcttgagccctataaatgcccacgggacccccaccaccagcctcttgaagtggctccacagctcctgtccctggaacatcctgtcagtttggtcataaaccctgagccagatgaaatgagccaccgtgaacagacatctgccatgcccccaggtgggcttcggtggccctacccggtaccagttctttctgagaaactggagatgtcttgttagcataagtgtcttcattcccacctggagggtttgggagaggagcaaagcagttgaaaactagttaatgagctacaagagtcaaatagtcctctgaatggagcccccatcacaaaacagtgcccaggaggctggctcctcaagctacccatgcccagcgccctaaagcagcaccagatgctttggaattggggtgaaacacccacatggcagcctgctagcagcagtgactttgacttctggtcttaaagagtccctcacttcagccccaggagctattggtgggttttagcagttttgtctttaccgtttttagttctccttgattctttgttttcttcctttatcgtttttaggtttggtatgtgttgttttatttccatggttcctcaagtttcctttttaaacatttgcatttgctggacaattgcaattttttttaaaaaattcccctacccctgtttaaagctgaaaaatacatttggttcatgtgcattgtttacaaagcaaaaagaaaaaagaggaaaaaaaggcaaaaaatattgtgaaagaaaaaaaacaacttaatatattttggattaatatttggtatttcttttaaagtattttttgtgctgtgaacattttctgccaaagaccatgatgtgtgtctgtatgtttaagttatcgtaaatatttaaaatgtaaacatggctgttttgttatgccaccctgtaccaggattgctgccgcattccactgggtataacagtattttaattaaaaaaaaataattaaaagtgatgtctttgcacaggtgagactttgcactgagggaagggaaagggtgaggattttggggggccacccaagtcatagtccaatctcttcaaggacccaagatagaatttaggaattttgtgaagctgcattaaggatagagttggaatgaggatgtggctggcatttttcccctttcatagataacatttcttgaaggctgggaggggaaggagggcctggcagatggcagcctcccgaggtagggctgtgttctaatcagctttgttcggccacacgctgtggttatccacagtgggagtgggtgtccaaagatggctttatccttcccccactccttttcccactcccacctagcacataaagttttgtccgaaaccatccagaaggccaggcaccatgcagaggacattcaagaatgtgcatgttcttagccaccgcctccctcctttgctgtgacatcaccactctttcctgatgctcaggaaagcatattgctccaattcaaaattaaagaaagccattctcagt

SEQ ID NO: 4135 - protein, 130 aa, Homo sapiens
MDAAATAAAQRDTTLIRLPSVFAAAAAGTQGWQGLSSSERQTADAPARLTTADRAPTEEPVVTAPPAAHAKHGSRDGSTQTEGPPDSTSTCLPPEPDSLLGCSSSQRAASLDSVATSRVQDLSDMVEILI

SEQ ID NO: 4136 - DNA, 4129 bp, Homo sapiens
agttttagcagatggcctcaggcctcccttgactgtcctgtggtgtccaagttaggtcaaaccaccccatcatggctggagtctttcggtgcccacttctggccaactgtactcagtttcttggtggaagccagccaagagtagaatgtttccttctggacactgggcacagggaagctgtgtttagtcaccccgcaggcagctacttccaaagtacctggccctgggttcactcagcatctggtccttggggcagccgatgggaccgttgcttgctggtcccagcagtctattctacttccggaggctacaagcttctgaccatcccaccatagtcacctggaggttttgctcctgtttggtggcctctcatctgtcaccttttctgatggagagtagtgggtcagcctcgaatcactccctgggagctctcgccttcattcagctctgctgtctgactcttgcagctggaaagcgaaatccagcggctctctgaggcccatgagagcctgaccagagcctcctccaagcgtgaggccctggagaagaccatgcggaacaagatggacagtgaaatgaggaggctgcaagacttcaaccgggatcttagagagagattggaatctgcaaatcgccgcctggcaagcaagacacaggaggcccaggccggcagtcaggacatggtggccaagctgcttgctcagagctacgaacagcagcaggagcaagagaagctggagcgagagatggcactgctgcgcggcgccatcgaggaccagcggcggcgtgccgagctgctggagcaggctctgggcaatgcgcagggccgggcagctcgagccgaagaggagctgcgcaagaagcaggcctatgtggagaaagtggagcggctgcagcaggcgctcgggcagctgcaggcagcctgtgagaagcgggagcagctggagctgcgtctgcggactcgcctggagcaggaactcaaggccctgcgtgcacagcagagacaggcaggtgccccaggtggtagcagtggcagtggtgggtctccagagctcagcgccctgcgactgtcagaacaactgcgagagaaggaggagcagatcctggcgctggaggccgacatgaccaagtgggagcagaagtatttggaggaacgtgccatgaggcagtttgccatggatgcggctgccacggctgctgctcagcgtgacaccactctcatccgacattccccccagccctcacccagcagcagcttcaatgagggtctgctcactggtggccacaggcatcaggagatggaaagcaggttaaaggtgctccatgcccagatcctggagaaggatgcagtgatcaaggtccttcagcagcgctccaggagagaccctggcaaggccatccagggctccctgcggcctgccaagtcggtgccatctgttttcgcggctgcggcagcaggaacccagggctggcaagggctctcttctagtgagcgacaaacagcagacgcccctgctcggctgactacagcagacagagcacccacagaggagccagtggtcacagctccccctgctgcccatgccaaacacgggagcagagatgggagcacccagactgagggccccccagacagcacctccacctgcctgccaccggagcctgacagccttctggggtgcagcagtagccagagagcagcctctctggactctgtagctacatccagagtccaggacttgtcagacatggtggagatactgatctgaaggaggtggtgcttcaggactctgagccattctctcccctcctctgccctgtgccactctcagccatttcagcagccccgtcaaccgctgctccgtccctttccccagccagacactcattcccattgaccatctggtcccaggagctcaggaggaggaccccaggggagaggagagctgtgagagcaccggcacccccagaagactctgcttcttagcccacattcctccgggccttatggagaatgaggattcagccttgacttcttgcccaaggcctgctactggggtagcaactgacagctcagaaaggagctgagctccctctgccctgccagttgtcagtcaggcagggagggagtggctgtgttggtttggggaactaatttccacggacggctgcccgtggacaccaggtggactggttcactaatcaagtcagccatattgttctctggctaagtttggttccagccaacgtcatctgctcttcagttcctcactgccttcttgggatactaagacttgaattttttggggactattaagggtgttagtcttggagaagacacagcctcaccttctcacttgctgtgggtgaggggccatttaagtggactgggagacagtgcgcagtttgtatataattccctttcttgtggaacagaagactgaggcctgcaggttccgatgtgtctccatgggctgtgctcccctcttcctactgtcagtttctgaaacttctgactggcctcccagttatgcctcctcctcaagttcctggcccgtggatgttaaagctgctcgattcccaggatctcggctgccttttcctctatcttgagccctataaatgcccacgggacccccaccaccagcctcttgaagtggctccacagctcctgtccctggaacatcctgtcagtttggtcataaaccctgagccagatgaaatgagccaccgtgaacagacatctgccatgcccccaggtgggcttcggtggccctacccggtaccagttctttctgagaaactggagatgtcttgttagcataagtgtcttcattcccacctggagggtttgggagaggagcaaagcagttgaaaactagttaatgagctacaagagtcaaatagtcctctgaatggagcccccatcacaaaacagtgcccaggaggctggctcctcaagctacccatgcccagcgccctaaagcagcaccagatgctttggaattggggtgaaacacccacatggcagcctgctagcagcagtgactttgacttctggtcttaaagagtccctcacttcagccccaggagctattggtgggttttagcagttttgtctttaccgtttttagttctccttgattctttgttttcttcctttatcgtttttaggtttggtatgtgttgttttatttccatggttcctcaagtttcctttttaaacatttgcatttgctggacaattgcaattttttttaaaaaattcccctacccctgtttaaagctgaaaaatacatttggttcatgtgcattgtttacaaagcaaaaagaaaaaagaggaaaaaaaggcaaaaaatattgtgaaagaaaaaaaacaacttaatatattttggattaatatttggtatttcttttaaagtattttttgtgctgtgaacattttctgccaaagaccatgatgtgtgtctgtatgtttaagttatcgtaaatatttaaaatgtaaacatggctgttttgttatgccaccctgtaccaggattgctgccgcattccactgggtataacagtattttaattaaaaaaaaataattaaaagtgatgtctttgcacaggtgagactttgcactgagggaagggaaagggtgaggattttggggggccacccaagtcatagtccaatctcttcaaggacccaagatagaatttaggaattttgtgaagctgcattaaggatagagttggaatgaggatgtggctggcatttttcccctttcatagataacatttcttgaaggctgggaggggaaggagggcctggcagatggcagcctcccgaggtagggctgtgttctaatcagctttgttcggccacacgctgtggttatccacagtgggagtgggtgtccaaagatggctttatccttcccccactccttttcccactcccacctagcacataaagttttgtccgaaaccatccagaaggccaggcaccatgcagaggacattcaagaatgtgcatgttcttagccaccgcctccctcctttgctgtgacatcaccactctttcctgatgctcaggaaagcatattgctccaattcaaaattaaagaaagccattctcagt

SEQ ID NO: 4137 - protein, 405 aa, Homo sapiens
MRNKMDSEMRRLQDFNRDLRERLESANRRLASKTQEAQAGSQDMVAKLLAQSYEQQQEQEKLEREMALLRGAIEDQRRRAELLEQALGNAQGRAARAEEELRKKQAYVEKVERLQQALGQLQAACEKREQLELRLRTRLEQELKALRAQQRQAGAPGGSSGSGGSPELSALRLSEQLREKEEQILALEADMTKWEQKYLEERAMRQFAMDAAATAAAQRDTTLIRHSPQPSPSSSFNEGLLTGGHRHQEMESRLKVLHAQILEKDAVIKVLQQRSRRDPGKAIQGSLRPAKSVPSVFAAAAAGTQGWQGLSSSERQTADAPARLTTADRAPTEEPVVTAPPAAHAKHGSRDGSTQTEGPPDSTSTCLPPEPDSLLGCSSSQRAASLDSVATSRVQDLSDMVEILI

SEQ ID NO: 4138 - DNA, 1553 bp, Homo sapiens
ggtgctctggggccaggtgccaccggccattgtccaggcagctgtgtgcaagccaaagaagcatgaggacactggaagactcctcggggacactcctgtccctggaacatcctgtcagtttggtcataaaccctgagccagatgaaatgagccaccgtgaacagacatctgccatgcccccaggtgggcttcggtggccctacccggtaccagttctttctgagaaactggagatgtcttgttagcataagtgtcttcattcccacctggagggtttgggagaggagcaaagcagttgaaaactagttaatgagctacaagagtcaaatagtcctctgaatggagcccccatcacaaaacagtgcccaggaggctggctcctcaagctacccatgcccagcgccctaaagcagcaccagatgctttggaattggggtgaaacacccacatggcagcctgctagcagcagtgactttgacttctggtcttaaagagtccctcacttcagccccaggagctattggtgggttttagcagttttgtctttaccgtttttagttctccttgattctttgttttcttcctttatcgtttttaggtttggtatgtgttgttttatttccatggttcctcaagtttcctttttaaacatttgcatttgctggacaattgcaattttttttaaaaaattcccctacccctgtttaaagctgaaaaatacatttggttcatgtgcattgtttacaaagcaaaaagaaaaaagaggaaaaaaaggcaaaaaatattgtgaaagaaaaaaaacaacttaatatattttggattaatatttggtatttcttttaaagtattttttgtgctgtgaacattttctgccaaagaccatgatgtgtgtctgtatgtttaagttatcgtaaatatttaaaatgtaaacatggctgttttgttatgccaccctgtaccaggattgctgccgcattccactgggtataacagtattttaattaaaaaaaaataattaaaagtgatgtctttgcacaggtgagactttgcactgagggaagggaaagggtgaggattttggggggccacccaagtcatagtccaatctcttcaaggacccaagatagaatttaggaattttgtgaagctgcattaaggatagagttggaatgaggatgtggctggcatttttcccctttcatagataacatttcttgaaggctgggaggggaaggagggcctggcagatggcagcctcccgaggtagggctgtgttctaatcagctttgttcggccacacgctgtggttatccacagtgggagtgggtgtccaaagatggctttatccttcccccactccttttcccactcccacctagcacataaagttttgtccgaaaccatccagaaggccaggcaccatgcagaggacattcaagaatgtgcatgttcttagccaccgcctccctcctttgctgtgacatcaccactctttcctgatgctcaggaaagcatattgctccaattcaaaattaaagaaagccattctcagt

SEQ ID NO: 4139 - protein, 60 aa, Homo sapiens
MRTLEDSSGTLLSLEHPVSLVINPEPDEMSHREQTSAMPPGGLRWPYPVPVLSEKLEMSC

SEQ ID NO: 4140 - DNA, 2175 bp, Homo sapiens
agagcgtcggcgccacggccgagaacacatcttcgccgccgagctgagctgggccgagccggaggttgtggtgtctgactgcgctgggcaccctcgggccgcagcggtgctctggggccaggtgccaccggccattgtccaggcagctgtgtgcaagccaaagaagcatgaggacactggaagactcctcggggacactaatttccacggacggctgcccgtggacaccaggtggactggttcactaatcaagtcagccatattgttctctggctaagtttggttccagccaacgtcatctgctcttcagttcctcactgccttcttgggatactaagacttgaattttttggggactattaagggtgttagtcttggagaagacacagcctcaccttctcacttgctgtgggtgaggggccatttaagtggactgggagacagtgcgcagtttgtatataattccctttcttgtggaacagaagactgaggcctgcaggttccgatgtgtctccatgggctgtgctcccctcttcctactgtcagtttctgaaacttctgactggcctcccagttatgcctcctcctcaagttcctggcccgtggatgttaaagctgctcgattcccaggatctcggctgccttttcctctatcttgagccctataaatgcccacgggacccccaccaccagcctcttgaagtggctccacagctcctgtccctggaacatcctgtcagtttggtcataaaccctgagccagatgaaatgagccaccgtgaacagacatctgccatgcccccaggtgggcttcggtggccctacccggtaccagttctttctgagaaactggagatgtcttgttagcataagtgtcttcattcccacctggagggtttgggagaggagcaaagcagttgaaaactagttaatgagctacaagagtcaaatagtcctctgaatggagcccccatcacaaaacagtgcccaggaggctggctcctcaagctacccatgcccagcgccctaaagcagcaccagatgctttggaattggggtgaaacacccacatggcagcctgctagcagcagtgactttgacttctggtcttaaagagtccctcacttcagccccaggagctattggtgggttttagcagttttgtctttaccgtttttagttctccttgattctttgttttcttcctttatcgtttttaggtttggtatgtgttgttttatttccatggttcctcaagtttcctttttaaacatttgcatttgctggacaattgcaattttttttaaaaaattcccctacccctgtttaaagctgaaaaatacatttggttcatgtgcattgtttacaaagcaaaaagaaaaaagaggaaaaaaaggcaaaaaatattgtgaaagaaaaaaaacaacttaatatattttggattaatatttggtatttcttttaaagtattttttgtgctgtgaacattttctgccaaagaccatgatgtgtgtctgtatgtttaagttatcgtaaatatttaaaatgtaaacatggctgttttgttatgccaccctgtaccaggattgctgccgcattccactgggtataacagtattttaattaaaaaaaaataattaaaagtgatgtctttgcacaggtgagactttgcactgagggaagggaaagggtgaggattttggggggccacccaagtcatagtccaatctcttcaaggacccaagatagaatttaggaattttgtgaagctgcattaaggatagagttggaatgaggatgtggctggcatttttcccctttcatagataacatttcttgaaggctgggaggggaaggagggcctggcagatggcagcctcccgaggtagggctgtgttctaatcagctttgttcggccacacgctgtggttatccacagtgggagtgggtgtccaaagatggctttatccttcccccactccttttcccactcccacctagcacataaagttttgtccgaaaccatccagaaggccaggcaccatgcagaggacattcaagaatgtgcatgttcttagccaccgcctccctcctttgctgtgacatcaccactctttcctgatgctcaggaaagcatattgctccaattcaaaattaaagaaagccattctcagt

SEQ ID NO: 4141 - protein, 96 aa, Homo sapiens [sequence omitted]

SEQ ID NO: 4142 - DNA, 4987 bp, Homo sapiens
ggttatttgtggttcgctttgatcccgagggggaacctgaaactctcacattcctggcatagcagccgcctccggcgcgggccgaccctggggctgcgcgctggggcgcgaacagccagagcgtcggcgccacggccgagaacacatcttcgccgccgagctgagctgggccgagccggaggttgtggtgtctgactgcgctgggcaccctcgggccgcagcggtgctctggggccaggtgccaccggccattgtccaggcagctgtgtgcaagccaaagaagcatgaggacactggaagactcctcggggacagtcctgcaccgcctcatccaggagcagctgcgctacggcaacctgactgagacgcgcacgctgctagccatccagcagcaggccctgaggggtggggctggaactgggggtacagggagcccccaggcctccctggagatcctggccccagaggacagtcaggtgctgcagcaggccaccaggcaggagccccagggccaggagcaccagggcggtgagaaccacctggcagagaacaccctctaccggctatgcccacagcccagcaagggagaggagctgcccacctatgaggaggccaaagcccactcgcagtactatgcggcccagcaggcagggacccggccacatgcgggggaccgagatccccgtggggccccgggaggcagtcggaggcaggacgaggccctgcgggagctgaggcatgggcacgtgcgctcgttgagtgaacggctccttcagttgtccctggagaggaacggcgcccgggcccccagccacatgagctcctcccacagcttcccacagctggcccgcaaccagcagggccccccactgaggggcccccctgctgagggcccagagtcccgaggacccccacctcagtaccctcatgttgtactagctcatgagaccaccactgctgtcactgacccacggtaccgtgcccgcggcagcccgcacttccagcatgctgaagtcaggatcctgcaggcccaggtgcctcctgtgttcctccaacagcagcagcagtaccagtacctgcagcaatctcaggagcacccccctcccccacatccagctgctctcggccatggccccctgagctccctcagtccacctgctgtggaggggccagtgagtgcccaggcctcctcagccacctcgggcagtgcccacctggcccagatggaggccgtgctgagggagaatgccaggctgcagagagacaatgagcggctgcagagggagctggagagctctgcggagaaggctggccgcattgagaagctggaaagcgaaatccagcggctctctgaggcccatgagagcctgaccagagcctcctccaagcgtgaggccctggagaagaccatgcggaacaagatggacagtgaaatgaggaggctgcaagacttcaaccgggatcttagagagagattggaatctgcaaatcgccgcctggcaagcaagacacaggaggcccaggccggcagtcaggacatggtggccaagctgcttgctcagagctacgaacagcagcaggagcaagagaagctggagcgagagatggcactgctgcgcggcgccatcgaggaccagcggcggcgtgccgagctgctggagcaggctctgggcaatgcgcagggccgggcagctcgagccgaagaggagctgcgcaagaagcaggcctatgtggagaaagtggagcggctgcagcaggcgctcgggcagctgcaggcagcctgtgagaagcgggagcagctggagctgcgtctgcggactcgcctggagcaggaactcaaggccctgcgtgcacagcagagacaggcaggtgccccaggtggtagcagtggcagtggtgggtctccagagctcagcgccctgcgactgtcagaacaactgcgagagaaggaggagcagatcctggcgctggaggccgacatgaccaagtgggagcagaagtatttggaggaacgtgccatgaggcagtttgccatggatgcggctgccacggctgctgctcagcgtgacaccactctcatccgacattccccccagccctcacccagcagcagcttcaatgagggtctgctcactggtggccacaggcatcaggagatggaaagcaggttaaaggtgctccatgcccagatcctggagaaggatgcagtgatcaaggtccttcagcagcgctccaggagagaccctggcaaggccatccagggctccctgcggcctgccaagtcggtgccatctgttttcgcggctgcggcagcaggaacccagggctggcaagggctctcttctagtgagcgacaaacagcagacgcccctgctcggctgactacagcagacagagcacccacagaggagccagtggtcacagctccccctgctgcccatgccaaacacgggagcagagatgggagcacccagactgagggccccccagacagcacctccacctgcctgccaccggagcctgacagccttctggggtgcagcagtagccagagagcagcctctctggactctgtagctacatccagagtccaggacttgtcagacatggtggagatactgatctgaaggaggtggtgcttcaggactctgagccattctctcccctcctctgccctgtgccactctcagccatttcagcagccccgtcaaccgctgctccgtccctttccccagccagacactcattcccattgaccatctggtcccaggagctcaggaggaggaccccaggggagaggagagctgtgagagcaccggcacccccagaagactctgcttcttagcccacattcctccgggccttatggagaatgaggattcagccttgacttcttgcccaaggcctgctactggggtagcaactgacagctcagaaaggagctgagctccctctgccctgccagttgtcagtcaggcagggagggagtggctgtgttggtttggggaactaatttccacggacggctgcccgtggacaccaggtggactggttcactaatcaagtcagccatattgttctctggctaagtttggttccagccaacgtcatctgctcttcagttcctcactgccttcttgggatactaagacttgaattttttggggactattaagggtgttagtcttggagaagacacagcctcaccttctcacttgctgtgggtgaggggccatttaagtggactgggagacagtgcgcagtttgtatataattccctttcttgtggaacagaagactgaggcctgcaggttccgatgtgtctccatgggctgtgctcccctcttcctactgtcagtttctgaaacttctgactggcctcccagttatgcctcctcctcaagttcctggcccgtggatgttaaagctgctcgattcccaggatctcggctgccttttcctctatcttgagccctataaatgcccacgggacccccaccaccagcctcttgaagtggctccacagctcctgtccctggaacatcctgtcagtttggtcataaaccctgagccagatgaaatgagccaccgtgaacagacatctgccatgcccccaggtgggcttcggtggccctacccggtaccagttctttctgagaaactggagatgtcttgttagcataagtgtcttcattcccacctggagggtttgggagaggagcaaagcagttgaaaactagttaatgagctacaagagtcaaatagtcctctgaatggagcccccatcacaaaacagtgcccaggaggctggctcctcaagctacccatgcccagcgccctaaagcagcaccagatgctttggaattggggtgaaacacccacatggcagcctgctagcagcagtgactttgacttctggtcttaaagagtccctcacttcagccccaggagctattggtgggttttagcagttttgtctttaccgtttttagttctccttgattctttgttttcttcctttatcgtttttaggtttggtatgtgttgttttatttccatggttcctcaagtttcctttttaaacatttgcatttgctggacaattgcaattttttttaaaaaattcccctacccctgtttaaagctgaaaaatacatttggttcatgtgcattgtttacaaagcaaaaagaaaaaagaggaaaaaaaggcaaaaaatattgtgaaagaaaaaaaacaacttaatatattttggattaatatttggtatttcttttaaagtattttttgtgctgtgaacattttctgccaaagaccatgatgtgtgtctgtatgtttaagttatcgtaaatatttaaaatgtaaacatggctgttttgttatgccaccctgtaccaggattgctgccgcattccactgggtataacagtattttaattaaaaaaaaataattaaaagtgatgtctttgcacaggtgagactttgcactgagggaagggaaagggtgaggattttggggggccacccaagtcatagtccaatctcttcaaggacccaagatagaatttaggaattttgtgaagctgcattaaggatagagttggaatgaggatgtggctggcatttttcccctttcatagataacatttcttgaaggctgggaggggaaggagggcctggcagatggcagcctcccgaggtagggctgtgttctaatcagctttgttcggccacacgctgtggttatccacagtgggagtgggtgtccaaagatggctttatccttcccccactccttttcccactcccacctagcacataaagttttgtccgaaaccatccagaaggccaggcaccatgcagaggacattcaagaatgtgcatgttcttagccaccgcctccctcctttgctgtgacatcaccactctttcctgatgctcaggaaagcatattgctccaattcaaaattaaagaaagccattctcagt

SEQ ID NO: 4143 - protein, 780 aa, Homo sapiens; identical to SEQ ID NO: 431

SEQ ID NO: 4144 - DNA, 2437 bp, Homo sapiens
gaggagggcggtgcgctgagaggttatttgtggttcgctttgatcccgagggggaacctgaaactctcacattcctggcatagcagccgcctccggcgcgggccgaccctggggctgcgcgctggggcgcgaacagccagagcgtcggcgccacggccgagaacacatcttcgccgccgagctgagctgggccgagccggaggttgtggtgtctgactgcgctgggcaccctcgggccgcagcggtgctctggggccaggtgccaccggccattgtccaggcagctgtgtgcaagccaaagaagcatgaggacactggaagactcctcggggacagtcctgcaccgcctcatccaggagcagctgcgctacggcaacctgactgagacgcgcacgctgctagccatccagcagcaggccctgaggggtggggctggaactgggggtacagggagcccccaggcctccctggagatcctggccccagaggacagtcaggtgctgcagcaggccaccaggcaggagccccagggccaggagcaccagggcggtgagaaccacctggcagagaacaccctctaccggctatgcccacagcccagcaagggagaggagctgcccacctatgaggaggccaaagcccactcgcagtactatgcggcccagcaggcagggacccggccacatgcgggggaccgagatccccgtggggccccgggaggcagtcggaggcaggacgaggccctgcgggagctgaggcatgggcacgtgcgctcgttgagtgaacggtcccctcttcctactgtcagtttctgaaacttctgactggcctcccagttatgcctcctcctcaagttcctggcccgtggatgttaaagctgctcgattcccaggatctcggctgccttttcctctatcttgagccctataaatgcccacgggacccccaccaccagcctcttgaagtggctccacagctcctgtccctggaacatcctgtcagtttggtcataaaccctgagccagatgaaatgagccaccgtgaacagacatctgccatgcccccaggtgggcttcggtggccctacccggtaccagttctttctgagaaactggagatgtcttgttagcataagtgtcttcattcccacctggagggtttgggagaggagcaaagcagttgaaaactagttaatgagctacaagagtcaaatagtcctctgaatggagcccccatcacaaaacagtgcccaggaggctggctcctcaagctacccatgcccagcgccctaaagcagcaccagatgctttggaattggggtgaaacacccacatggcagcctgctagcagcagtgactttgacttctggtcttaaagagtccctcacttcagccccaggagctattggtgggttttagcagttttgtctttaccgtttttagttctccttgattctttgttttcttcctttatcgtttttaggtttggtatgtgttgttttatttccatggttcctcaagtttcctttttaaacatttgcatttgctggacaattgcaattttttttaaaaaattcccctacccctgtttaaagctgaaaaatacatttggttcatgtgcattgtttacaaagcaaaaagaaaaaagaggaaaaaaaggcaaaaaatattgtgaaagaaaaaaaacaacttaatatattttggattaatatttggtatttcttttaaagtattttttgtgctgtgaacattttctgccaaagaccatgatgtgtgtctgtatgtttaagttatcgtaaatatttaaaatgtaaacatggctgttttgttatgccaccctgtaccaggattgctgccgcattccactgggtataacagtattttaattaaaaaaaaataattaaaagtgatgtctttgcacaggtgagactttgcactgagggaagggaaagggtgaggattttggggggccacccaagtcatagtccaatctcttcaaggacccaagatagaatttaggaattttgtgaagctgcattaaggatagagttggaatgaggatgtggctggcatttttcccctttcatagataacatttcttgaaggctgggaggggaaggagggcctggcagatggcagcctcccgaggtagggctgtgttctaatcagctttgttcggccacacgctgtggttatccacagtgggagtgggtgtccaaagatggctttatccttcccccactccttttcccactcccacctagcacataaagttttgtccgaaaccatccagaaggccaggcaccatgcagaggacattcaagaatgtgcatgttcttagccaccgcctccctcctttgctgtgacatcaccactctttcctgatgctcaggaaagcatattgctccaattcaaaattaaagaaagccattctcagt

SEQ ID NO: 4145 - protein, 169 aa, Homo sapiens
MRTLEDSSGTVLHRLIQEQLRYGNLTETRTLLAIQQQALRGGAGTGGTGSPQASLEILAPEDSQVLQQATRQEPQGQEHQGGENHLAENTLYRLCPQPSKGEELPTYEEAKAHSQYYAAQQAGTRPHAGDRDPRGAPGGSRRQDEALRELRHGHVRSLSERSPLPTVSF

SEQ ID NO: 4146 - DNA, 1171 bp, Homo sapiens
gactctgtagctacatccagagtccaggacttgtcagacatggtggagatactgatctgaaggaggtggtgcttcaggactctgagccattctctcccctcctctgccctgtgccactctcagccatttcagcagccccgtcaaccgctgctccgtccctttccccagccagacactcattcccattgaccatctggtcccaggagctcaggaggaggaccccaggggagaggagagctgtgagagcaccggcacccccagaagactctgcttcttagcccacattcctccgggccttatggagaatgaggattcagccttgacttcttgcccaaggcctgctactggggtagcaactgacagctcagaaaggagctgagctccctctgccctgccagttgtcagtcaggcagggagggagtggctgtgttggtttggggaactaatttccacggacggctgcccgtggacaccaggtggactggttcactaatcaagtcagccatattgttctctggctaagtttggttccagccaacgtcatctgctcttcagttcctcactgccttcttgggatactaagacttgaattttttggggactattaagggtgttagtcttggagaagacacagcctcacttcagccccaggagctattggtgggttttagcagttttgtctttaccgtttttagttctccttgattctttgttttcttcctttatcgtttttaggtttggtatgtgttgttttatttccatggttcctcaagtttcctttttaaacatttgcatttgctggacaattgcaattttttttaaaaaattcccctacccctgtttaaagctgaaaaatacatttggttcatgtgcattgtttacaaagcaaaaagaaaaaagaggaaaaaaaggcaaaaaatattgtgaaagaaaaaaaacaacttaatatattttggattaatatttggtatttcttttaaagtattttttgtgctgtgaacattttctgccaaagaccatgatgtgtgtctgtatgtttaagttatcgtaaatatttaaaatgtaaacatggctgttttgttatgccaccctgtaccaggattgctgccgcattccactgggtataacagtattttaattaaaaaaaaataattaaaagtgatgtctttgc

SEQ ID NO: 4147 - protein, 67 aa, Homo sapiens [sequence omitted]

SEQ ID NO: 4148 - DNA, 2044 bp, Homo sapiens
aaatgcatcctacacatcggaggttggtgggctgggctgagcactgaaagggggcagagcattgtgcttggttggccgagttctgggaacctgggcagcagaggtgggaaaagttggtgaagaacgatctttgtctttcaaatgtgccaggattttaaaagcaatctagtaacactcattggcatgtgcctgtgttcttgtctgtctccagactctgtagctacatccagagtccaggacttgtcagacatggtggagatactgatctgaaggaggtggtgcttcaggactctgagccattctctcccctcctctgccctgtgccactctcagccatttcagcagccccgtcaaccgctgctccgtccctttccccagccagacactcattcccattgaccatctggtcccaggagctcaggaggaggaccccaggggagaggagagctgtgagagcaccggcacccccagaagactctgcttcttagcccacattcctccgggccttatggagaatgaggattcagccttgacttcttgcccaaggcctgctactggggtagcaactgacagctcagaaaggagctgagctccctctgccctgccagttgtcagtcaggcagggagggagtggctgtgttggtttggggaactaatttccacggacggctgcccgtggacaccaggtggactggttcactaatcaagtcagccatattgttctctggctaagtttggttccagccaacgtcatctgctcttcagttcctcactgccttcttgggatactaagacttgaattttttggggactattaagggtgttagtcttggagaagacacagcctcaccttctcacttgctgtgggtgaggggccatttaagtggactgggagacagtgcgcagtttgtatataattccctttcttgtggaacagaagactgaggcctgcaggttccgatttatgcctcctcctcaagttcctggcccgtggatgttaaagctgctcgattcccaggatctcggctgccttttcctctatcttgagccctataaatgcccacgggacccccaccaccagcctcttgaagtggctccacagctcctgtccctggaacatcctgtcagtttggtcataaaccctgagccagatgaaatgagccaccgtgaacagacatctgccatgcccccaggtgggcttcggtggccctacccggtaccagttctttctgagaaactggagatgtcttgttagcataagtgtcttcattcccacctggagggtttgggagaggagcaaagcagttgaaaactagttaatgagctacaagagtcaaatagtcctctgaatggagcccccatcacaaaacagtgcccaggaggctggctcctcaagctacccatgcccagcgccctaaagcagcaccagatgctttggaattggggtgaaacacccacatggcagcctgctagcagcagtgactttgacttctggtcttaaagagtccctcacttcagccccaggagctattggtgggttttagcagttttgtctttaccgtttttagttctccttgattctttgttttcttcctttatcgtttttaggtttggtatgtgttgttttatttccatggttcctcaagtttcctttttaaacatttgcatttgctggacaattgcaattttttttaaaaaattcccctacccctgtttaaagctgaaaaatacatttggttcatgtgcattgtttacaaagcaaaaagaaaaaagaggaaaaaaaggcaaaaaatattgtgaaagaaaaaaaacaacttaatatattttggattaatatttggtatttcttttaaagtattttttgtgctgtgaacattttctgccaaagaccatgatgtgtgtctgtatgtttaagttatcgtaaatatttaaaatgtaaacatggctgttttgttatgccaccctgtaccaggattgctgccgcattccactgggtataacagtattttaattaaaaaaaaataattaaaagtgatgtctttgc

SEQ ID NO: 4149 - protein, 96 aa, Homo sapiens [sequence omitted]

SEQ ID NO: 4150 - DNA, 2234 bp, Homo sapiens
atggatgcggctgccacggctgctgctcagcgtgacaccactctcatccgactgccatctgttttcgcggctgcggcagcaggaacccagggctggcaagggctctcttctagtgagcgacaaacagcagacgcccctgctcggctgactacagcagacagagcacccacagaggagccagtggtcacagctccccctgctgcccatgccaaacacgggagcagagatgggagcacccagactgagggccccccagacagcacctccacctgcctgccaccggagcctgacagccttctggggtgcagcagtagccagagagcagcctctctggactctgtagctacatccagagtccaggacttgtcagacatggtggagatactgatctgaaggaggtggtgcttcaggactctgagccattctctcccctcctctgccctgtgccactctcagccatttcagcagccccgtcaaccgctgctccgtccctttccccagccagacactcattcccattgaccatctggtcccaggagctcaggaggaggaccccaggggagaggagagctgtgagagcaccggcacccccagaagactctgcttcttagcccacattcctccgggccttatggagaatgaggattcagccttgacttcttgcccaaggcctgctactggggtagcaactgacagctcagaaaggagctgagctccctctgccctgccagttgtcagtcaggcagggagggagtggctgtgttggtttggggaactaatttccacggacggctgcccgtggacaccaggtggactggttcactaatcaagtcagccatattgttctctggctaagtttggttccagccaacgtcatctgctcttcagttcctcactgccttcttgggatactaagacttgaattttttggggactattaagggtgttagtcttggagaagacacagcctcaccttctcacttgctgtgggtgaggggccatttaagtggactgggagacagtgcgcagtttgtatataattccctttcttgtggaacagaagactgaggcctgcaggttccgatgtgtctccatgggctgtgctcccctcttcctactgtcagtttctgaaacttctgactggcctcccagttatgcctcctcctcaagttcctggcccgtggatgttaaagctgctcgattcccaggatctcggctgccttttcctctatcttgagccctataaatgcccacgggacccccaccaccagcctcttgaagtggctccacagctcctgtccctggaacatcctgtcagtttggtcataaaccctgagccagatgaaatgagccaccgtgaacagacatctgccatgcccccaggtgggcttcggtggccctacccggtaccagttctttctgagaaactggagatgtcttgttagcataagtgtcttcattcccacctggagggtttgggagaggagcaaagcagttgaaaactagttaatgagctacaagagtcaaatagtcctctgaatggagcccccatcacaaaacagtgcccaggaggctggctcctcaagctacccatgcccagcgccctaaagcagcaccagatgctttggaattggggtgaaacacccacatggcagcctgctagcagcagtgactttgacttctggtcttaaagagtccctcacttcagccccaggagctattggtgggttttagcagttttgtctttaccgtttttagttctccttgattctttgttttcttcctttatcgtttttaggtttggtatgtgttgttttatttccatggttcctcaagtttcctttttaaacatttgcatttgctggacaattgcaattttttttaaaaaattcccctacccctgtttaaagctgaaaaatacatttggttcatgtgcattgtttacaaagcaaaaagaaaaaagaggaaaaaaaggcaaaaaatattgtgaaagaaaaaaaacaacttaatatattttggattaatatttggtatttcttttaaagtattttttgtgctgtgaacattttctgccaaagaccatgatgtgtgtctgtatgtttaagttatcgtaaatatttaaaatgtaaacatggctgttttgttatgccaccctgtaccaggattgctgccgcattccactgggtataacagtattttaattaaaaaaaaataattaaaagtgatgtctttgc

SEQ ID NO: 4151 - protein, 130 aa, Homo sapiens; identical to SEQ ID NO: 4135

SEQ ID NO: 4152 - DNA, 3610 bp, Homo sapiens
agttttagcagatggcctcaggcctcccttgactgtcctgtggtgtccaagttaggtcaaaccaccccatcatggctggagtctttcggtgcccacttctggccaactgtactcagtttcttggtggaagccagccaagagtagaatgtttccttctggacactgggcacagggaagctgtgtttagtcaccccgcaggcagctacttccaaagtacctggccctgggttcactcagcatctggtccttggggcagccgatgggaccgttgcttgctggtcccagcagtctattctacttccggaggctacaagcttctgaccatcccaccatagtcacctggaggttttgctcctgtttggtggcctctcatctgtcaccttttctgatggagagtagtgggtcagcctcgaatcactccctgggagctctcgccttcattcagctctgctgtctgactcttgcagctggaaagcgaaatccagcggctctctgaggcccatgagagcctgaccagagcctcctccaagcgtgaggccctggagaagaccatgcggaacaagatggacagtgaaatgaggaggctgcaagacttcaaccgggatcttagagagagattggaatctgcaaatcgccgcctggcaagcaagacacaggaggcccaggccggcagtcaggacatggtggccaagctgcttgctcagagctacgaacagcagcaggagcaagagaagctggagcgagagatggcactgctgcgcggcgccatcgaggaccagcggcggcgtgccgagctgctggagcaggctctgggcaatgcgcagggccgggcagctcgagccgaagaggagctgcgcaagaagcaggcctatgtggagaaagtggagcggctgcagcaggcgctcgggcagctgcaggcagcctgtgagaagcgggagcagctggagctgcgtctgcggactcgcctggagcaggaactcaaggccctgcgtgcacagcagagacaggcaggtgccccaggtggtagcagtggcagtggtgggtctccagagctcagcgccctgcgactgtcagaacaactgcgagagaaggaggagcagatcctggcgctggaggccgacatgaccaagtgggagcagaagtatttggaggaacgtgccatgaggcagtttgccatggatgcggctgccacggctgctgctcagcgtgacaccactctcatccgacattccccccagccctcacccagcagcagcttcaatgagggtctgctcactggtggccacaggcatcaggagatggaaagcaggttaaaggtgctccatgcccagatcctggagaaggatgcagtgatcaaggtccttcagcagcgctccaggagagaccctggcaaggccatccagggctccctgcggcctgccaagtcggtgccatctgttttcgcggctgcggcagcaggaacccagggctggcaagggctctcttctagtgagcgacaaacagcagacgcccctgctcggctgactacagcagacagagcacccacagaggagccagtggtcacagctccccctgctgcccatgccaaacacgggagcagagatgggagcacccagactgagggccccccagacagcacctccacctgcctgccaccggagcctgacagccttctggggtgcagcagtagccagagagcagcctctctggactctgtagctacatccagagtccaggacttgtcagacatggtggagatactgatctgaaggaggtggtgcttcaggactctgagccattctctcccctcctctgccctgtgccactctcagccatttcagcagccccgtcaaccgctgctccgtccctttccccagccagacactcattcccattgaccatctggtcccaggagctcaggaggaggaccccaggggagaggagagctgtgagagcaccggcacccccagaagactctgcttcttagcccacattcctccgggccttatggagaatgaggattcagccttgacttcttgcccaaggcctgctactggggtagcaactgacagctcagaaaggagctgagctccctctgccctgccagttgtcagtcaggcagggagggagtggctgtgttggtttggggaactaatttccacggacggctgcccgtggacaccaggtggactggttcactaatcaagtcagccatattgttctctggctaagtttggttccagccaacgtcatctgctcttcagttcctcactgccttcttgggatactaagacttgaattttttggggactattaagggtgttagtcttggagaagacacagcctcaccttctcacttgctgtgggtgaggggccatttaagtggactgggagacagtgcgcagtttgtatataattccctttcttgtggaacagaagactgaggcctgcaggttccgatgtgtctccatgggctgtgctcccctcttcctactgtcagtttctgaaacttctgactggcctcccagttatgcctcctcctcaagttcctggcccgtggatgttaaagctgctcgattcccaggatctcggctgccttttcctctatcttgagccctataaatgcccacgggacccccaccaccagcctcttgaagtggctccacagctcctgtccctggaacatcctgtcagtttggtcataaaccctgagccagatgaaatgagccaccgtgaacagacatctgccatgcccccaggtgggcttcggtggccctacccggtaccagttctttctgagaaactggagatgtcttgttagcataagtgtcttcattcccacctggagggtttgggagaggagcaaagcagttgaaaactagttaatgagctacaagagtcaaatagtcctctgaatggagcccccatcacaaaacagtgcccaggaggctggctcctcaagctacccatgcccagcgccctaaagcagcaccagatgctttggaattggggtgaaacacccacatggcagcctgctagcagcagtgactttgacttctggtcttaaagagtccctcacttcagccccaggagctattggtgggttttagcagttttgtctttaccgtttttagttctccttgattctttgttttcttcctttatcgtttttaggtttggtatgtgttgttttatttccatggttcctcaagtttcctttttaaacatttgcatttgctggacaattgcaattttttttaaaaaattcccctacccctgtttaaagctgaaaaatacatttggttcatgtgcattgtttacaaagcaaaaagaaaaaagaggaaaaaaaggcaaaaaatattgtgaaagaaaaaaaacaacttaatatattttggattaatatttggtatttcttttaaagtattttttgtgctgtgaacattttctgccaaagaccatgatgtgtgtctgtatgtttaagttatcgtaaatatttaaaatgtaaacatggctgttttgttatgccaccctgtaccaggattgctgccgcattccactgggtataacagtattttaattaaaaaaaaataattaaaagtgatgtctttgc

SEQ ID NO: 4153 - protein, 405 aa, Homo sapiens; identical to SEQ ID NO: 4137

SEQ ID NO: 4154 - DNA, 1034 bp, Homo sapiens
ggtgctctggggccaggtgccaccggccattgtccaggcagctgtgtgcaagccaaagaagcatgaggacactggaagactcctcggggacactcctgtccctggaacatcctgtcagtttggtcataaaccctgagccagatgaaatgagccaccgtgaacagacatctgccatgcccccaggtgggcttcggtggccctacccggtaccagttctttctgagaaactggagatgtcttgttagcataagtgtcttcattcccacctggagggtttgggagaggagcaaagcagttgaaaactagttaatgagctacaagagtcaaatagtcctctgaatggagcccccatcacaaaacagtgcccaggaggctggctcctcaagctacccatgcccagcgccctaaagcagcaccagatgctttggaattggggtgaaacacccacatggcagcctgctagcagcagtgactttgacttctggtcttaaagagtccctcacttcagccccaggagctattggtgggttttagcagttttgtctttaccgtttttagttctccttgattctttgttttcttcctttatcgtttttaggtttggtatgtgttgttttatttccatggttcctcaagtttcctttttaaacatttgcatttgctggacaattgcaattttttttaaaaaattcccctacccctgtttaaagctgaaaaatacatttggttcatgtgcattgtttacaaagcaaaaagaaaaaagaggaaaaaaaggcaaaaaatattgtgaaagaaaaaaaacaacttaatatattttggattaatatttggtatttcttttaaagtattttttgtgctgtgaacattttctgccaaagaccatgatgtgtgtctgtatgtttaagttatcgtaaatatttaaaatgtaaacatggctgttttgttatgccaccctgtaccaggattgctgccgcattccactgggtataacagtattttaattaaaaaaaaataattaaaagtgatgtctttgc

SEQ ID NO: 4155 - protein, 60 aa, Homo sapiens; identical to SEQ ID NO: 4139

SEQ ID NO: 4156 - DNA, 1656 bp, Homo sapiens
agagcgtcggcgccacggccgagaacacatcttcgccgccgagctgagctgggccgagccggaggttgtggtgtctgactgcgctgggcaccctcgggccgcagcggtgctctggggccaggtgccaccggccattgtccaggcagctgtgtgcaagccaaagaagcatgaggacactggaagactcctcggggacactaatttccacggacggctgcccgtggacaccaggtggactggttcactaatcaagtcagccatattgttctctggctaagtttggttccagccaacgtcatctgctcttcagttcctcactgccttcttgggatactaagacttgaattttttggggactattaagggtgttagtcttggagaagacacagcctcaccttctcacttgctgtgggtgaggggccatttaagtggactgggagacagtgcgcagtttgtatataattccctttcttgtggaacagaagactgaggcctgcaggttccgatgtgtctccatgggctgtgctcccctcttcctactgtcagtttctgaaacttctgactggcctcccagttatgcctcctcctcaagttcctggcccgtggatgttaaagctgctcgattcccaggatctcggctgccttttcctctatcttgagccctataaatgcccacgggacccccaccaccagcctcttgaagtggctccacagctcctgtccctggaacatcctgtcagtttggtcataaaccctgagccagatgaaatgagccaccgtgaacagacatctgccatgcccccaggtgggcttcggtggccctacccggtaccagttctttctgagaaactggagatgtcttgttagcataagtgtcttcattcccacctggagggtttgggagaggagcaaagcagttgaaaactagttaatgagctacaagagtcaaatagtcctctgaatggagcccccatcacaaaacagtgcccaggaggctggctcctcaagctacccatgcccagcgccctaaagcagcaccagatgctttggaattggggtgaaacacccacatggcagcctgctagcagcagtgactttgacttctggtcttaaagagtccctcacttcagccccaggagctattggtgggttttagcagttttgtctttaccgtttttagttctccttgattctttgttttcttcctttatcgtttttaggtttggtatgtgttgttttatttccatggttcctcaagtttcctttttaaacatttgcatttgctggacaattgcaattttttttaaaaaattcccctacccctgtttaaagctgaaaaatacatttggttcatgtgcattgtttacaaagcaaaaagaaaaaagaggaaaaaaaggcaaaaaatattgtgaaagaaaaaaaacaacttaatatattttggattaatatttggtatttcttttaaagtattttttgtgctgtgaacattttctgccaaagaccatgatgtgtgtctgtatgtttaagttatcgtaaatatttaaaatgtaaacatggctgttttgttatgccaccctgtaccaggattgctgccgcattccactgggtataacagtattttaattaaaaaaaaataattaaaagtgatgtctttgc

SEQ ID NO: 4157 - protein, 96 aa, Homo sapiens [sequence omitted]

SEQ ID NO: 4158 - DNA, 4468 bp, Homo sapiens
ggttatttgtggttcgctttgatcccgagggggaacctgaaactctcacattcctggcatagcagccgcctccggcgcgggccgaccctggggctgcgcgctggggcgcgaacagccagagcgtcggcgccacggccgagaacacatcttcgccgccgagctgagctgggccgagccggaggttgtggtgtctgactgcgctgggcaccctcgggccgcagcggtgctctggggccaggtgccaccggccattgtccaggcagctgtgtgcaagccaaagaagcatgaggacactggaagactcctcggggacagtcctgcaccgcctcatccaggagcagctgcgctacggcaacctgactgagacgcgcacgctgctagccatccagcagcaggccctgaggggtggggctggaactgggggtacagggagcccccaggcctccctggagatcctggccccagaggacagtcaggtgctgcagcaggccaccaggcaggagccccagggccaggagcaccagggcggtgagaaccacctggcagagaacaccctctaccggctatgcccacagcccagcaagggagaggagctgcccacctatgaggaggccaaagcccactcgcagtactatgcggcccagcaggcagggacccggccacatgcgggggaccgagatccccgtggggccccgggaggcagtcggaggcaggacgaggccctgcgggagctgaggcatgggcacgtgcgctcgttgagtgaacggctccttcagttgtccctggagaggaacggcgcccgggcccccagccacatgagctcctcccacagcttcccacagctggcccgcaaccagcagggccccccactgaggggcccccctgctgagggcccagagtcccgaggacccccacctcagtaccctcatgttgtactagctcatgagaccaccactgctgtcactgacccacggtaccgtgcccgcggcagcccgcacttccagcatgctgaagtcaggatcctgcaggcccaggtgcctcctgtgttcctccaacagcagcagcagtaccagtacctgcagcaatctcaggagcacccccctcccccacatccagctgctctcggccatggccccctgagctccctcagtccacctgctgtggaggggccagtgagtgcccaggcctcctcagccacctcgggcagtgcccacctggcccagatggaggccgtgctgagggagaatgccaggctgcagagagacaatgagcggctgcagagggagctggagagctctgcggagaaggctggccgcattgagaagctggaaagcgaaatccagcggctctctgaggcccatgagagcctgaccagagcctcctccaagcgtgaggccctggagaagaccatgcggaacaagatggacagtgaaatgaggaggctgcaagacttcaaccgggatcttagagagagattggaatctgcaaatcgccgcctggcaagcaagacacaggaggcccaggccggcagtcaggacatggtggccaagctgcttgctcagagctacgaacagcagcaggagcaagagaagctggagcgagagatggcactgctgcgcggcgccatcgaggaccagcggcggcgtgccgagctgctggagcaggctctgggcaatgcgcagggccgggcagctcgagccgaagaggagctgcgcaagaagcaggcctatgtggagaaagtggagcggctgcagcaggcgctcgggcagctgcaggcagcctgtgagaagcgggagcagctggagctgcgtctgcggactcgcctggagcaggaactcaaggccctgcgtgcacagcagagacaggcaggtgccccaggtggtagcagtggcagtggtgggtctccagagctcagcgccctgcgactgtcagaacaactgcgagagaaggaggagcagatcctggcgctggaggccgacatgaccaagtgggagcagaagtatttggaggaacgtgccatgaggcagtttgccatggatgcggctgccacggctgctgctcagcgtgacaccactctcatccgacattccccccagccctcacccagcagcagcttcaatgagggtctgctcactggtggccacaggcatcaggagatggaaagcaggttaaaggtgctccatgcccagatcctggagaaggatgcagtgatcaaggtccttcagcagcgctccaggagagaccctggcaaggccatccagggctccctgcggcctgccaagtcggtgccatctgttttcgcggctgcggcagcaggaacccagggctggcaagggctctcttctagtgagcgacaaacagcagacgcccctgctcggctgactacagcagacagagcacccacagaggagccagtggtcacagctccccctgctgcccatgccaaacacgggagcagagatgggagcacccagactgagggccccccagacagcacctccacctgcctgccaccggagcctgacagccttctggggtgcagcagtagccagagagcagcctctctggactctgtagctacatccagagtccaggacttgtcagacatggtggagatactgatctgaaggaggtggtgcttcaggactctgagccattctctcccctcctctgccctgtgccactctcagccatttcagcagccccgtcaaccgctgctccgtccctttccccagccagacactcattcccattgaccatctggtcccaggagctcaggaggaggaccccaggggagaggagagctgtgagagcaccggcacccccagaagactctgcttcttagcccacattcctccgggccttatggagaatgaggattcagccttgacttcttgcccaaggcctgctactggggtagcaactgacagctcagaaaggagctgagctccctctgccctgccagttgtcagtcaggcagggagggagtggctgtgttggtttggggaactaatttccacggacggctgcccgtggacaccaggtggactggttcactaatcaagtcagccatattgttctctggctaagtttggttccagccaacgtcatctgctcttcagttcctcactgccttcttgggatactaagacttgaattttttggggactattaagggtgttagtcttggagaagacacagcctcaccttctcacttgctgtgggtgaggggccatttaagtggactgggagacagtgcgcagtttgtatataattccctttcttgtggaacagaagactgaggcctgcaggttccgatgtgtctccatgggctgtgctcccctcttcctactgtcagtttctgaaacttctgactggcctcccagttatgcctcctcctcaagttcctggcccgtggatgttaaagctgctcgattcccaggatctcggctgccttttcctctatcttgagccctataaatgcccacgggacccccaccaccagcctcttgaagtggctccacagctcctgtccctggaacatcctgtcagtttggtcataaaccctgagccagatgaaatgagccaccgtgaacagacatctgccatgcccccaggtgggcttcggtggccctacccggtaccagttctttctgagaaactggagatgtcttgttagcataagtgtcttcattcccacctggagggtttgggagaggagcaaagcagttgaaaactagttaatgagctacaagagtcaaatagtcctctgaatggagcccccatcacaaaacagtgcccaggaggctggctcctcaagctacccatgcccagcgccctaaagcagcaccagatgctttggaattggggtgaaacacccacatggcagcctgctagcagcagtgactttgacttctggtcttaaagagtccctcacttcagccccaggagctattggtgggttttagcagttttgtctttaccgtttttagttctccttgattctttgttttcttcctttatcgtttttaggtttggtatgtgttgttttatttccatggttcctcaagtttcctttttaaacatttgcatttgctggacaattgcaattttttttaaaaaattcccctacccctgtttaaagctgaaaaatacatttggttcatgtgcattgtttacaaagcaaaaagaaaaaagaggaaaaaaaggcaaaaaatattgtgaaagaaaaaaaacaacttaatatattttggattaatatttggtatttcttttaaagtattttttgtgctgtgaacattttctgccaaagaccatgatgtgtgtctgtatgtttaagttatcgtaaatatttaaaatgtaaacatggctgttttgttatgccaccctgtaccaggattgctgccgcattccactgggtataacagtattttaattaaaaaaaaataattaaaagtgatgtctttgc

SEQ ID NO: 4159 - protein, 780 aa, Homo sapiens; identical to SEQ ID NO: 431

SEQ ID NO: 4160 - DNA, 1918 bp, Homo sapiens
gaggagggcggtgcgctgagaggttatttgtggttcgctttgatcccgagggggaacctgaaactctcacattcctggcatagcagccgcctccggcgcgggccgaccctggggctgcgcgctggggcgcgaacagccagagcgtcggcgccacggccgagaacacatcttcgccgccgagctgagctgggccgagccggaggttgtggtgtctgactgcgctgggcaccctcgggccgcagcggtgctctggggccaggtgccaccggccattgtccaggcagctgtgtgcaagccaaagaagcatgaggacactggaagactcctcggggacagtcctgcaccgcctcatccaggagcagctgcgctacggcaacctgactgagacgcgcacgctgctagccatccagcagcaggccctgaggggtggggctggaactgggggtacagggagcccccaggcctccctggagatcctggccccagaggacagtcaggtgctgcagcaggccaccaggcaggagccccagggccaggagcaccagggcggtgagaaccacctggcagagaacaccctctaccggctatgcccacagcccagcaagggagaggagctgcccacctatgaggaggccaaagcccactcgcagtactatgcggcccagcaggcagggacccggccacatgcgggggaccgagatccccgtggggccccgggaggcagtcggaggcaggacgaggccctgcgggagctgaggcatgggcacgtgcgctcgttgagtgaacggtcccctcttcctactgtcagtttctgaaacttctgactggcctcccagttatgcctcctcctcaagttcctggcccgtggatgttaaagctgctcgattcccaggatctcggctgccttttcctctatcttgagccctataaatgcccacgggacccccaccaccagcctcttgaagtggctccacagctcctgtccctggaacatcctgtcagtttggtcataaaccctgagccagatgaaatgagccaccgtgaacagacatctgccatgcccccaggtgggcttcggtggccctacccggtaccagttctttctgagaaactggagatgtcttgttagcataagtgtcttcattcccacctggagggtttgggagaggagcaaagcagttgaaaactagttaatgagctacaagagtcaaatagtcctctgaatggagcccccatcacaaaacagtgcccaggaggctggctcctcaagctacccatgcccagcgccctaaagcagcaccagatgctttggaattggggtgaaacacccacatggcagcctgctagcagcagtgactttgacttctggtcttaaagagtccctcacttcagccccaggagctattggtgggttttagcagttttgtctttaccgtttttagttctccttgattctttgttttcttcctttatcgtttttaggtttggtatgtgttgttttatttccatggttcctcaagtttcctttttaaacatttgcatttgctggacaattgcaattttttttaaaaaattcccctacccctgtttaaagctgaaaaatacatttggttcatgtgcattgtttacaaagcaaaaagaaaaaagaggaaaaaaaggcaaaaaatattgtgaaagaaaaaaaacaacttaatatattttggattaatatttggtatttcttttaaagtattttttgtgctgtgaacattttctgccaaagaccatgatgtgtgtctgtatgtttaagttatcgtaaatatttaaaatgtaaacatggctgttttgttatgccaccctgtaccaggattgctgccgcattccactgggtataacagtattttaattaaaaaaaaataattaaaagtgatgtctttgc

SEQ ID NO: 4161 - protein, 169 aa, Homo sapiens; identical to SEQ ID NO: 4145

SEQ ID NO: 4162 - DNA, 817 bp, Homo sapiens
gatgtgtagctggctgtacgggtggtggttcctggtgctctggggccaggtgccaccggccattgtccaggcagctgtgtgcaagccaaagaagcatgaggacactggaagactcctcggggacagtcctgcaccgcctcatccaggagcagctgcgctacggcaacctgactgagacgcgcacgctgctagccatccagcagcaggccctgaggggtggggctggaactgggggtacagggagcccccaggcctccctggagatcctggccccagaggacagtcaggtgctgcagcaggccaccaggcaggagccccagggccaggagcaccagggcggtgagaaccacctggcagagaacaccctctaccggctatgcccacagcccagcaagggagaggagctgcccacctatgaggaggccaaagcccactcgcagtactatgcggcccagcaggcagggacccggccacatgcgggggaccgagatccccgtggggccccgggaggcagtcggaggcaggacgaggccctgcgggagctgaggcatgggcacgtgcgctcgttgagtgaacggctccttcagttgtccctggagaggaacggcgcccgggcccccagccacatgagctcctcccacagcttcccacagctggcccgcaaccagcagggccccccactgaggggcccccctgctgagggcccagagtcccgaggacccccacctcagtaccctcatgttgtactagctcatgagaccaccactgctgtcactgacccacggtaccgtgcccgcggcagcccgcacttccagca

SEQ ID NO: 4163 - protein, 57 aa, Homo sapiens
MCSWLYGWWFLVLWGQVPPAIVQAAVCKPKKHEDTGRLLGDSPAPPHPGAAALRQPD

SEQ ID NO: 4164 - DNA, 912 bp, Homo sapiens
accggctcgccccaggcgtaccagcggccaccggtgctccaggcgagcaggagcccaggccaaggctggagacgcgcgctggcttagaaaggcggccttcagagagcgcagcgggcgagtgcagcagaggtgctctggggccaggtgccaccggccattgtccaggcagctgtgtgcaagccaaagaagcatgaggacactggaagactcctcggggacagtcctgcaccgcctcatccaggagcagctgcgctacggcaacctgactgagacgcgcacgctgctagccatccagcagcaggccctgaggggtggggctggaactgggggtacagggagcccccaggcctccctggagatcctggccccagaggacagtcaggtgctgcagcaggccaccaggcaggagccccagggccaggagcaccagggcggtgagaaccacctggcagagaacaccctctaccggctatgcccacagcccagcaagggagaggagctgcccacctatgaggaggccaaagcccactcgcagtactatgcggcccagcaggcagggacccggccacatgcgggggaccgagatccccgtggggccccgggaggcagtcggaggcaggacgaggccctgcgggagctgaggcatgggcacgtgcgctcgttgagtgaacggctccttcagttgtccctggagaggaacggcgcccgggcccccagccacatgagctcctcccacagcttcccacagctggcccgcaaccagcagggccccccactgaggggcccccctgctgagggcccagagtcccgaggacccccacctcagtaccctcatgttgtactagctcatgagaccaccactgctgtcactgacccacggtaccgtgcccgcggcagcccgcacttccagca

SEQ ID NO: 4165 - protein, 239 aa, Homo sapiens
MRTLEDSSGTVLHRLIQEQLRYGNLTETRTLLAIQQQALRGGAGTGGTGSPQASLEILAPEDSQVLQQATRQEPQGQEHQGGENHLAENTLYRLCPQPSKGEELPTYEEAKAHSQYYAAQQAGTRPHAGDRDPRGAPGGSRRQDEALRELRHGHVRSLSERLLQLSLERNGARAPSHMSSSHSFPQLARNQQGPPLRGPPAEGPESRGPPPQYPHVVLAHETTTAVTDPRYRARGSPHF

SEQ ID NO: 4166 - DNA, 892 bp, Homo sapiens
agggctcgagagggagggaggcggacccgcgatgcttaaagacctctccgggcctcgggctaccctcaccggctcgccccaggcgtaccagcggccaccggtgctccaggtgctctggggccaggtgccaccggccattgtccaggcagctgtgtgcaagccaaagaagcatgaggacactggaagactcctcggggacagtcctgcaccgcctcatccaggagcagctgcgctacggcaacctgactgagacgcgcacgctgctagccatccagcagcaggccctgaggggtggggctggaactgggggtacagggagcccccaggcctccctggagatcctggccccagaggacagtcaggtgctgcagcaggccaccaggcaggagccccagggccaggagcaccagggcggtgagaaccacctggcagagaacaccctctaccggctatgcccacagcccagcaagggagaggagctgcccacctatgaggaggccaaagcccactcgcagtactatgcggcccagcaggcagggacccggccacatgcgggggaccgagatccccgtggggccccgggaggcagtcggaggcaggacgaggccctgcgggagctgaggcatgggcacgtgcgctcgttgagtgaacggctccttcagttgtccctggagaggaacggcgcccgggcccccagccacatgagctcctcccacagcttcccacagctggcccgcaaccagcagggccccccactgaggggcccccctgctgagggcccagagtcccgaggacccccacctcagtaccctcatgttgtactagctcatgagaccaccactgctgtcactgacccacggtaccgtgcccgcggcagcccgcacttccagca

SEQ ID NO: 4167 - protein, 72 aa, Homo sapiens
MLKDLSGPRATLTGSPQAYQRPPVLQVLWGQVPPAIVQAAVCKPKKHEDTGRLLGDSPAPPHPGAAALRQPD

SEQ ID NO: 4168 - DNA, 1065 bp, Homo sapiens
aagagggctcgagagggagggaggcggacccgcgatgcttaaagacctctccgggcctcgggctaccctcaccggctcgccccaggcgtaccagcggccaccggtgctccaggtccgcccgggctcgtggtggggcgggagccctggctggggtgccagaacctcctagcttggagactgtctttggttccttaggcgagcaggagcccaggccaaggctggagacgcgcgctggcttagaaaggcggccttcagagagcgcagcgggcgagtgcagcagaggtgctctggggccaggtgccaccggccattgtccaggcagctgtgtgcaagccaaagaagcatgaggacactggaagactcctcggggacagtcctgcaccgcctcatccaggagcagctgcgctacggcaacctgactgagacgcgcacgctgctagccatccagcagcaggccctgaggggtggggctggaactgggggtacagggagcccccaggcctccctggagatcctggccccagaggacagtcaggtgctgcagcaggccaccaggcaggagccccagggccaggagcaccagggcggtgagaaccacctggcagagaacaccctctaccggctatgcccacagcccagcaagggagaggagctgcccacctatgaggaggccaaagcccactcgcagtactatgcggcccagcaggcagggacccggccacatgcgggggaccgagatccccgtggggccccgggaggcagtcggaggcaggacgaggccctgcgggagctgaggcatgggcacgtgcgctcgttgagtgaacggctccttcagttgtccctggagaggaacggcgcccgggcccccagccacatgagctcctcccacagcttcccacagctggcccgcaaccagcagggccccccactgaggggcccccctgctgagggcccagagtcccgaggacccccacctcagtaccctcatgttgtactagctcatgagaccaccactgctgtcactgacccacggtaccgtgcccgcggcagcccgcacttccagca

SEQ ID NO: 4169 - protein, 239 aa, Homo sapiens; identical to SEQ ID NO: 4165

SEQ ID NO: 4170 - DNA, 1153 bp, Homo sapiens
ccgggagtcggagcctcgaggatcgagcgtcctcggggcgcagtgcgccctttcgaggcagccgcagtgcctggcaagggccgctctgcccagggagcgcagcgcgctgggctttgcggggctctagaaacgcgcgggtctcttggggctgggggagaggggagagggccgactccggagacaacagccacagtgtttcgggttgcaggaatagtaagtctccatgaatgttatcattagtaatcgtttaccaggattttcactgtgccaggagctcgcaggccactgcctctttttttttcctcatctccatgagtcaagcagaattctttgcatttttctggtggagaaactgaggctcagagattaggtgctctggggccaggtgccaccggccattgtccaggcagctgtgtgcaagccaaagaagcatgaggacactggaagactcctcggggacagtcctgcaccgcctcatccaggagcagctgcgctacggcaacctgactgagacgcgcacgctgctagccatccagcagcaggccctgaggggtggggctggaactgggggtacagggagcccccaggcctccctggagatcctggccccagaggacagtcaggtgctgcagcaggccaccaggcaggagccccagggccaggagcaccagggcggtgagaaccacctggcagagaacaccctctaccggctatgcccacagcccagcaagggagaggagctgcccacctatgaggaggccaaagcccactcgcagtactatgcggcccagcaggcagggacccggccacatgcgggggaccgagatccccgtggggccccgggaggcagtcggaggcaggacgaggccctgcgggagctgaggcatgggcacgtgcgctcgttgagtgaacggctccttcagttgtccctggagaggaacggcgcccgggcccccagccacatgagctcctcccacagcttcccacagctggcccgcaaccagcagggccccccactgaggggcccccctgctgagggcccagagtcccgaggacccccacctcagtaccctcatgttgtactagctcatgagaccaccactgctgtcactgacccacggtaccgtgcccgcggcagcccgcacttccagca

SEQ ID NO: 4171 - protein, 239 aa, Homo sapiens; identical to SEQ ID NO: 4165

SEQ ID NO: 4172 - DNA, 654 bp, Homo sapiens
agagcgtcggcgccacggccgagaacacatcttcgccgccgagctgagctgggccgagccggaggttgtggtgtctgactgcgctgggcaccctcgggccgcagcggtgctctggggccaggtgccaccggccattgtccaggcagctgagccccagggccaggagcaccagggcggtgagaaccacctggcagagaacaccctctaccggctatgcccacagcccagcaagggagaggagctgcccacctatgaggaggccaaagcccactcgcagtactatgcggcccagcaggcagggacccggccacatgcgggggaccgagatccccgtggggccccgggaggcagtcggaggcaggacgaggccctgcgggagctgaggcatgggcacgtgcgctcgttgagtgaacggctccttcagttgtccctggagaggaacggcgcccgggcccccagccacatgagctcctcccacagcttcccacagctggcccgcaaccagcagggccccccactgaggggcccccctgctgagggcccagagtcccgaggacccccacctcagtaccctcatgttgtactagctcatgagaccaccactgctgtcactgacccacggtaccgtgcccgcggcagcccgcacttccagca

SEQ ID NO: 4173 - protein, 62 aa, Homo sapiens
MSSSHSFPQLARNQQGPPLRGPPAEGPESRGPPPQYPHVVLAHETTTAVTDPRYRARGSPHF

SEQ ID NO: 4174 - DNA, 632 bp, Homo sapiens
aacctgaaactctcacattcctggcatagcagccgcctccggcgcgggccgaccctggggctgcgcgctggggcgcgaacagccagagcgtcggcgccacggccgagaacacatcttcgccgccgagctgagctgggccgagccggaggttgtggtgtctgactgcgctgggcaccctcgggccgcagcggtgctctggggccaggtgccaccggccattgtccaggcagctgtgaggccaaagcccactcgcagtactatgcggcccagcaggcagggacccggccacatgcgggggaccgagatccccgtggggccccgggaggcagtcggaggcaggacgaggccctgcgggagctgaggcatgggcacgtgcgctcgttgagtgaacggctccttcagttgtccctggagaggaacggcgcccgggcccccagccacatgagctcctcccacagcttcccacagctggcccgcaaccagcagggccccccactgaggggcccccctgctgagggcccagagtcccgaggacccccacctcagtaccctcatgttgtactagctcatgagaccaccactgctgtcactgacccacggtaccgtgcccgcggcagcccgcacttccagca

SEQ ID NO: 4175 - protein, 62 aa, Homo sapiens; identical to SEQ ID NO: 4173

SEQ ID NO: 4176 - DNA, 884 bp, Homo sapiens
acacacacacacacacagccggagtcccctcccgcagcaaccccaggacacgcgtggtacagcccttgctgtcgtcccgtcgatgggtttagggatgaagggtgctctggggccaggtgccaccggccattgtccaggcagctgtgtgcaagccaaagaagcatgaggacactggaagactcctcggggacagtcctgcaccgcctcatccaggagcagctgcgctacggcaacctgactgagacgcgcacgctgctagccatccagcagcaggccctgaggggtggggctggaactgggggtacagggagcccccaggcctccctggagatcctggccccagaggacagtcaggtgctgcagcaggccaccaggcaggagccccagggccaggagcaccagggcggtgagaaccacctggcagagaacaccctctaccggctatgcccacagcccagcaagggagaggagctgcccacctatgaggaggccaaagcccactcgcagtactatgcggcccagcaggcagggacccggccacatgcgggggaccgagatccccgtggggccccgggaggcagtcggaggcaggacgaggccctgcgggagctgaggcatgggcacgtgcgctcgttgagtgaacggctccttcagttgtccctggagaggaacggcgcccgggcccccagccacatgagctcctcccacagcttcccacagctggcccgcaaccagcagggccccccactgaggggcccccctgctgagggcccagagtcccgaggacccccacctcagtaccctcatgttgtactagctcatgagaccaccactgctgtcactgacccacggtaccgtgcccgcggcagcccgcacttccagca

SEQ ID NO: 4177 - protein, 239 aa, Homo sapiens; identical to SEQ ID NO: 4165

SEQ ID NO: 4178 - DNA, 634 bp, Homo sapiens
gctgagaggttatttgtggttcgctttgatcccgagggggaacctgaaactctcacattcctggcatagcagccgcctccggcgcgggccgaccctggggctgcgcgctggggcgcgaacagccagagcgtcggcgccacggccgagaacacatcttcgccgccgagctgagctgggccgagccggaggttgtggtgtctgactgcgctgggcaccctcgggccgcagcggtgctctggggccaggtgccaccggccattgtccaggcagctgtgtgcaagccaaagaagcatgaggacactggaagactcctcggggacagtcctgcaccgcctcatccaggagcagctgcgctacggcaacctgactgagacgcgcacgctgctagccatccagcagcaggccctgaggggtggggctggaactgggggtacagggagcccccaggcctccctggagatcctggccccagaggacagtcaggtgctgcagcaggccaccaggcaggagccccagggccaggagcaccagggcggtgagaaccacctggcagagaacaccctctaccggctatgcccacagcccagcaagggagaggagctgcccacctatgaggaggcagtcggaggcagga

SEQ ID NO: 4179 - protein, 113 aa, Homo sapiens
MRTLEDSSGTVLHRLIQEQLRYGNLTETRTLLAIQQQALRGGAGTGGTGSPQASLEILAPEDSQVLQQATRQEPQGQEHQGGENHLAENTLYRLCPQPSKGEELPTYEEAVGG

SEQ ID NO: 4180 - DNA, 566 bp, Homo sapiens
ggagtcagtgtgtaaaggtgtgcagaagaaggtatcctttagttccagaactgtgaaccatttagtcccctcagatggagtttcactgtgtcaccaggctggagtgcagtggtgaaatctcggttcactgcaacctccacctcccaggttcaagcgattctcctgcctcagcctcctgagtagctgggactacagcttccttgtgtgtccgcaagctcctctgtaagatggctgtcattgaatttacacaacttcctaactggaatagataatcattatcaagggacagtggatgatgggcaacctaacgatccagtgtgttgtgcaacatttcacctcacctgacaatgaaatccaaaaccacttggaatggaaatgacatatatgttaatgaagacagataatgtatgtcagtagacacaaatgaaagaagaaagcctggattataaaagttctccaggttgggcaatagataggcactgctacataggcattgaagaaagcatttggaactatgctccttctggtaaaaatatgctcaatgaaaagcctttttctgaagacct

SEQ ID NO: 4181 - protein, 46 aa, Homo sapiens
MKEESLDYKSSPGWAIDRHCYIGIEESIWNYAPSGKNMLNEKPFSE

SEQ ID NO: 4182 - DNA, 551 bp, Homo sapiens
aacctgcttgggtccctttccacaccgcggaagctttgttcttttgctctttgcaataaatcttgctgctgctcactctttgggtccacactgcctttatgagctgtaacaccgcgaaggtccacagcttcactcctgagccagcgagaccacgaaccccaccagaaggaagaatctgtgaacacatccgaacatcagaaggaacaaactctagacatgccgcctttaagaactgcaacactcactgcgagtgtccgcggcttcattcttgaagtcagtgagacgaagaacccaccaattccagacacattttggcgacctagatgggacaatcgcctatcaccgagtggtgagaccatcgcctatagctgagcggcgagacaatcacctatcgccaagcaattacctaccacttccagggtcagagcccttcacttcatattcatgaggagacggggaattggaatatacccgcagccgacaatctcagtgtgaaatactggtttactgtttggagaacaatagacaatgatcaacaactgaagagctga

SEQ ID NO: 4183 - protein, 57 aa, Homo sapiens
MSCNTAKVHSFTPEPARPRTPPEGRICEHIRTSEGTNSRHAAFKNCNTHCECPRLHS

SEQ ID NO: 4184 - DNA, 3909 bp, Homo sapiens
tttaaaaagcagtgaaaaacaccgcattcctttggcacaggatgaagaccagctcagctcttcagttgttgatcattgtctattgttctccaaacagtaaaccagtatttcacactgagattgtcggctgcgggtatattccaattccccgtctcctcatgaatatgaagtgaagggctctgaccctggaagtggtaggtaatctcaaaaaaaaaaaaaaaaaagagagagagagagaaaaaaaaggtcaggtaggaagaagaaaaatagactttctgtgactgtatactcttgaaatctcccgcaggttctaagcagggcaaaatggggtctcggaagtgtggaggctgcctaagttgtttgctgattccgcttgcactttggagtataatcgtgaacatattattgtatttcccgaatgggcaaacttcctatgcatccagcaataaactcaccaactacgtgtggtattttgaaggaatctgtttctcaggcatcatgatgcttatagtaacaacagttcttctggtactggagaataataacaactataaatgttgccagagtgaaaactgcagcaaaaaatatgtgacactgctgtcaattatcttttcttccctcggaattgctttttctggatactgcctggtcatctctgccttgggtcttgtccaagggccatattgccgcacccttgatggctgggagtatgcttttgaaggcactgctggacgtttccttacagattctagcatatggattcagtgcctggaacctgcacatgttgtggagtggaacatcattttattttccattctcataaccctcagtgggcttcaagtgatcatctgcctcatcagagtagtcatgcaactatccaagatactgtgtggaagctattcagtgatcttccagcctggaatcatttgaataaggacaaaatgttttccattatcaagacatggccatctatctaaatattatatcaactgtgtagacttgagggcaatattgaaatgatggtgctttctgcatttggtgtttatttgtaaaaaatttgcagtcctcactgcacatgcaagtataccacccttccatttagtatgttttttaagtaatatgcatcagaaacttcagaaatacttctgccctttgatcaaacaaatccatttccaagaatctgtactagggaagtaaataagaatatgagagaaacctttatgcaaatatgtatattgcaacattatttaatattctggaaaattggaaacaccccaaaattctaaactcagaggaaggattaagtaaagagtggtacatactgtaaatgttttctgatattaaaaaaaaaattaaataaaaaataaagagtactacatggttgtaaaattacagtcattacaaatgatgtttttaaaattatgaataatgctacatcaaaaagcaggttacaaattcatgtttactatataactatttaaagcaaatgaaacactaatagtcaaagtttaggatgaaaactaaatctaaaaggaaatataacaaaatgccaattatgcttggtttggggcattgatgacccttcttcccacttttctatattttccaagatttctttattgaatatgttttactataaatattttctaaactcatattttcactattaaaatttttttatttttccaaactttaaggcatatgctctttccacattcctcaacattatttgcaaacatcatgaaatgacacttccatcaacattcaatgaggaaagtagtgatatagatgagccaaaaagagttttatataaacttatacaatctaaactcttgctcttcctttctgactcctgagggtgagtgtgatggactagaagaggtagccttaaaataagtgagcagctagggaacatgctcaatgggcaagagaaaatgaccactgaccagtcaatacctgtgtcagggggagttaccagtacctatatttatttttaaagtaattaaaaagtagaacacttacaaattttccacctatacatgccatgtcttcctcggggacagtagccacatcttatatatttcccaccatgcataggacccagcacacagtgaagccagtaggcactcagtgttgaatgctcataccaggttttctgcttcctgtagttaccctgctgagcactgcttccatcacaggtgcactgggcctcaacacttctgccatttccccatttgtctcctccatggacactgtcaacaatggtctgtcaacacctgctctgtgccaaagccagggagtaggctggggggatacggaagagaatatctttctccttgatgcctgctgtgccaacagccccctttaagccttgttcacagcctttgctgaaacaagcatcttgaaagcaagccatgttatacaccgcatgaccttcatgctctgggcccagctgactgaactggggcaggccccagagtcatgggcagcctattgtcttgctaatggcctctgacttagcctggagtaaaacactgtccaaacaagactggtggttattcaagcataagaatttgaactaggaagccaagaatgaagcaaccggaccattaccatcaaaaaatgattaaaggatgaagaaggaagccaacattcagagagtatctggttcatgttaataatggtatcatattaaaaggaagatacatgaacttctactccaaaagctcctaaaactgcctttgcccacaatgaacagtgtaccctaggcctggtttctgttcttggattcctagatagtctttcttctttgtcactgtgctgatcatttcagtaaacccccgactaaatcagtgcagctctgtttattgcaactaaaacgatccaaatgaagtctcccttttctagatgttgggttggagggatgctaagacaaagatgcttaggctccagagttttacagagcttcattcaataacactctactttccaaagaacttaaatatgaggtctgaaggacttggaccaagaggcaaacccaagctacagacaccatgttgtactcagagtgacctctcccctctgacagcccaggatttctctatcaagtccataagctagtcatatctaggaccatcttgttaaaaattctctcaaagtctcctcagccctcttgtaaacagacttctggaaggtccacttcatcagtttgttatatactttcagactgtctatctcttgtttagattcagcatggcaccgtacgttgaatggactgttaatagatgtttgctgaatgactccaccacagcattggacacatcaggggtacagccaaatgcagcatgatacctctatcaggaaaattaaattttaacacagccaccaaatattctatatttgaagagtatatgctaatcatgcaattttaagtaaaaaaaagctgaatacaaaaaaagctgaatatgtgttttatatcctcgtgaattcaaagtaaaaaggaaaaaaaactcaaaaaccaaatatatgtatgcagtttgagcccaaatttttaattaagtaaccatataattacatgtagacatgtataaaccttgagatatgtaaagaccagaaaaatatttaaaagttaatagttacatcatctgtggtcacaacaccctgaaaatgcctaatattggaaacttaagcaggattgatccaggttattacttggatgggagaccagatgctataggctgaaaaaagaaagcataagtacgcacaagttaatacttaataattatctcctaatgataggactataagttctatctcttttctttacattgttcagtattttcaaatttccctttgaaaatgtgttatgtacttgaattattagaaaaaataaatgtcatttaaaaagca

SEQ ID NO: 4185 - protein, 201 aa, Homo sapiens; identical to SEQ ID NO: 433

SEQ ID NO: 4186 - DNA, 3851 bp, Homo sapiens
aacacaaggtcagggttaagccttcggtgctttaatccagaggaaaattacttattttaaaaagcagtgaaaaacaccgcattcctttggcacaggatgaagaccagctcagctcttcagttgttgatcattgtctattgttctccaaacagtaaaccagtatttcacactgagattgtcggctgcgggtatattccaattccccgtctcctcatgaatatgaagtgaagggctctgaccctggaagtggttctaagcagggcaaaatggggtctcggaagtgtggaggctgcctaagttgtttgctgattccgcttgcactttggagtataatcgtgaacatattattgtatttcccgaatgggcaaacttcctatgcatccagcaataaactcaccaactacgtgtggtattttgaaggaatctgtttctcaggcatcatgatgcttatagtaacaacagttcttctggtactggagaataataacaactataaatgttgccagagtgaaaactgcagcaaaaaatatgtgacactgctgtcaattatcttttcttccctcggaattgctttttctggatactgcctggtcatctctgccttgggtcttgtccaagggccatattgccgcacccttgatggctgggagtatgcttttgaaggcactgctggacgtttccttacagattctagcatatggattcagtgcctggaacctgcacatgttgtggagtggaacatcattttattttccattctcataaccctcagtgggcttcaagtgatcatctgcctcatcagagtagtcatgcaactatccaagatactgtgtggaagctattcagtgatcttccagcctggaatcatttgaataaggacaaaatgttttccattatcaagacatggccatctatctaaatattatatcaactgtgtagacttgagggcaatattgaaatgatggtgctttctgcatttggtgtttatttgtaaaaaatttgcagtcctcactgcacatgcaagtataccacccttccatttagtatgttttttaagtaatatgcatcagaaacttcagaaatacttctgccctttgatcaaacaaatccatttccaagaatctgtactagggaagtaaataagaatatgagagaaacctttatgcaaatatgtatattgcaacattatttaatattctggaaaattggaaacaccccaaaattctaaactcagaggaaggattaagtaaagagtggtacatactgtaaatgttttctgatattaaaaaaaaaattaaataaaaaataaagagtactacatggttgtaaaattacagtcattacaaatgatgtttttaaaattatgaataatgctacatcaaaaagcaggttacaaattcatgtttactatataactatttaaagcaaatgaaacactaatagtcaaagtttaggatgaaaactaaatctaaaaggaaatataacaaaatgccaattatgcttggtttggggcattgatgacccttcttcccacttttctatattttccaagatttctttattgaatatgttttactataaatattttctaaactcatattttcactattaaaatttttttatttttccaaactttaaggcatatgctctttccacattcctcaacattatttgcaaacatcatgaaatgacacttccatcaacattcaatgaggaaagtagtgatatagatgagccaaaaagagttttatataaacttatacaatctaaactcttgctcttcctttctgactcctgagggtgagtgtgatggactagaagaggtagccttaaaataagtgagcagctagggaacatgctcaatgggcaagagaaaatgaccactgaccagtcaatacctgtgtcagggggagttaccagtacctatatttatttttaaagtaattaaaaagtagaacacttacaaattttccacctatacatgccatgtcttcctcggggacagtagccacatcttatatatttcccaccatgcataggacccagcacacagtgaagccagtaggcactcagtgttgaatgctcataccaggttttctgcttcctgtagttaccctgctgagcactgcttccatcacaggtgcactgggcctcaacacttctgccatttccccatttgtctcctccatggacactgtcaacaatggtctgtcaacacctgctctgtgccaaagccagggagtaggctggggggatacggaagagaatatctttctccttgatgcctgctgtgccaacagccccctttaagccttgttcacagcctttgctgaaacaagcatcttgaaagcaagccatgttatacaccgcatgaccttcatgctctgggcccagctgactgaactggggcaggccccagagtcatgggcagcctattgtcttgctaatggcctctgacttagcctggagtaaaacactgtccaaacaagactggtggttattcaagcataagaatttgaactaggaagccaagaatgaagcaaccggaccattaccatcaaaaaatgattaaaggatgaagaaggaagccaacattcagagagtatctggttcatgttaataatggtatcatattaaaaggaagatacatgaacttctactccaaaagctcctaaaactgcctttgcccacaatgaacagtgtaccctaggcctggtttctgttcttggattcctagatagtctttcttctttgtcactgtgctgatcatttcagtaaacccccgactaaatcagtgcagctctgtttattgcaactaaaacgatccaaatgaagtctcccttttctagatgttgggttggagggatgctaagacaaagatgcttaggctccagagttttacagagcttcattcaataacactctactttccaaagaacttaaatatgaggtctgaaggacttggaccaagaggcaaacccaagctacagacaccatgttgtactcagagtgacctctcccctctgacagcccaggatttctctatcaagtccataagctagtcatatctaggaccatcttgttaaaaattctctcaaagtctcctcagccctcttgtaaacagacttctggaaggtccacttcatcagtttgttatatactttcagactgtctatctcttgtttagattcagcatggcaccgtacgttgaatggactgttaatagatgtttgctgaatgactccaccacagcattggacacatcaggggtacagccaaatgcagcatgatacctctatcaggaaaattaaattttaacacagccaccaaatattctatatttgaagagtatatgctaatcatgcaattttaagtaaaaaaaagctgaatacaaaaaaagctgaatatgtgttttatatcctcgtgaattcaaagtaaaaaggaaaaaaaactcaaaaaccaaatatatgtatgcagtttgagcccaaatttttaattaagtaaccatataattacatgtagacatgtataaaccttgagatatgtaaagaccagaaaaatatttaaaagttaatagttacatcatctgtggtcacaacaccctgaaaatgcctaatattggaaacttaagcaggattgatccaggttattacttggatgggagaccagatgctataggctgaaaaaagaaagcataagtacgcacaagttaatacttaataattatctcctaatgataggactataagttctatctcttttctttacattgttcagtattttcaaatttccctttgaaaatgtgttatgtacttgaattattagaaaaaataaatgtcatttaaaaagca

SEQ ID NO: 4187 - protein, 201 aa, Homo sapiens; identical to SEQ ID NO: 433

SEQ ID NO: 4188 - DNA, 3768 bp, Homo sapiens
gtcttactttgtcacccaggctggagtgcagtggaacgatctcggctcactgcaacctccgtctcccagtaaaccagtatttcacactgagattgtcggctgcgggtatattccaattccccgtctcctcatgaatatgaagtgaagggctctgaccctggaagtggttctaagcagggcaaaatggggtctcggaagtgtggaggctgcctaagttgtttgctgattccgcttgcactttggagtataatcgtgaacatattattgtatttcccgaatgggcaaacttcctatgcatccagcaataaactcaccaactacgtgtggtattttgaaggaatctgtttctcaggcatcatgatgcttatagtaacaacagttcttctggtactggagaataataacaactataaatgttgccagagtgaaaactgcagcaaaaaatatgtgacactgctgtcaattatcttttcttccctcggaattgctttttctggatactgcctggtcatctctgccttgggtcttgtccaagggccatattgccgcacccttgatggctgggagtatgcttttgaaggcactgctggacgtttccttacagattctagcatatggattcagtgcctggaacctgcacatgttgtggagtggaacatcattttattttccattctcataaccctcagtgggcttcaagtgatcatctgcctcatcagagtagtcatgcaactatccaagatactgtgtggaagctattcagtgatcttccagcctggaatcatttgaataaggacaaaatgttttccattatcaagacatggccatctatctaaatattatatcaactgtgtagacttgagggcaatattgaaatgatggtgctttctgcatttggtgtttatttgtaaaaaatttgcagtcctcactgcacatgcaagtataccacccttccatttagtatgttttttaagtaatatgcatcagaaacttcagaaatacttctgccctttgatcaaacaaatccatttccaagaatctgtactagggaagtaaataagaatatgagagaaacctttatgcaaatatgtatattgcaacattatttaatattctggaaaattggaaacaccccaaaattctaaactcagaggaaggattaagtaaagagtggtacatactgtaaatgttttctgatattaaaaaaaaaattaaataaaaaataaagagtactacatggttgtaaaattacagtcattacaaatgatgtttttaaaattatgaataatgctacatcaaaaagcaggttacaaattcatgtttactatataactatttaaagcaaatgaaacactaatagtcaaagtttaggatgaaaactaaatctaaaaggaaatataacaaaatgccaattatgcttggtttggggcattgatgacccttcttcccacttttctatattttccaagatttctttattgaatatgttttactataaatattttctaaactcatattttcactattaaaatttttttatttttccaaactttaaggcatatgctctttccacattcctcaacattatttgcaaacatcatgaaatgacacttccatcaacattcaatgaggaaagtagtgatatagatgagccaaaaagagttttatataaacttatacaatctaaactcttgctcttcctttctgactcctgagggtgagtgtgatggactagaagaggtagccttaaaataagtgagcagctagggaacatgctcaatgggcaagagaaaatgaccactgaccagtcaatacctgtgtcagggggagttaccagtacctatatttatttttaaagtaattaaaaagtagaacacttacaaattttccacctatacatgccatgtcttcctcggggacagtagccacatcttatatatttcccaccatgcataggacccagcacacagtgaagccagtaggcactcagtgttgaatgctcataccaggttttctgcttcctgtagttaccctgctgagcactgcttccatcacaggtgcactgggcctcaacacttctgccatttccccatttgtctcctccatggacactgtcaacaatggtctgtcaacacctgctctgtgccaaagccagggagtaggctggggggatacggaagagaatatctttctccttgatgcctgctgtgccaacagccccctttaagccttgttcacagcctttgctgaaacaagcatcttgaaagcaagccatgttatacaccgcatgaccttcatgctctgggcccagctgactgaactggggcaggccccagagtcatgggcagcctattgtcttgctaatggcctctgacttagcctggagtaaaacactgtccaaacaagactggtggttattcaagcataagaatttgaactaggaagccaagaatgaagcaaccggaccattaccatcaaaaaatgattaaaggatgaagaaggaagccaacattcagagagtatctggttcatgttaataatggtatcatattaaaaggaagatacatgaacttctactccaaaagctcctaaaactgcctttgcccacaatgaacagtgtaccctaggcctggtttctgttcttggattcctagatagtctttcttctttgtcactgtgctgatcatttcagtaaacccccgactaaatcagtgcagctctgtttattgcaactaaaacgatccaaatgaagtctcccttttctagatgttgggttggagggatgctaagacaaagatgcttaggctccagagttttacagagcttcattcaataacactctactttccaaagaacttaaatatgaggtctgaaggacttggaccaagaggcaaacccaagctacagacaccatgttgtactcagagtgacctctcccctctgacagcccaggatttctctatcaagtccataagctagtcatatctaggaccatcttgttaaaaattctctcaaagtctcctcagccctcttgtaaacagacttctggaaggtccacttcatcagtttgttatatactttcagactgtctatctcttgtttagattcagcatggcaccgtacgttgaatggactgttaatagatgtttgctgaatgactccaccacagcattggacacatcaggggtacagccaaatgcagcatgatacctctatcaggaaaattaaattttaacacagccaccaaatattctatatttgaagagtatatgctaatcatgcaattttaagtaaaaaaaagctgaatacaaaaaaagctgaatatgtgttttatatcctcgtgaattcaaagtaaaaaggaaaaaaaactcaaaaaccaaatatatgtatgcagtttgagcccaaatttttaattaagtaaccatataattacatgtagacatgtataaaccttgagatatgtaaagaccagaaaaatatttaaaagttaatagttacatcatctgtggtcacaacaccctgaaaatgcctaatattggaaacttaagcaggattgatccaggttattacttggatgggagaccagatgctataggctgaaaaaagaaagcataagtacgcacaagttaatacttaataattatctcctaatgataggactataagttctatctcttttctttacattgttcagtattttcaaatttccctttgaaaatgtgttatgtacttgaattattagaaaaaataaatgtcatttaaaaagca

SEQ ID NO: 4189 - protein, 201 aa, Homo sapiens; identical to SEQ ID NO: 433

SEQ ID NO: 4190 - DNA, 1372 bp, Homo sapiens
tttaaaaagcagtgaaaaacaccgcattcctttggcacaggatgaagaccagctcagctcttcagttgttgatcattgtctattgttctccaaacagtaaaccagtatttcacactgagattgtcggctgcgggtatattccaattccccgtctcctcatgaatatgaagtgaagggctctgaccctggaagtggtaggtaatctcaaaaaaaaaaaaaaaaaagagagagagagagaaaaaaaaggtcaggtaggaagaagaaaaatagactttctgtgactgtatactcttgaaatctcccgcaggttctaagcagggcaaaatggggtctcggaagtgtggaggctgcctaagttgtttgctgattccgcttgcactttggagtataatcgtgaacatattattgtatttcccgaatgggcaaacttcctatgcatccagcaataaactcaccaactacgtgtggtattttgaaggaatctgtttctcaggcatcatgatgcttatagtaacaacagttcttctggtactggagaataataacaactataaatgttgccagagtgaaaactgcagcaaaaaatatgtgacactgctgtcaattatcttttcttccctcggaattgctttttctggatactgcctggtcatctctgccttgggtcttgtccaagggccatattgccgcacccttgatggctgggagtatgcttttgaaggcactgctggacgtttccttacagattctagcatatggattcagtgcctggaacctgcacatgttgtggagtggaacatcattttattttccattctcataaccctcagtgggcttcaagtgatcatctgcctcatcagagtagtcatgcaactatccaagatactgtgtggaagctattcagtgatcttccagcctggaatcatttgaataaggacaaaatgttttccattatcaagacatggccatctatctaaatattatatcaactgtgtagacttgagggcaatattgaaatgatggtgctttctgcatttggtgtttatttgtaaaaaatttgcagtcctcactgcacatgcaagtataccacccttccatttagtatgttttttaagtaatatgcatcagaaacttcagaaatacttctgccctttgatcaaacaaatccatttccaagaatctgtactagggaagtaaataagaatatgagagaaacctttatgcaaatatgtatattgcaacattatttaatattctggaaaattggaaacaccccaaaattctaaactcagaggaaggattaagtaaagagtggtacatactgtaaatgttttctgatattaaaaaaaaaattaaataaaaaataaagagt

SEQ ID NO: 4191 - protein, 201 aa, Homo sapiens; identical to SEQ ID NO: 433

SEQ ID NO: 4192 - DNA, 1314 bp, Homo sapiens
aacacaaggtcagggttaagccttcggtgctttaatccagaggaaaattacttattttaaaaagcagtgaaaaacaccgcattcctttggcacaggatgaagaccagctcagctcttcagttgttgatcattgtctattgttctccaaacagtaaaccagtatttcacactgagattgtcggctgcgggtatattccaattccccgtctcctcatgaatatgaagtgaagggctctgaccctggaagtggttctaagcagggcaaaatggggtctcggaagtgtggaggctgcctaagttgtttgctgattccgcttgcactttggagtataatcgtgaacatattattgtatttcccgaatgggcaaacttcctatgcatccagcaataaactcaccaactacgtgtggtattttgaaggaatctgtttctcaggcatcatgatgcttatagtaacaacagttcttctggtactggagaataataacaactataaatgttgccagagtgaaaactgcagcaaaaaatatgtgacactgctgtcaattatcttttcttccctcggaattgctttttctggatactgcctggtcatctctgccttgggtcttgtccaagggccatattgccgcacccttgatggctgggagtatgcttttgaaggcactgctggacgtttccttacagattctagcatatggattcagtgcctggaacctgcacatgttgtggagtggaacatcattttattttccattctcataaccctcagtgggcttcaagtgatcatctgcctcatcagagtagtcatgcaactatccaagatactgtgtggaagctattcagtgatcttccagcctggaatcatttgaataaggacaaaatgttttccattatcaagacatggccatctatctaaatattatatcaactgtgtagacttgagggcaatattgaaatgatggtgctttctgcatttggtgtttatttgtaaaaaatttgcagtcctcactgcacatgcaagtataccacccttccatttagtatgttttttaagtaatatgcatcagaaacttcagaaatacttctgccctttgatcaaacaaatccatttccaagaatctgtactagggaagtaaataagaatatgagagaaacctttatgcaaatatgtatattgcaacattatttaatattctggaaaattggaaacaccccaaaattctaaactcagaggaaggattaagtaaagagtggtacatactgtaaatgttttctgatattaaaaaaaaaattaaataaaaaataaagagt

SEQ ID NO: 4193 - protein, 201 aa, Homo sapiens; identical to SEQ ID NO: 433

SEQ ID NO: 4194 - DNA, 1231 bp, Homo sapiens
gtcttactttgtcacccaggctggagtgcagtggaacgatctcggctcactgcaacctccgtctcccagtaaaccagtatttcacactgagattgtcggctgcgggtatattccaattccccgtctcctcatgaatatgaagtgaagggctctgaccctggaagtggttctaagcagggcaaaatggggtctcggaagtgtggaggctgcctaagttgtttgctgattccgcttgcactttggagtataatcgtgaacatattattgtatttcccgaatgggcaaacttcctatgcatccagcaataaactcaccaactacgtgtggtattttgaaggaatctgtttctcaggcatcatgatgcttatagtaacaacagttcttctggtactggagaataataacaactataaatgttgccagagtgaaaactgcagcaaaaaatatgtgacactgctgtcaattatcttttcttccctcggaattgctttttctggatactgcctggtcatctctgccttgggtcttgtccaagggccatattgccgcacccttgatggctgggagtatgcttttgaaggcactgctggacgtttccttacagattctagcatatggattcagtgcctggaacctgcacatgttgtggagtggaacatcattttattttccattctcataaccctcagtgggcttcaagtgatcatctgcctcatcagagtagtcatgcaactatccaagatactgtgtggaagctattcagtgatcttccagcctggaatcatttgaataaggacaaaatgttttccattatcaagacatggccatctatctaaatattatatcaactgtgtagacttgagggcaatattgaaatgatggtgctttctgcatttggtgtttatttgtaaaaaatttgcagtcctcactgcacatgcaagtataccacccttccatttagtatgttttttaagtaatatgcatcagaaacttcagaaatacttctgccctttgatcaaacaaatccatttccaagaatctgtactagggaagtaaataagaatatgagagaaacctttatgcaaatatgtatattgcaacattatttaatattctggaaaattggaaacaccccaaaattctaaactcagaggaaggattaagtaaagagtggtacatactgtaaatgttttctgatattaaaaaaaaaattaaataaaaaataaagagt

SEQ ID NO: 4195 - protein, 201 aa, Homo sapiens; identical to SEQ ID NO: 433

SEQ ID NO: 4196 - DNA, 2723 bp, Homo sapiens
agatccgcctccatcgcagccagaagcaagaagctgtcttcccgcccccgcgtgcctacaatcagccccagtctccctgggaaaccgacgagcgcacctgagctgggttctgagctccagcgttttggggctagaagttgcggactagtagctgaggcggcacgggagtgtaggcgcgcggggtcgttgccgggggcacagagtgagaacaagcaagggagccctgctgaattgcagcttaggaagccctgaatcctggagatatgttcctgacccttccttcttgaagggacagctgtgtaaccattcaaccatctggccatcagtttccacatctgtgaaatcaacttctgcctcatggagccgtgagttcccaagcagtgaaggcagtgaggggctgtggtgtgatccaggaggctgagaattatgcagtgggtgctgtcaccttgaagacatcagcgtgatcaggcagatcatcatggtactgcatttcctggacacgatcttaattttcttaatacctccaccgacatttcaaatagcgtctctaatgccccagagacttttatgcccctaaggtagttttctttcttttgtgaagcagaagaagggaaattgttaaagggaatattttaactaaatttatttccataaaactatctttgtctttatatctcatggaaagtgttaggtagcctcaggattatatctccgttggaaaactgtagatgtaaaccttcttgctatctacatacttacatatttttctgttgttatttacttatgaatagcattttgattatagcagaaataaaatacattaaatgactaagctcagaaataagaaaaaaaggtcaatggtgatcatttatttggaaactatgatattttaatgatattaatggtgtaattgacatttagttaaacatatttcatcgtaagtagagcactttaactcttacggtccacttaaaatgtaatcatacgtttatgtatttctagttaatgtatcaaactcaactgagtaatcaatgtacatcatttattttgctcctaagttaatacactaagttatgctttaaaattactaatttgctgcaatatccaatactctcttttaagtcttacgtctgcagaaaaggatataaacatttcatgacaccaaacccaagtatttttgatgcccttggcagtgtcagttgaacagacagtgtcatttaatgtttgagacagcatctgaattccttttattcttaaaattctattttaaaatgcagtttttggaaagttaatgtgaatagaaaaatttctaacattttatgtgcatgtgttttgtttgttacaggcttagcatctcaaatctgaaaattcgaaatctgaaatgtttctaaaattcaactcttttgagtgctgatatgactttcaaaggaaaagctcattggagcatttcagattttggatttttggatttgggatgtttaaccagggtaaaatatagaatgcaaatattccaaaatctgaataaaattgaaatctgaaatgcttatggttccaagcattttggataagggataattaagctgtataacttataaaactgaatataacaaaatttcccaacatgtggaaaatgatgtcttttttcaaaaatgtcaatagcagatacatggtacagtaagttaggggaaaaaatgaggtttcatatcttctagtttcctaattaaaaggagcccattctgggttggaagaaagtgtcagtaagatcatttctcctatttgaaaatcatacaaagcttgtcagagtgactcaggccaggagtgtagctgggcgtgtagctaaatgatatctccccacatctatataataagctgttacctgctttaaaaggaaaagctctcagcatgactctaatgttgcatttctggaatacagcttgaaaagctcttctcagggttgaacagagcatgaaggtaatggttattatctactcacattaaaaaaaaaaaaaaagaaagaaaccaccacagaaaactacttactgtctttaggctctactttcaaaagtgccctttatgaacgcttttacactgttgatgggagtgtaaattagttcaaccattgtggaagacagtgtggtgattcctcaaggatctagaatcagaaataccatttgacccagcaatcccattactgggtatatacccaaaggattataaatcattctattataaagacacatgcacacgtatgtttattgcagcactgttcacaatagcaaagacttggaaccaacccaaatgcccatcaatgatagactggataaagaaattgtggcacatacacaccatggaatactatgcagccataataaaagatgagttcatgtcctttgcaaggacatggacaaagctggaaaccatcattctcagcaaacaagaacagaaaatcaaacactgcatgttctcagtctaagtgggagctgaacaatgagaaaacatggacacagagaggggaacatcacacactgggcctgttggggggtagggggctaggggagggatagcattaggagaaatacctaatgtaaatgacaggttaatgggtgcagcaaaccaccatggcatgtgtatacctatgtaacaaacctgcatgttctgcacatgtatcccagaacttaaagtataaataaataaatgaataaataaataaattttaaaaagtg

SEQ ID NO: 4197 - protein, 32 aa, Homo sapiens
MVLHFLDTILIFLIPPPTFQIASLMPQRLLCP

SEQ ID NO: 4198 - DNA, 838 bp, Homo sapiens
cgcagccagaagcaagaagctgtcttcccgcccccgcgtgcctacaatcagccccagtctccctgggaaaccgacgagcgcacctgagctgggttctgagctccagcgttttggggctagaagttgcggactagtagctgaggcggcacgggagtgtaggcgcgcggggtcgttgccgggggcacagagtgagaacaagcaagggagccctgctgaattgcagcttaggaagccctgaatcctggagacggagttttgctcttgttgcccaggctggagtccaatgatgcgatctcggctcaccgcaacctccgccttcagggttcaagcaattctcctgcctcagcctcccgagtagctgggattacaggcattgaaggcagtgaggggctgtggtgtgatccaggaggctgagaattatgcagtgggtgctgtcaccttgaagacatcagcgtgatcaggcagatcatcatggtactgcatttcctggacacgatcttaattttcttaatacctccaccgacatttcaaatagcgtctctaatgccccagagacttttatgcccctaaggtagttttctttcttttgtgaagcagaagaagggaaattgttaaagggaatattttaactaaatttatttccataaaactatctttgtctttatatctcatggaaagtgttaggtagcctcaggattatatctccgttggaaaactgtagatgtaaaccttcttgctatctacatacttacatatttttctgttgttatttacttatgaatagcattttgattatagcagaaataaaatacattaaatgactaagctcagaaataag

SEQ ID NO: 4199 - protein, 32 aa, Homo sapiens; identical to SEQ ID NO: 4197

SEQ ID NO: 4200 - DNA, 975 bp, Homo sapiens
cgcagccagaagcaagaagctgtcttcccgcccccgcgtgcctacaatcagccccagtctccctgggaaaccgacgagcgcacctgagctgggttctgagctccagcgttttggggctagaagttgcggactagtagctgaggcggcacgggagtgtaggcgcgcggggtcgttgccgggggcacagagtgagaacaagcaagggagccctgctgaattgcagcttaggaagccctgaatcctggagacggagttttgctcttgttgcccaggctggagtccaatgatgcgatctcggctcaccgcaacctccgccttcagggttcaagcaattctcctgcctcagcctcccgagtagctgggattacagatatgttcctgacccttccttcttgaagggacagctgtgtaaccattcaaccatctggccatcagtttccacatctgtgaaatcaacttctgcctcatggagccgtgagttcccaaggaaatgctgagttaatgtgacccagcttgttcaaggagcagccaggataccagccagccgcagaggcctgaggaaagcaaaaggaaaccaacttgaggccacatgactgaatgacagtccagggtacttggcactgatgcagtagtgataaggaattctttaagaatttagggcaggggtgtgagggttaatgtcaagaaggttagtctgatcttagcaaacaaaccaaggtgaatcggattgacagaaattccagtgagaagtttatgatacaactgcaacccagtgagtgtgatgaccatgagaatggagtggagagtacaaaaataacagcatttagttgcagattagaaacagatgtgaagggcgaaaaagcaccatagggaaggacataagaggtccctggagtcagacttgggagatgtgagttttatcagttttgccattaggtagttgtgtgcacccttgggcatatagcacttttttgg

SEQ ID NO: 4201 - protein, 38 aa, Homo sapiens [sequence omitted]

SEQ ID NO: 4202 - DNA, 3979 bp, Homo sapiens
agaactctgcgctactgcccacgcatctcacaaagtctactacgccgcgcgttctcggtttcaacgcacctccaggattcagggcttcctaagctgcaattcagcagggctcccttgcttgttctcactctgtgcccccggcaacgaccccgcgcgcctacactcccgtgccgcctcagctactagtccgcaacttctagccccaaaacgctggagctcagaacccagctcaggcaagactaactcggtgttgctcctcccggcgctgacttcgaggcccggctatggacggcgagagcgaggtggatttttctagcaacagcataacccctttgtggcggaggcggtcgattcctcagccccaccaggttctgggccggagcaagccgaggccccagtcctaccagagccccaacgggttactaattacggatttcccggtggaggacggagggacgctcctcgcagcgcagattcccgcccaggtgcccaccgcctcggacagcaggacggtacataggagccccctgcttctgggcgcccagcggagagcggtggccaatggtgggacggcatccccggagtacagggctgcctctcctcgacttcgacggcccaagtcacccaagctccccaaagcggtgcctggcggctccccgaaatccccagcaaatggcgcggtgaccttgcctgcgccgccgccgccgccggttctgcgccccccgcggactcctaacgcgcccgccccctgcacccccgaggaggaccttactgggttgactgccagcccggtgccttcgcccactgcaaatggccttgccgctaataacgactctcctgggtcaggttcgcagtccggccggaaggcaaaggaccccgaacgggggctctttcctgggccccagaaaagttcttcggaacaaaaactccccctccaaaggctgccctcccaggagaacgagctcctcgagaatccttccgtggttttgagtacaaacagccccgccgccctcaaagtggggaagcagcagatcattccgaagagtctggcctcggaaattaaaataagtaaatccaacaatcaaaatgtggagccccacaagagactcctcaaggtgcgcagcatggtggagggcctaggaggacccctgggtcacgcaggggaggagagtgaggtcgataacgacgtggatagcccagggtctctgcggagaggcttgcggtccacgtcttatcgcagggcagtggtcagtggctttgattttgacagtcctaccagctcgaagaagaagaacagaatgtcccagcctgttctgaaagtggtgatggaagacaaggagaagttttccagtctgggaaggataaagaaaaaaatgctgaaaggacaaggaacatttgatggggaagaaaatgctgtcctgtatcaaaactacaaggaaaaggcccttgacattgattctgatgaagagtcagagcccaaagaacagaagtcagatgaaaaaattgtgattcaccataagccattgagatccacatggagccaactctctgcggtgaaaagaaagggattatctcagacagtaagccaggaggaaagaaagagacaagaggctatctttgaagtcatatcctctgaacattcatatttactcagcttggagatcttgatacgaatgtttaaaaattctaaagaactgagtgatacaatgactaaaaccgagaggcaccatcttttctccaatattacagatgtctgtgaggcaagcaaaaagttctttatagagttggaagcaagacatcagaataatatcttcatagatgacataagtgacattgtggaaaaacacacagcatccacatttgacccatatgtgaaatactgcacaaatgaagtctaccaacaacgaacactacaaaaattgttagctaccaatccatcctttaaggaagtattgtcaaggattgagtcccatgaagactgtaggaacttacccatgatctcttttctcattctccccatgcagagggtgacccgccttcccctgctgatggatactatctgtcaaaaaacacctaaggactctccgaagtatgaagtctgcaaaagagccttgaaggaagttagcaagttggttcgactatgcaatgagggcgcccggaagatggaaaggactgagatgatgtacacaattaactcccagctggaatttaaaattaagccttttcctttagtctcctcttcccggtggttggtaaaaagaggtgaattgacagcctatgttgaagacactgtgcttttctcaagaaggacatccaaacagcaagtctacttctttctctttaacgatgtgctcattatcaccaagaagaagagtgaagaaagttacaacgtcaatgattattccttaagagatcagctattggtggaatcttgtgacaatgaagagcttaattcttctccagggaagaacagctccacaatgctctattcaagacagagctctgccagtcagtcacctctttactctgacagtccttagtaaccacgcgaatgagaaagtggagatgctactaggagctgagacgcagagcgagcgagcccgctggataactgccctgggacacagcagcgggaagccgcctgcagaccgaacctcactgacccaggtggaaatcgttaggtcatttactgctaagcagccagatgaactctccctgcaggtggctgacgtcgtcctcatctatcaacgtgtcagcgatggctggtatgagggggaacgactacgagatggagaaagaggctggtttcctatggaatgtgccaaggagataacatgtcaagctacaattgataagaatgtggagagaatgggacgcttgctaggactggagaccaacgtgtagtctctcagatggtcttttgttactgcaagatttgcacgacacttaccgggctggttggttctgggctagttttattgttaattttgtcacagcctatttaattaaaagaacgaaaacacttgcctttaagcttgccaggttgttctgctctctcatgagaagagcttggatacagtgagtttgcacagctcagtttttacctaaccacacacttgcagacctcctgaggtacacagaatagctgagcagttcacttcagggatcaggtcatctctgctcctcctagtttcaccatgttctggcaataaaaaacacatattatatcctggttttctctatccttgcattactaaggtgactgtctctctttatacatccttgtatggttctcccagtattagcaagattgtatatctgtaaagaatgtccagttttgtaaatatttccctgcctttttttttctttttttacatctgattttaatgcttcgttaacttcaaaaggaactggtagagttcagaaggtgagctgttgtttttctaaacctcttcccaggaaggggacattgacacttgaatttttgtcacctttttcctcattagaaggaaagtagaaagccttactttaggatttttaaaaaaaaatccatctcaccccatattgttcttaaataagtatagactaattaacctaagctacctttaacaacgtagaatttagatgggttcatatatgtgagaaaaacctgaatataggacaggggtcctacttttttccccacctctgtcgcccaggctagagtatagtggtgtgatcttggcccactgcaacctctgcttcctaggttcaagtgattctcctgcctcagcctcccaagtagctgggattgtaagagtatgccaccacgcccagctactttttgtatttttagtagagacagggtttcatcatgttggccaggatggtctcttaactcctgccctcaagtgatccaccagagaggagatcctcggcctccccaagtgctgggattataggcatgagccaccgtgcccagcctactttctaattaatt

SEQ ID NO: 4203 - protein, 751 aa, Homo sapiens
MDGESEVDFSSNSITPLWRRRSIPQPHQVLGRSKPRPQSYQSPNGLLITDFPVEDGGTLLAAQIPAQVPTASDSRTVHRSPLLLGAQRRAVANGGTASPEYRAASPRLRRPKSPKLPKAVPGGSPKSPANGAVTLPAPPPPPVLRPPRTPNAPAPCTPEEDLTGLTASPVPSPTANGLAANNDSPGSGSQSGRKAKDPERGLFPGPQKSSSEQKLPLQRLPSQENELLENPSVVLSTNSPAALKVGKQQIIPKSLASEIKISKSNNQNVEPHKRLLKVRSMVEGLGGPLGHAGEESEVDNDVDSPGSLRRGLRSTSYRRAVVSGFDFDSPTSSKKKNRMSQPVLKVVMEDKEKFSSLGRIKKKMLKGQGTFDGEENAVLYQNYKEKALDIDSDEESEPKEQKSDEKIVIHHKPLRSTWSQLSAVKRKGLSQTVSQEERKRQEAIFEVISSEHSYLLSLEILIRMFKNSKELSDTMTKTERHHLFSNITDVCEASKKFFIELEARHQNNIFIDDISDIVEKHTASTFDPYVKYCTNEVYQQRTLQKLLATNPSFKEVLSRIESHEDCRNLPMISFLILPMQRVTRLPLLMDTICQKTPKDSPKYEVCKRALKEVSKLVRLCNEGARKMERTEMMYTINSQLEFKIKPFPLVSSSRWLVKRGELTAYVEDTVLFSRRTSKQQVYFFLFNDVLIITKKKSEESYNVNDYSLRDQLLVESCDNEELNSSPGKNSSTMLYSRQSSASQSPLYSDSP

SEQ ID NO: 4204 - DNA, 5258 bp, Homo sapiens
agaactctgcgctactgcccacgcatctcacaaagtctactacgccgcgcgttctcggtttcaacgcacctccaggattcagggcttcctaagctgcaattcagcagggctcccttgcttgttctcactctgtgcccccggcaacgaccccgcgcgcctacactcccgtgccgcctcagctactagtccgcaacttctagccccaaaacgctggagctcagaacccagctcaggcaagactaactcggtgttgctcctcccggcgctgacttcgaggcccggctatggacggcgagagcgaggtggatttttctagcaacagcataacccctttgtggcggaggcggtcgattcctcagccccaccaggttctgggccggagcaagccgaggccccagtcctaccagagccccaacgggttactaattacggatttcccggtggaggacggagggacgctcctcgcagcgcagattcccgcccaggtgcccaccgcctcggacagcaggacggtacataggagccccctgcttctgggcgcccagcggagagcggtggccaatggtgggacggcatccccggagtacagggctgcctctcctcgacttcgacggcccaagtcacccaagctccccaaagcggtgcctggcggctccccgaaatccccagcaaatggcgcggtgaccttgcctgcgccgccgccgccgccggttctgcgccccccgcggactcctaacgcgcccgccccctgcacccccgaggaggaccttactgggttgactgccagcccggtgccttcgcccactgcaaatggccttgccgctaataacgactctcctgggtcaggttcgcagtccggccggaaggcaaaggaccccgaacgggggctctttcctgggccccagaaaagttcttcggaacaaaaactccccctccaaaggctgccctcccaggagaacgagctcctcgagaatccttccgtggttttgagtacaaacagccccgccgccctcaaagtggggaagcagcagatcattccgaagagtctggcctcggaaattaaaataagtaaatccaacaatcaaaatgtggagccccacaagagactcctcaaggtgcgcagcatggtggagggcctaggaggacccctgggtcacgcaggggaggagagtgaggtcgataacgacgtggatagcccagggtctctgcggagaggcttgcggtccacgtcttatcgcagggcagtggtcagtggctttgattttgacagtcctaccagctcgaagaagaagaacagaatgtcccagcctgttctgaaagtggtgatggaagacaaggagaagttttccagtctgggaaggataaagaaaaaaatgctgaaaggacaaggaacatttgatggggaagaaaatgctgtcctgtatcaaaactacaaggaaaaggcccttgacattgattctgatgaagagtcagagcccaaagaacagaagtcagatgaaaaaattgtgattcaccataagccattgagatccacatggagccaactctctgcggtgaaaagaaagggattatctcagacagtaagccaggaggaaagaaagagacaagaggctatctttgaagtcatatcctctgaacattcatatttactcagcttggagatcttgatacgaatgtttaaaaattctaaagaactgagtgatacaatgactaaaaccgagaggcaccatcttttctccaatattacagatgtctgtgaggcaagcaaaaagttctttatagagttggaagcaagacatcagaataatatcttcatagatgacataagtgacattgtggaaaaacacacagcatccacatttgacccatatgtgaaatactgcacaaatgaagtctaccaacaacgaacactacaaaaattgttagctaccaatccatcctttaaggaagtattgtcaaggattgagtcccatgaagactgtaggaacttacccatgatctcttttctcattctccccatgcagagggtgacccgccttcccctgctgatggatactatctgtcaaaaaacacctaaggactctccgaagtatgaagtctgcaaaagagccttgaaggaagttagcaagttggttcgactatgcaatgagggcgcccggaagatggaaaggactgagatgatgtacacaattaactcccagctggaatttaaaattaagccttttcctttagtctcctcttcccggtggttggtaaaaagaggtgaattgacagcctatgttgaagacactgtgcttttctcaagaaggacatccaaacagcaagtctacttctttctctttaacgatgtgctcattatcaccaagaagaagagtgaagaaagttacaacgtcaatgattattccttaagagatcagctattggtggaatcttgtgacaatgaagagcttaattcttctccagggaagaacagctccacaatgctctattcaagacagagctctgccagtcagtcacctctttactctgacagtccttagtaaccacgcgaatgagaaagtggagatgctactaggagctgagacgcagagcgagcgagcccgctggataactgccctgggacacagcagcgggaagccgcctgcagaccgaacctcactgacccaggtggaaatcgttaggtcatttactgctaagcagccagatgaactctccctgcaggtggctgacgtcgtcctcatctatcaacgtgtcagcgatggctggtatgagggggaacgactacgagatggagaaagaggctggtttcctatggaatgtgccaaggagataacatgtcaagctacaattgataagaatgtggagagaatgggacgcttgctaggactggagaccaacgtgtagtctctcagatggtcttttgttactgcaagatttgcacgacacttaccgggctggttggttctgggctagttttattgttaattttgtcacagcctatttaattaaaagaacgaaaacacttgcctttaagcttgccaggttgttctgctctctcatgagaagagcttggatacagtgagtttgcacagctcagtttttacctaaccacacacttgcagacctcctgaggtacacagaatagctgagcagttcacttcagggatcaggtcatctctgctcctcctagtttcaccatgttctggcaataaaaaacacatattatatcctggttttctctatccttgcattactaaggtgactgtctctctttatacatccttgtatggttctcccagtattagcaagattgtatatctgtaaagaatgtccagttttgtaaatatttccctgcctttttttttctttttttacatctgattttaatgcttcgttaacttcaaaaggaactggtagagttcagaaggtgagctgttgtttttctaaacctcttcccaggaaggggacattgacacttgaatttttgtcacctttttcctcattagaaggaaagtagaaagccttactttaggatttttaaaaaaaaatccatctcaccccatattgttcttaaataagtatagactaattaacctaagctacctttaacaacgtagaatttagatgggttcatatatgtgagaaaaacctgaatataggacaggggtcctacttttttccccacctctgtcgcccaggctagagtatagtggtgtgatcttggcccactgcaacctctgcttcctaggttcaagtgattctcctgcctcagcctcccaagtagctgggattgtaagagtatgccaccacgcccagctactttttgtatttttagtagagacagggtttcatcatgttggccaggatggtctcttaactcctgccctcaagtgatccaccagagaggagatcctcggcctccccaagtgctgggattataggcatgagccaccgtgcccagcctactttctaattaattaaaaaaaaaaaaaaaaaaaaaaaaaaaccttcccaaatgagctgataaaaaactgacgtgaggctgctttgccttcaataatacctagttttcagctgttccaactcgtttccaaatagaaattagctggaacacactacagtaatctcaaggaagggaaaattaggccttaaaagataccaagaagtcagcatggtacccaattgaaaccttttgaccttagtgggaattcattctatttgcactaaaagccttaacttgctgtattcagagtccctcttaactgtgagtttctatagaactttactttttccactagtgcacagagagagaaaggttatcttaatagtcggtttcatggagatgaaggatgggagattaagaggggggaaatgatttttactggcagctatattccctctctgttctatttgctttaacaaagggataaaacctggcaaagtgtacattattggaggactcaaatctgtatgtgacatgtcccaactactgtccgctaactagttatccaaattgtaaagctacagaagcccagttgaggggtaagtgtgcctggctcacacagcctgcaccctgtcacctcggcaatgagccagtgtggggcactggggacttctaacccttggattgctctttttgacctgtgcataccttctaattgtaaaatatatttcagaccgtgagtaccttgagatctgagcaactgtgttaatgaagtaatagcaatggtccacagtgaaagatgtgttggggtttgcaaaacaagcattccgtcacctctttaataatgtcacagactttttaaaagagaggctatcaagttgtaatataatctgtcatgttttatttaggaaggaaggtaaatttgtgcttgcacggggatcattttgtattatttttgctaatacccagttgaagctaaaaagcaactatttgaatcctgtgaattaatttataagaatgttaaacagctttggaaatacatgcatcttatgaatcatagccttatttagcaagatcaatgttaaagtgttgttatatggcaagtatttaacacattcacagtgtttgtttgatttcaactgtgaattgtcttaagttttttcaaacctagttgtttctatggacacctgctctgaattgtacattgacttcattactaaagaacaaaaatgttcatttttgtcccagtaaattgagactgcttgtacactttcagaaaaatatgtgaatttataaagattttgtagatacttgt

SEQ ID NO: 4205 - protein, 751 aa, Homo sapiens; identical to SEQ ID NO: 4203

SEQ ID NO: 4206 - DNA, 3906 bp, Homo sapiens
aagtgtgggggcgtagtcaggcgtgggggcgggccggcgccggcgccgcggtcggcggcagcgctctcctaagctctcgcggctgcgcttcggtcccggacccgggccacccacggggtagtgggtgctcctcggccccggacattgcaagccccagaaggcaagactaactcggtgttgctcctcccggcgctgacttcgaggcccggctatggacggcgagagcgaggtggatttttctagcaacagcataacccctttgtggcggaggcggtcgattcctcagccccaccaggttctgggccggagcaagccgaggccccagtcctaccagagccccaacgggttactaattacggatttcccggtggaggacggagggacgctcctcgcagcgcagattcccgcccaggtgcccaccgcctcggacagcaggacggtacataggagccccctgcttctgggcgcccagcggagagcggtggccaatggtgggacggcatccccggagtacagggctgcctctcctcgacttcgacggcccaagtcacccaagctccccaaagcggtgcctggcggctccccgaaatccccagcaaatggcgcggtgaccttgcctgcgccgccgccgccgccggttctgcgccccccgcggactcctaacgcgcccgccccctgcacccccgaggaggaccttactgggttgactgccagcccggtgccttcgcccactgcaaatggccttgccgctaataacgactctcctgggtcaggttcgcagtccggccggaaggcaaaggaccccgaacgggggctctttcctgggccccagaaaagttcttcggaacaaaaactccccctccaaaggctgccctcccaggagaacgagctcctcgagaatccttccgtggttttgagtacaaacagccccgccgccctcaaagtggggaagcagcagatcattccgaagagtctggcctcggaaattaaaataagtaaatccaacaatcaaaatgtggagccccacaagagactcctcaaggtgcgcagcatggtggagggcctaggaggacccctgggtcacgcaggggaggagagtgaggtcgataacgacgtggatagcccagggtctctgcggagaggcttgcggtccacgtcttatcgcagggcagtggtcagtggctttgattttgacagtcctaccagctcgaagaagaagaacagaatgtcccagcctgttctgaaagtggtgatggaagacaaggagaagttttccagtctgggaaggataaagaaaaaaatgctgaaaggacaaggaacatttgatggggaagaaaatgctgtcctgtatcaaaactacaaggaaaaggcccttgacattgattctgatgaagagtcagagcccaaagaacagaagtcagatgaaaaaattgtgattcaccataagccattgagatccacatggagccaactctctgcggtgaaaagaaagggattatctcagacagtaagccaggaggaaagaaagagacaagaggctatctttgaagtcatatcctctgaacattcatatttactcagcttggagatcttgatacgaatgtttaaaaattctaaagaactgagtgatacaatgactaaaaccgagaggcaccatcttttctccaatattacagatgtctgtgaggcaagcaaaaagttctttatagagttggaagcaagacatcagaataatatcttcatagatgacataagtgacattgtggaaaaacacacagcatccacatttgacccatatgtgaaatactgcacaaatgaagtctaccaacaacgaacactacaaaaattgttagctaccaatccatcctttaaggaagtattgtcaaggattgagtcccatgaagactgtaggaacttacccatgatctcttttctcattctccccatgcagagggtgacccgccttcccctgctgatggatactatctgtcaaaaaacacctaaggactctccgaagtatgaagtctgcaaaagagccttgaaggaagttagcaagttggttcgactatgcaatgagggcgcccggaagatggaaaggactgagatgatgtacacaattaactcccagctggaatttaaaattaagccttttcctttagtctcctcttcccggtggttggtaaaaagaggtgaattgacagcctatgttgaagacactgtgcttttctcaagaaggacatccaaacagcaagtctacttctttctctttaacgatgtgctcattatcaccaagaagaagagtgaagaaagttacaacgtcaatgattattccttaagagatcagctattggtggaatcttgtgacaatgaagagcttaattcttctccagggaagaacagctccacaatgctctattcaagacagagctctgccagtcagtcacctctttactctgacagtccttagtaaccacgcgaatgagaaagtggagatgctactaggagctgagacgcagagcgagcgagcccgctggataactgccctgggacacagcagcgggaagccgcctgcagaccgaacctcactgacccaggtggaaatcgttaggtcatttactgctaagcagccagatgaactctccctgcaggtggctgacgtcgtcctcatctatcaacgtgtcagcgatggctggtatgagggggaacgactacgagatggagaaagaggctggtttcctatggaatgtgccaaggagataacatgtcaagctacaattgataagaatgtggagagaatgggacgcttgctaggactggagaccaacgtgtagtctctcagatggtcttttgttactgcaagatttgcacgacacttaccgggctggttggttctgggctagttttattgttaattttgtcacagcctatttaattaaaagaacgaaaacacttgcctttaagcttgccaggttgttctgctctctcatgagaagagcttggatacagtgagtttgcacagctcagtttttacctaaccacacacttgcagacctcctgaggtacacagaatagctgagcagttcacttcagggatcaggtcatctctgctcctcctagtttcaccatgttctggcaataaaaaacacatattatatcctggttttctctatccttgcattactaaggtgactgtctctctttatacatccttgtatggttctcccagtattagcaagattgtatatctgtaaagaatgtccagttttgtaaatatttccctgcctttttttttctttttttacatctgattttaatgcttcgttaacttcaaaaggaactggtagagttcagaaggtgagctgttgtttttctaaacctcttcccaggaaggggacattgacacttgaatttttgtcacctttttcctcattagaaggaaagtagaaagccttactttaggatttttaaaaaaaaatccatctcaccccatattgttcttaaataagtatagactaattaacctaagctacctttaacaacgtagaatttagatgggttcatatatgtgagaaaaacctgaatataggacaggggtcctacttttttccccacctctgtcgcccaggctagagtatagtggtgtgatcttggcccactgcaacctctgcttcctaggttcaagtgattctcctgcctcagcctcccaagtagctgggattgtaagagtatgccaccacgcccagctactttttgtatttttagtagagacagggtttcatcatgttggccaggatggtctcttaactcctgccctcaagtgatccaccagagaggagatcctcggcctccccaagtgctgggattataggcatgagccaccgtgcccagcctactttctaattaatt

SEQ ID NO: 4207 - protein, 751 aa, Homo sapiens; identical to SEQ ID NO: 4203

SEQ ID NO: 4208 - DNA, 5185 bp, Homo sapiens
aagtgtgggggcgtagtcaggcgtgggggcgggccggcgccggcgccgcggtcggcggcagcgctctcctaagctctcgcggctgcgcttcggtcccggacccgggccacccacggggtagtgggtgctcctcggccccggacattgcaagccccagaaggcaagactaactcggtgttgctcctcccggcgctgacttcgaggcccggctatggacggcgagagcgaggtggatttttctagcaacagcataacccctttgtggcggaggcggtcgattcctcagccccaccaggttctgggccggagcaagccgaggccccagtcctaccagagccccaacgggttactaattacggatttcccggtggaggacggagggacgctcctcgcagcgcagattcccgcccaggtgcccaccgcctcggacagcaggacggtacataggagccccctgcttctgggcgcccagcggagagcggtggccaatggtgggacggcatccccggagtacagggctgcctctcctcgacttcgacggcccaagtcacccaagctccccaaagcggtgcctggcggctccccgaaatccccagcaaatggcgcggtgaccttgcctgcgccgccgccgccgccggttctgcgccccccgcggactcctaacgcgcccgccccctgcacccccgaggaggaccttactgggttgactgccagcccggtgccttcgcccactgcaaatggccttgccgctaataacgactctcctgggtcaggttcgcagtccggccggaaggcaaaggaccccgaacgggggctctttcctgggccccagaaaagttcttcggaacaaaaactccccctccaaaggctgccctcccaggagaacgagctcctcgagaatccttccgtggttttgagtacaaacagccccgccgccctcaaagtggggaagcagcagatcattccgaagagtctggcctcggaaattaaaataagtaaatccaacaatcaaaatgtggagccccacaagagactcctcaaggtgcgcagcatggtggagggcctaggaggacccctgggtcacgcaggggaggagagtgaggtcgataacgacgtggatagcccagggtctctgcggagaggcttgcggtccacgtcttatcgcagggcagtggtcagtggctttgattttgacagtcctaccagctcgaagaagaagaacagaatgtcccagcctgttctgaaagtggtgatggaagacaaggagaagttttccagtctgggaaggataaagaaaaaaatgctgaaaggacaaggaacatttgatggggaagaaaatgctgtcctgtatcaaaactacaaggaaaaggcccttgacattgattctgatgaagagtcagagcccaaagaacagaagtcagatgaaaaaattgtgattcaccataagccattgagatccacatggagccaactctctgcggtgaaaagaaagggattatctcagacagtaagccaggaggaaagaaagagacaagaggctatctttgaagtcatatcctctgaacattcatatttactcagcttggagatcttgatacgaatgtttaaaaattctaaagaactgagtgatacaatgactaaaaccgagaggcaccatcttttctccaatattacagatgtctgtgaggcaagcaaaaagttctttatagagttggaagcaagacatcagaataatatcttcatagatgacataagtgacattgtggaaaaacacacagcatccacatttgacccatatgtgaaatactgcacaaatgaagtctaccaacaacgaacactacaaaaattgttagctaccaatccatcctttaaggaagtattgtcaaggattgagtcccatgaagactgtaggaacttacccatgatctcttttctcattctccccatgcagagggtgacccgccttcccctgctgatggatactatctgtcaaaaaacacctaaggactctccgaagtatgaagtctgcaaaagagccttgaaggaagttagcaagttggttcgactatgcaatgagggcgcccggaagatggaaaggactgagatgatgtacacaattaactcccagctggaatttaaaattaagccttttcctttagtctcctcttcccggtggttggtaaaaagaggtgaattgacagcctatgttgaagacactgtgcttttctcaagaaggacatccaaacagcaagtctacttctttctctttaacgatgtgctcattatcaccaagaagaagagtgaagaaagttacaacgtcaatgattattccttaagagatcagctattggtggaatcttgtgacaatgaagagcttaattcttctccagggaagaacagctccacaatgctctattcaagacagagctctgccagtcagtcacctctttactctgacagtccttagtaaccacgcgaatgagaaagtggagatgctactaggagctgagacgcagagcgagcgagcccgctggataactgccctgggacacagcagcgggaagccgcctgcagaccgaacctcactgacccaggtggaaatcgttaggtcatttactgctaagcagccagatgaactctccctgcaggtggctgacgtcgtcctcatctatcaacgtgtcagcgatggctggtatgagggggaacgactacgagatggagaaagaggctggtttcctatggaatgtgccaaggagataacatgtcaagctacaattgataagaatgtggagagaatgggacgcttgctaggactggagaccaacgtgtagtctctcagatggtcttttgttactgcaagatttgcacgacacttaccgggctggttggttctgggctagttttattgttaattttgtcacagcctatttaattaaaagaacgaaaacacttgcctttaagcttgccaggttgttctgctctctcatgagaagagcttggatacagtgagtttgcacagctcagtttttacctaaccacacacttgcagacctcctgaggtacacagaatagctgagcagttcacttcagggatcaggtcatctctgctcctcctagtttcaccatgttctggcaataaaaaacacatattatatcctggttttctctatccttgcattactaaggtgactgtctctctttatacatccttgtatggttctcccagtattagcaagattgtatatctgtaaagaatgtccagttttgtaaatatttccctgcctttttttttctttttttacatctgattttaatgcttcgttaacttcaaaaggaactggtagagttcagaaggtgagctgttgtttttctaaacctcttcccaggaaggggacattgacacttgaatttttgtcacctttttcctcattagaaggaaagtagaaagccttactttaggatttttaaaaaaaaatccatctcaccccatattgttcttaaataagtatagactaattaacctaagctacctttaacaacgtagaatttagatgggttcatatatgtgagaaaaacctgaatataggacaggggtcctacttttttccccacctctgtcgcccaggctagagtatagtggtgtgatcttggcccactgcaacctctgcttcctaggttcaagtgattctcctgcctcagcctcccaagtagctgggattgtaagagtatgccaccacgcccagctactttttgtatttttagtagagacagggtttcatcatgttggccaggatggtctcttaactcctgccctcaagtgatccaccagagaggagatcctcggcctccccaagtgctgggattataggcatgagccaccgtgcccagcctactttctaattaattaaaaaaaaaaaaaaaaaaaaaaaaaaaccttcccaaatgagctgataaaaaactgacgtgaggctgctttgccttcaataatacctagttttcagctgttccaactcgtttccaaatagaaattagctggaacacactacagtaatctcaaggaagggaaaattaggccttaaaagataccaagaagtcagcatggtacccaattgaaaccttttgaccttagtgggaattcattctatttgcactaaaagccttaacttgctgtattcagagtccctcttaactgtgagtttctatagaactttactttttccactagtgcacagagagagaaaggttatcttaatagtcggtttcatggagatgaaggatgggagattaagaggggggaaatgatttttactggcagctatattccctctctgttctatttgctttaacaaagggataaaacctggcaaagtgtacattattggaggactcaaatctgtatgtgacatgtcccaactactgtccgctaactagttatccaaattgtaaagctacagaagcccagttgaggggtaagtgtgcctggctcacacagcctgcaccctgtcacctcggcaatgagccagtgtggggcactggggacttctaacccttggattgctctttttgacctgtgcataccttctaattgtaaaatatatttcagaccgtgagtaccttgagatctgagcaactgtgttaatgaagtaatagcaatggtccacagtgaaagatgtgttggggtttgcaaaacaagcattccgtcacctctttaataatgtcacagactttttaaaagagaggctatcaagttgtaatataatctgtcatgttttatttaggaaggaaggtaaatttgtgcttgcacggggatcattttgtattatttttgctaatacccagttgaagctaaaaagcaactatttgaatcctgtgaattaatttataagaatgttaaacagctttggaaatacatgcatcttatgaatcatagccttatttagcaagatcaatgttaaagtgttgttatatggcaagtatttaacacattcacagtgtttgtttgatttcaactgtgaattgtcttaagttttttcaaacctagttgtttctatggacacctgctctgaattgtacattgacttcattactaaagaacaaaaatgttcatttttgtcccagtaaattgagactgcttgtacactttcagaaaaatatgtgaatttataaagattttgtagatacttgt

SEQ ID NO: 4209 - protein, 751 aa, Homo sapiens; identical to SEQ ID NO: 4203

SEQ ID NO: 4210 - DNA, 5120 bp, Homo sapiens
aagtgtgggggcgtagtcaggcgtgggggcgggccggcgccggcgccgcggtcggcggcagcgctctcctaagctctcgcggctgcgcttcggtcccggacccgggccacccacggggtagtgggtgctcctcggccccggacattgcaagccccagaaggcaagactaactcggtgttgctcctcccggcgctgacttcgaggcccggctatggacggcgagagcgaggtggatttttctagcaacagcataacccctttgtggcggaggcggtcgattcctcagccccaccaggttctgggccggagcaagccgaggccccagtcctaccagagccccaacgggttactaattacggatttcccggtggaggacggagggacgctcctcgcagcgcagattcccgcccaggtgcccaccgcctcggacagcaggacggtacataggagccccctgcttctgggcgcccagcggagagcggtggccaatggtgggacggcatccccggagtacagggctgcctctcctcgacttcgacggcccaagtcacccaagctccccaaagcggtgcctggcggctccccgaaatccccagcaaatggcgcggtgaccttgcctgcgccgccgccgccgccggttctgcgccccccgcggactcctaacgcgcccgccccctgcacccccgaggaggaccttactgggttgactgccagcccggtgccttcgcccactgcaaatggccttgccgctaataacgactctcctgggtcaggttcgcagtccggccggaaggcaaaggaccccgaacgggggctctttcctgggccccagaaaagttcttcggaacaaaaactccccctccaaaggctgccctcccaggagaacgagctcctcgagaatccttccgtggttttgagtacaaacagccccgccgccctcaaagtggggaagcagcagatcattccgaagagtctggcctcggaaattaaaataagtaaatccaacaatcaaaatgtggagccccacaagagactcctcaaggtgcgcagcatggtggagggcctaggaggacccctgggtcacgcaggggaggagagtgaggtcgataacgacgtggatagcccagggtctctgcggagaggcttgcggtccacgtcttatcgcagggcagtggtcagtggctttgattttgacagtcctaccagctcgaagaagaagaacagaatgtcccagcctgttctgaaagtggtgatggaagacaaggagaagttttccagtctgggaaggataaagaaaaaaatgctgaaaggacaaggaacatttgatggggaagaaaatgctgtcctgtatcaaaactacaaggaaaaggcccttgacattgattctgatgaagagtcagagcccaaagaacagaagtcagatgaaaaaattgtgattcaccataagccattgagatccacatggagccaactctctgcggtgaaaagaaagggattatctcagacagtaagccaggaggaaagaaagagacaagaggctatctttgaagtcatatcctctgaacattcatatttactcagcttggagatcttgatacgaatgtttaaaaattctaaagaactgagtgatacaatgactaaaaccgagaggcaccatcttttctccaatattacagatgtctgtgaggcaagcaaaaagttctttatagagttggaagcaagacatcagaataatatcttcatagatgacataagtgacattgtggaaaaacacacagcatccacatttgacccatatgtgaaatactgcacaaatgaagtctaccaacaacgaacactacaaaaattgttagctaccaatccatcctttaaggaagtattgtcaaggattgagtcccatgaagactgtaggaacttacccatgatctcttttctcattctccccatgcagagggtgacccgccttcccctgctgatggatactatctgtcaaaaaacacctaaggactctccgaagtatgaagtctgcaaaagagccttgaaggaagttagcaagttggttcgactatgcaatgagggcgcccggaagatggaaaggactgagatgatgtacacaattaactcccagctggaatttaaaattaagccttttcctttagtctcctcttcccggtggttggtaaaaagaggtgaattgacagcctatgttgaagacactgtgcttttctcaagaaggacatccaaacagcaagtctacttctttctctttaacgatgtgctcattatcaccaagaagaagagtgaagaaagttacaacgtcaatgattattccttaagagatcagctattggtggaatcttgtgacaatgaagagcttaattcttctccagggaagaacagctccacaatgctctattcaagacagagctctgccagtcagtcacctctttactctgacagtccttagtaaccacgcgaatgagaaagtggagatgctactaggagctgagacgcagagcgagcgagcccgctggataactgccctgggacacagcagcgggaagccgcctgcagaccgaacctgtggctgacgtcgtcctcatctatcaacgtgtcagcgatggctggtatgagggggaacgactacgagatggagaaagaggctggtttcctatggaatgtgccaaggagataacatgtcaagctacaattgataagaatgtggagagaatgggacgcttgctaggactggagaccaacgtgtagtctctcagatggtcttttgttactgcaagatttgcacgacacttaccgggctggttggttctgggctagttttattgttaattttgtcacagcctatttaattaaaagaacgaaaacacttgcctttaagcttgccaggttgttctgctctctcatgagaagagcttggatacagtgagtttgcacagctcagtttttacctaaccacacacttgcagacctcctgaggtacacagaatagctgagcagttcacttcagggatcaggtcatctctgctcctcctagtttcaccatgttctggcaataaaaaacacatattatatcctggttttctctatccttgcattactaaggtgactgtctctctttatacatccttgtatggttctcccagtattagcaagattgtatatctgtaaagaatgtccagttttgtaaatatttccctgcctttttttttctttttttacatctgattttaatgcttcgttaacttcaaaaggaactggtagagttcagaaggtgagctgttgtttttctaaacctcttcccaggaaggggacattgacacttgaatttttgtcacctttttcctcattagaaggaaagtagaaagccttactttaggatttttaaaaaaaaatccatctcaccccatattgttcttaaataagtatagactaattaacctaagctacctttaacaacgtagaatttagatgggttcatatatgtgagaaaaacctgaatataggacaggggtcctacttttttccccacctctgtcgcccaggctagagtatagtggtgtgatcttggcccactgcaacctctgcttcctaggttcaagtgattctcctgcctcagcctcccaagtagctgggattgtaagagtatgccaccacgcccagctactttttgtatttttagtagagacagggtttcatcatgttggccaggatggtctcttaactcctgccctcaagtgatccaccagagaggagatcctcggcctccccaagtgctgggattataggcatgagccaccgtgcccagcctactttctaattaattaaaaaaaaaaaaaaaaaaaaaaaaaaaccttcccaaatgagctgataaaaaactgacgtgaggctgctttgccttcaataatacctagttttcagctgttccaactcgtttccaaatagaaattagctggaacacactacagtaatctcaaggaagggaaaattaggccttaaaagataccaagaagtcagcatggtacccaattgaaaccttttgaccttagtgggaattcattctatttgcactaaaagccttaacttgctgtattcagagtccctcttaactgtgagtttctatagaactttactttttccactagtgcacagagagagaaaggttatcttaatagtcggtttcatggagatgaaggatgggagattaagaggggggaaatgatttttactggcagctatattccctctctgttctatttgctttaacaaagggataaaacctggcaaagtgtacattattggaggactcaaatctgtatgtgacatgtcccaactactgtccgctaactagttatccaaattgtaaagctacagaagcccagttgaggggtaagtgtgcctggctcacacagcctgcaccctgtcacctcggcaatgagccagtgtggggcactggggacttctaacccttggattgctctttttgacctgtgcataccttctaattgtaaaatatatttcagaccgtgagtaccttgagatctgagcaactgtgttaatgaagtaatagcaatggtccacagtgaaagatgtgttggggtttgcaaaacaagcattccgtcacctctttaataatgtcacagactttttaaaagagaggctatcaagttgtaatataatctgtcatgttttatttaggaaggaaggtaaatttgtgcttgcacggggatcattttgtattatttttgctaatacccagttgaagctaaaaagcaactatttgaatcctgtgaattaatttataagaatgttaaacagctttggaaatacatgcatcttatgaatcatagccttatttagcaagatcaatgttaaagtgttgttatatggcaagtatttaacacattcacagtgtttgtttgatttcaactgtgaattgtcttaagttttttcaaacctagttgtttctatggacacctgctctgaattgtacattgacttcattactaaagaacaaaaatgttcatttttgtcccagtaaattgagactgcttgtacactttcagaaaaatatgtgaatttataaagattttgtagatacttgt

SEQ ID NO: 4211 - protein, 751 aa, Homo sapiens; identical to SEQ ID NO: 4203

SEQ ID NO: 4212 - DNA, 2435 bp, Homo sapiens
aagtgtgggggcgtagtcaggcgtgggggcgggccggcgccggcgccgcggtcggcggcagcgctctcctaagctctcgcggctgcgcttcggtcccggacccgggccacccacggggtagtgggtgctcctcggccccggacattgcaagccccagaaggcaagactaactcggtgttgctcctcccggcgctgacttcgaggcccggctatggacggcgagagcgaggtggatttttctagcaacagcataacccctttgtggcggaggcggtcgattcctcagccccaccaggttctgggccggagcaagccgaggccccagtcctaccagagccccaacgggttactaattacggatttcccggtggaggacggagggacgctcctcgcagcgcagattcccgcccaggtgcccaccgcctcggacagcaggacggtacataggagccccctgcttctgggcgcccagcggagagcggtggccaatggtgggacggcatccccggagtacagggctgcctctcctcgacttcgacggcccaagtcacccaagctccccaaagcggtgcctggcggctccccgaaatccccagcaaatggcgcggtgaccttgcctgcgccgccgccgccgccggttctgcgccccccgcggactcctaacgcgcccgccccctgcacccccgaggaggaccttactgggttgactgccagcccggtgccttcgcccactgcaaatggccttgccgctaataacgactctcctgggtcaggttcgcagtccggccggaaggcaaaggaccccgaacgggggctctttcctgggccccagaaaagttcttcggaacaaaaactccccctccaaaggctgccctcccaggagaacgagctcctcgagaatccttccgtggttttgagtacaaacagccccgccgccctcaaagtggggaagcagcagatcattccgaagagtctggcctcggaaattaaaataagtaaatccaacaatcaaaatgtggagccccacaagagactcctcaaggtgcgcagcatggtggagggcctaggaggacccctgggtcacgcaggggaggagagtgaggtcgataacgacgtggatagcccagggtctctgcggagaggcttgcggtccacgtcttatcgcagggcagtggtcagtggctttgattttgacagtcctaccagctcgaagaagaagaacagaatgtcccagcctgttctgaaagtggtgatggaagacaaggagaagttttccagtctgggaaggataaagaaaaaaatgctgaaaggacaaggaacatttgatggggaagaaaatgctgtcctgtatcaaaactacaaggaaaaggcccttgacattgattctgatgaagagtcagagcccaaagaacagaagtcagatgaaaaaattgtgattcaccataagccattgagatccacatggagccaactctctgcggtgaagagaaaggttatcttaatagtcggtttcatggagatgaaggatgggagattaagaggggggaaatgatttttactggcagctatattccctctctgttctatttgctttaacaaagggataaaacctggcaaagtgtacattattggaggactcaaatctgtatgtgacatgtcccaactactgtccgctaactagttatccaaattgtaaagctacagaagcccagttgaggggtaagtgtgcctggctcacacagcctgcaccctgtcacctcggcaatgagccagtgtggggcactggggacttctaacccttggattgctctttttgacctgtgcataccttctaattgtaaaatatatttcagaccgtgagtaccttgagatctgagcaactgtgttaatgaagtaatagcaatggtccacagtgaaagatgtgttggggtttgcaaaacaagcattccgtcacctctttaataatgtcacagactttttaaaagagaggctatcaagttgtaatataatctgtcatgttttatttaggaaggaaggtaaatttgtgcttgcacggggatcattttgtattatttttgctaatacccagttgaagctaaaaagcaactatttgaatcctgtgaattaatttataagaatgttaaacagctttggaaatacatgcatcttatgaatcatagccttatttagcaagatcaatgttaaagtgttgttatatggcaagtatttaacacattcacagtgtttgtttgatttcaactgtgaattgtcttaagttttttcaaacctagttgtttctatggacacctgctctgaattgtacattgacttcattactaaagaacaaaaatgttcatttttgtcccagtaaattgagactgcttgtacactttcagaaaaatatgtgaatttataaagattttgtagatacttgt

SEQ ID NO: 4213 - protein, 446 aa, Homo sapiens
MDGESEVDFSSNSITPLWRRRSIPQPHQVLGRSKPRPQSYQSPNGLLITDFPVEDGGTLLAAQIPAQVPTASDSRTVHRSPLLLGAQRRAVANGGTASPEYRAASPRLRRPKSPKLPKAVPGGSPKSPANGAVTLPAPPPPPVLRPPRTPNAPAPCTPEEDLTGLTASPVPSPTANGLAANNDSPGSGSQSGRKAKDPERGLFPGPQKSSSEQKLPLQRLPSQENELLENPSVVLSTNSPAALKVGKQQIIPKSLASEIKISKSNNQNVEPHKRLLKVRSMVEGLGGPLGHAGEESEVDNDVDSPGSLRRGLRSTSYRRAVVSGFDFDSPTSSKKKNRMSQPVLKVVMEDKEKFSSLGRIKKKMLKGQGTFDGEENAVLYQNYKEKALDIDSDEESEPKEQKSDEKIVIHHKPLRSTWSQLSAVKRKVILIVGFMEMKDGRLRGGK

SEQ ID NO: 4214 - DNA, 3110 bp, Homo sapiens
agcttttactttcagtaaacttaaaaggatttcaatttagctttggtcactgggtttttctccttttgtagccttttcctttagtctcctcttcccggtggttggtaaaaagaggtgaattgacagcctatgttgaagacactgtgcttttctcaagaaggacatccaaacagcaagtctacttctttctctttaacgatgtgctcattatcaccaagaagaagagtgaagaaagttacaacgtcaatgattattccttaagagatcagctattggtggaatcttgtgacaatgaagagcttaattcttctccagggaagaacagctccacaatgctctattcaagacagagctctgccagtcagtcacctctttactctgacagtccttagtaaccacgcgaatgagaaagtggagatgctactaggagctgagacgcagagcgagcgagcccgctggataactgccctgggacacagcagcgggaagccgcctgcagaccgaacctcactgacccaggtggaaatcgttaggtcatttactgctaagcagccagatgaactctccctgcaggtggctgacgtcgtcctcatctatcaacgtgtcagcgatggctggtatgagggggaacgactacgagatggagaaagaggctggtttcctatggaatgtgccaaggagataacatgtcaagctacaattgataagaatgtggagagaatgggacgcttgctaggactggagaccaacgtgtagtctctcagatggtcttttgttactgcaagatttgcacgacacttaccgggctggttggttctgggctagttttattgttaattttgtcacagcctatttaattaaaagaacgaaaacacttgcctttaagcttgccaggttgttctgctctctcatgagaagagcttggatacagtgagtttgcacagctcagtttttacctaaccacacacttgcagacctcctgaggtacacagaatagctgagcagttcacttcagggatcaggtcatctctgctcctcctagtttcaccatgttctggcaataaaaaacacatattatatcctggttttctctatccttgcattactaaggtgactgtctctctttatacatccttgtatggttctcccagtattagcaagattgtatatctgtaaagaatgtccagttttgtaaatatttccctgcctttttttttctttttttacatctgattttaatgcttcgttaacttcaaaaggaactggtagagttcagaaggtgagctgttgtttttctaaacctcttcccaggaaggggacattgacacttgaatttttgtcacctttttcctcattagaaggaaagtagaaagccttactttaggatttttaaaaaaaaatccatctcaccccatattgttcttaaataagtatagactaattaacctaagctacctttaacaacgtagaatttagatgggttcatatatgtgagaaaaacctgaatataggacaggggtcctacttttttccccacctctgtcgcccaggctagagtatagtggtgtgatcttggcccactgcaacctctgcttcctaggttcaagtgattctcctgcctcagcctcccaagtagctgggattgtaagagtatgccaccacgcccagctactttttgtatttttagtagagacagggtttcatcatgttggccaggatggtctcttaactcctgccctcaagtgatccaccagagaggagatcctcggcctccccaagtgctgggattataggcatgagccaccgtgcccagcctactttctaattaattaaaaaaaaaaaaaaaaaaaaaaaaaaaccttcccaaatgagctgataaaaaactgacgtgaggctgctttgccttcaataatacctagttttcagctgttccaactcgtttccaaatagaaattagctggaacacactacagtaatctcaaggaagggaaaattaggccttaaaagataccaagaagtcagcatggtacccaattgaaaccttttgaccttagtgggaattcattctatttgcactaaaagccttaacttgctgtattcagagtccctcttaactgtgagtttctatagaactttactttttccactagtgcacagagagagaaaggttatcttaatagtcggtttcatggagatgaaggatgggagattaagaggggggaaatgatttttactggcagctatattccctctctgttctatttgctttaacaaagggataaaacctggcaaagtgtacattattggaggactcaaatctgtatgtgacatgtcccaactactgtccgctaactagttatccaaattgtaaagctacagaagcccagttgaggggtaagtgtgcctggctcacacagcctgcaccctgtcacctcggcaatgagccagtgtggggcactggggacttctaacccttggattgctctttttgacctgtgcataccttctaattgtaaaatatatttcagaccgtgagtaccttgagatctgagcaactgtgttaatgaagtaatagcaatggtccacagtgaaagatgtgttggggtttgcaaaacaagcattccgtcacctctttaataatgtcacagactttttaaaagagaggctatcaagttgtaatataatctgtcatgttttatttaggaaggaaggtaaatttgtgcttgcacggggatcattttgtattatttttgctaatacccagttgaagctaaaaagcaactatttgaatcctgtgaattaatttataagaatgttaaacagctttggaaatacatgcatcttatgaatcatagccttatttagcaagatcaatgttaaagtgttgttatatggcaagtatttaacacattcacagtgtttgtttgatttcaactgtgaattgtcttaagttttttcaaacctagttgtttctatggacacctgctctgaattgtacattgacttcattactaaagaacaaaaatgttcatttttgtcccagtaaattgagactgcttgtacactttcagaaaaatatgtgaatttataaagattttgtagatacttgt

SEQ ID NO: 4215 - protein, 154 aa, Homo sapiens
MKSLILLQGRTAPQCSIQDRALPVSHLFTLTVLSNHANEKVEMLLGAETQSERARWITALGHSSGKPPADRTSLTQVEIVRSFTAKQPDELSLQVADVVLIYQRVSDGWYEGERLRDGERGWFPMECAKEITCQATIDKNVERMGRLLGLETNV

SEQ ID NO: 4216 - DNA, 5552 bp, Homo sapiens
gacctttatttgttacttttgagctacagtgacaagaaagatcacctaactgtggaagaactggctcagtttttgaaggtggagcaaaagatgaataatgtgacaacggactattgtcttgacatcataaagaagtttgaagtttcagaagaaaataaggtgaaaaatgttcttggcatagaaggcttcacgaacttcatgcgtagtcctgcctgtgacatatttaacccattgcaccatgaagtgtaccaagacatggatcagcccctctgcaactactacattgcttcctctcacaatacatacctgactggagaccagctcctttctcagtccaaagtggatatgtatgcacgggtgctgcaagagggctgtcgctgtgtggaagttgactgttgggatggcccagatggagagccagtagtacatcatggttacactctcacttcaaaaattctcttcagagatgttgtggagaccatcaacaagcatgcctttgtgaagaatgagtttcctgttatattgtctatcgagaatcactgcagtatccagcagcaaaggaagattgctcagtacctgaaaggaatattcggagacaaactggacctgtcatctgttgatacaggggagtgcaagcagcttccaagccctcaaagtttgaaaggcaaaattctagtgaagggtaagaagttgccttatcaccttggggatgatgcagaggaaggggaagtttctgatgaggacagtgcagatgaaattgaagacgagtgcaaattcaagctccattatagtaatgggaccactgagcatcaggtggaatctttcataaggaaaaaactggagtcactgttaaaagaatctcaaattcgagataaagaagatcctgatagtttcacagtgcgggcactactgaaggccacgcatgaaggcttaaatgcacacctgaagcagagtccagatgtaaaggaaagtggaaagaaatcacatggacgatccctcatgaccaactttggaaaacataagaaaactacaaaatcacggtctaaatcttacagtactgatgatgaggaagacacacagcagagtactggcaaggagggtggccagctgtacagattgggtcgccgaaggaaaaccatgaagctctgccgagaactctctgatttggttgtgtacacaaactccgtggccgctcaggacattgtggatgacggaaccacaggaaatgtgttatcattcagtgaaacaagagcacatcaggttgttcagcaaaaatcagagcagttcatgatttataatcaaaagcaactcacgaggatttacccctctgcctaccgcattgattccagtaacttcaaccctctcccctactggaacgcaggctgccagctagtggcactgaattatcaatctgaaggacgaatgatgcagttaaaccgagccaaattcaaggcaaatggcaattgtggctatgtcctcaaaccccagcaaatgtgcaaaggtactttcaaccctttctctggtgaccctcttcctgccaaccccaaaaagcagctcatcctgaaagttatcagtggacagcaactccccaaacctccagactccatgtttggagatcgaggcgagatcattgacccttttgttgaagttgaaattattggattgccagtagattgttgtaaagatcaaacccgtgtggtagatgacaatggatttaaccctgtgtgggaagaaacactgacatttacagtacacatgccagaaatagctttggttcggttccttgtgtgggatcacgatcccattggacgagactttgttggacaaagaactgtgaccttcagcagcttagtgcctggctaccggcatgtctatttggaaggactgacagaagcatccatatttgtacacataaccatcaatgaaatctatggaaagtggagccctttaatactcaaccccagttatactatattgcactttctaggagctacaaagaacagacaactccagggtctgaagggactgttcaataagaatcctaggcacagttcttcagaaaacaattcccattatgtacggaagcgatccattggagatagaattctgcgacgcacagctagcgccccagccaaaggcaggaaaaagagcaaaatgggcttccaagaaatggtggagataaaggattctgtgtccgaggccacaagagatcaagatggcgtgctgaggaggaccacacgcagtttgcaagcacgccctgtctctatgcctgttgacagaaaccttctgggagctttgtcgctgcctgtatctgaaacagcaaaagacattgaaggaaaagaaaactctctagtacaaatctgaataggaaacaacttaagcagaagataaagatggcagaagaaaagggaaagcaagtataaaagatccacattttctaaatttcaacaaaaagttatcatcctcctccagtgctctgctccacaaagataccagccaaggggacaccattgtatctactgcccacatgtcagtcacaggagaacagctgggcatgtcaagtcctaggggtgggagaaccacatcaaatgccacaagcaattgccaggaaaacccctgtcccagcaagtctctctccccaaagcagcatttggctcccgatcctgtagttaaccccacacaagatctgcatggtgtgaaaatcaaggaaaagggtaatcctgaggactttgtggaagggaaaagcatcttgtcaggaagcgtcctttctcatagcaacctagaaattaagaacctggaaggtaataggggtaagggccgagctgcaacatccttttctttgtcagacgtctccatgctctgttctgacatacctgacctacattcaactgcaattctgcaggagagtgtaatttcccatcttattgacaatgtcactttaacaaatgagaatgagccgggcagttccatctcagccctgattggccagtttgatgagaccaacaatcaggctctcacagttgtttctcatcttcataataccagtgtgatgtcaggccattgtcccttgcctagcctgggcctaaaaatgcccatcaagcatggtttttgcaagggaaaatccaagtcttccttcctgtgctcatctccggagctgatagcactctcgagttctgagaccaccaaacatgcaacgaacacagtttatgaaactacctgcactcccatctctaaaaccaaaccagatgatgacctttctagtaaggccaagacagcggccttagaaagcaacctgcctggatcccctaatacttctcgtggctggttaccaaaaagtcctaccaagggagaagactgggaaacactgaagagctgcagccctgcctcttcccctgatttgaccctggaggatgtaatagctgatcccactctctgtttcaattctggggagagcagccttgtggaaattgatggagaatcagaaaatctttctctaacaacctgtgaatataggagagagggcacaagtcaacttgcttctcctttaaaactcaagtacaatcagggtgtggtagaacactttcaaagaggtttgagaaacggctactgtaaagagaccctccgcccttctgtccctgaaatattcaacaatattcaagatgtcaaaactcaaagtatttcttatctagcctatcagggtgctggctttgtgcataatcatttctcagattcagatgcaaaaatgttccagacctgtgtgccccagcaatctagtgctcaagatatgcatgtccctgtacccaagcagttggcacatcttcctttgcctgctctgaaactgcctagtccttgcaaatccaaaagtctgggggacttaacatcagaggacattgcctgcaattttgagagcaagtaccagtgtattagtaagagttttgttacaactggcattagagacaagaagggcgtgactgtgaagacaaagtcgttagagcctatagatgccctgaccgagcagcttcggaagcttgtgtcctttgaccaggaagacaactgccaagtgctatattcaaagcaggatgccaatcagctcccccgggcactggtcaggaagttgtcatccagaagtcagagcagagtgcgcaatattgctagtcgtgccaaggagaaacaggaagccaacaagcagaaagttccaaaccccagcaatggggcaggagtggttcttagaaacaaaccctcagcacccacccctgcagtgaatcgccactccaccggctcctacatcgcaggctacctgaagaacacgaaagggggtggccttgaaggccggggcatcccagagggggcatgcacggctcttcactatggccacgttgaccagttttgttcagataattctgttttgcagactgagccaagcagtgatgataaaccagaaatttattttcttttgagactgtgaattatttaaaactgcattcttaaggttttcaaggtattctgtagaatgtcagagttttcagtaaataagttccttggctttggaatgattttcaaatgtatttttaaacttgtatttgggtctccctttgacttcatgtgttctccctgttaatgcgtttgtatatagatttggtgacatttcccatgtacctattatgatctttctcccttgagttgttgtaaactgtatcagtatgaaatatgtgcatgccctagatgtgaaactcctcagcagctcgggttataatgtgtgtgtgtttcaccaagatgtcctttactgtgtcctcagattgcagtcacaaatgtagtcatttttactctctaactgttgagttgattaagagactttgcaaacgacaaagggatgaattccttactttaatctgttatcatttttcctatgtttccctctttgttcagaagcccagatgcatttttataactcagttttaaaaactttaaaatagttaccttgccttttaggatgttcttatcccacccataatgagagttgaaaggggatggatagctgctccccatgcccttcccactttttggaataggccgtgagggtgtgaggaagaaggctgtcttttgtacataaggacaaaattgtttgttttacataaattttgttacatatttttgctaatggctttgtatgtaacaagaagcgagttgccaaactacctgttgtacttttgaattttctgattgaattacagactgcgaacaacggctttcagaatgagggacttccatcagactctaatgataatagtagcacaaattgaaaacttccccaaagctttcacagaatattttctcataataaaatccaagtgaacagataattagaagaaacccttttccttcagggaaccaagcaactctattttagtactgacatgcattattttcactgtgaattcacttttttattgcatgttcagatgtccctctttgttttttttttttgtaacattaactgcaatgatgttcttcctggaattcatgaaaatataattaaaacacatttttaaaca

SEQ ID NO: 4217 - protein, 757 aa, Homo sapiens
MNNVTTDYCLDIIKKFEVSEENKVKNVLGIEGFTNFMRSPACDIFNPLHHEVYQDMDQPLCNYYIASSHNTYLTGDQLLSQSKVDMYARVLQEGCRCVEVDCWDGPDGEPVVHHGYTLTSKILFRDVVETINKHAFVKNEFPVILSIENHCSIQQQRKIAQYLKGIFGDKLDLSSVDTGECKQLPSPQSLKGKILVKGKKLPYHLGDDAEEGEVSDEDSADEIEDECKFKLHYSNGTTEHQVESFIRKKLESLLKESQIRDKEDPDSFTVRALLKATHEGLNAHLKQSPDVKESGKKSHGRSLMTNFGKHKKTTKSRSKSYSTDDEEDTQQSTGKEGGQLYRLGRRRKTMKLCRELSDLVVYTNSVAAQDIVDDGTTGNVLSFSETRAHQVVQQKSEQFMIYNQKQLTRIYPSAYRIDSSNFNPLPYWNAGCQLVALNYQSEGRMMQLNRAKFKANGNCGYVLKPQQMCKGTFNPFSGDPLPANPKKQLILKVISGQQLPKPPDSMFGDRGEIIDPFVEVEIIGLPVDCCKDQTRVVDDNGFNPVWEETLTFTVHMPEIALVRFLVWDHDPIGRDFVGQRTVTFSSLVPGYRHVYLEGLTEASIFVHITINEIYGKWSPLILNPSYTILHFLGATKNRQLQGLKGLFNKNPRHSSSENNSHYVRKRSIGDRILRRTASAPAKGRKKSKMGFQEMVEIKDSVSEATRDQDGVLRRTTRSLQARPVSMPVDRNLLGALSLPVSETAKDIEGKENSLVQI

SEQ ID NO: 4218 - DNA, 6486 bp, Homo sapiens
ataatgccttgagggctttaacgcgctgcacgaagcatgcatgtctcatacccaaagtagccacagcgcctgcattcccacaatagcggcagccccgagcagatgcttccagcgtgcttatctggctgtgcttttcactttgggacaaagttctataatcatatctcatggatttattttctccacactataaagcctgaattgtgaagatctcatcatgccataaagggcagcatgagccaagttctgggggctgctaaggatttctttgccttttttccccccaccctttttggaaatgtgtatcaggaaaaggctttgcctttagagagaaattgtactgctcttgccaataatgtgtaatagtattaaatttaatggcagaccttgaagtgtataaaaacttaagtccagaaaaagttgaaagatgcatgagtgtgatgcagtccgggacacagatgatcaagctgaaacgtggaaccaaagggcttgtccgcctcttttacctggatgagcaccggacacgcctccgatggcgaccctctaggaagagtgagaaggcaaaaatacttattgattccatttacaaagtgactgagggccggcagtctgaaatattccacagacaagctgaggggaacttcgaccccagctgctgcttcaccatctaccatggcaaccacatggagtccctggacctcatcacctccaaccccgaggaggcccgcacctggatcacaggcctcaagtacctgatggctggcatcagtgatgaagactcccttgccaaaaggcagaggacccatgaccaatgggtgaagcagacctttgaggaagctgataagaatggtgacggcttgctgaatattgaagagatacatcagctgatgcataaactgaatgttaatctgccccgaagaaaagtcagacaaatgtttcaggaagccgacacagatgagaatcagggaactttgacatttgaagagttctgtgttttttacaaaatgatgtctttgagacgagacctttatttgttacttttgagctacagtgacaagaaagatcacctaactgtggaagaactggctcagtttttgaaggtggagcaaaagatgaataatgtgacaacggactattgtcttgacatcataaagaagtttgaagtttcagaagaaaataaggtgaaaaatgttcttggcatagaaggcttcacgaacttcatgcgtagtcctgcctgtgacatatttaacccattgcaccatgaagtgtaccaagacatggatcagcccctctgcaactactacattgcttcctctcacaatacatacctgactggagaccagctcctttctcagtccaaagtggatatgtatgcacgggtgctgcaagagggctgtcgctgtgtggaagttgactgttgggatggcccagatggagagccagtagtacatcatggttacactctcacttcaaaaattctcttcagagatgttgtggagaccatcaacaagcatgcctttgtgaagaatgagtttcctgttatattgtctatcgagaatcactgcagtatccagcagcaaaggaagattgctcagtacctgaaaggaatattcggagacaaactggacctgtcatctgttgatacaggggagtgcaagcagcttccaagccctcaaagtttgaaaggcaaaattctagtgaagggtaagaagttgccttatcaccttggggatgatgcagaggaaggggaagtttctgatgaggacagtgcagatgaaattgaagacgagtgcaaattcaagctccattatagtaatgggaccactgagcatcaggtggaatctttcataaggaaaaaactggagtcactgttaaaagaatctcaaattcgagataaagaagatcctgatagtttcacagtgcgggcactactgaaggccacgcatgaaggcttaaatgcacacctgaagcagagtccagatgtaaaggaaagtggaaagaaatcacatggacgatccctcatgaccaactttggaaaacataagaaaactacaaaatcacggtctaaatcttacagtactgatgatgaggaagacacacagcagagtactggcaaggagggtggccagctgtacagattgggtcgccgaaggaaaaccatgaagctctgccgagaactctctgatttggttgtgtacacaaactccgtggccgctcaggacattgtggatgacggaaccacaggaaatgtgttatcattcagtgaaacaagagcacatcaggttgttcagcaaaaatcagagcagttcatgatttataatcaaaagcaactcacgaggatttacccctctgcctaccgcattgattccagtaacttcaaccctctcccctactggaacgcaggctgccagctagtggcactgaattatcaatctgaaggacgaatgatgcagttaaaccgagccaaattcaaggcaaatggcaattgtggctatgtcctcaaaccccagcaaatgtgcaaaggtactttcaaccctttctctggtgaccctcttcctgccaaccccaaaaagcagctcatcctgaaagttatcagtggacagcaactccccaaacctccagactccatgtttggagatcgaggcgagatcattgacccttttgttgaagttgaaattattggattgccagtagattgttgtaaagatcaaacccgtgtggtagatgacaatggatttaaccctgtgtgggaagaaacactgacatttacagtacacatgccagaaatagctttggttcggttccttgtgtgggatcacgatcccattggacgagactttgttggacaaagaactgtgaccttcagcagcttagtgcctggctaccggcatgtctatttggaaggactgacagaagcatccatatttgtacacataaccatcaatgaaatctatggaaagaacagacaactccagggtctgaagggactgttcaataagaatcctaggcacagttcttcagaaaacaattcccattatgtacggaagcgatccattggagatagaattctgcgacgcacagctagcgccccagccaaaggcaggaaaaagagcaaaatgggcttccaagaaatggtggagataaaggattctgtgtccgaggccacaagagatcaagatggcgtgctgaggaggaccacacgcagtttgcaagcacgccctgtctctatgcctgttgacagaaaccttctgggagctttgtcgctgcctgtatctgaaacagcaaaagacattgaaggaaaagaaaactctctagcagaagataaagatggcagaagaaaagggaaagcaagtataaaagatccacattttctaaatttcaacaaaaagttatcatcctcctccagtgctctgctccacaaagataccagccaaggggacaccattgtatctactgcccacatgtcagtcacaggagaacagctgggcatgtcaagtcctaggggtgggagaaccacatcaaatgccacaagcaattgccaggaaaacccctgtcccagcaagtctctctccccaaagcagcatttggctcccgatcctgtagttaaccccacacaagatctgcatggtgtgaaaatcaaggaaaagggtaatcctgaggactttgtggaagggaaaagcatcttgtcaggaagcgtcctttctcatagcaacctagaaattaagaacctggaaggtaataggggtaagggccgagctgcaacatccttttctttgtcagacgtctccatgctctgttctgacatacctgacctacattcaactgcaattctgcaggagagtgtaatttcccatcttattgacaatgtcactttaacaaatgagaatgagccgggcagttccatctcagccctgattggccagtttgatgagaccaacaatcaggctctcacagttgtttctcatcttcataataccagtgtgatgtcaggccattgtcccttgcctagcctgggcctaaaaatgcccatcaagcatggtttttgcaagggaaaatccaagtcttccttcctgtgctcatctccggagctgatagcactctcgagttctgagaccaccaaacatgcaacgaacacagtttatgaaactacctgcactcccatctctaaaaccaaaccagatgatgacctttctagtaaggccaagacagcggccttagaaagcaacctgcctggatcccctaatacttctcgtggctggttaccaaaaagtcctaccaagggagaagactgggaaacactgaagagctgcagccctgcctcttcccctgatttgaccctggaggatgtaatagctgatcccactctctgtttcaattctggggagagcagccttgtggaaattgatggagaatcagaaaatctttctctaacaacctgtgaatataggagagagggcacaagtcaacttgcttctcctttaaaactcaagtacaatcagggtgtggtagaacactttcaaagaggtttgagaaacggctactgtaaagagaccctccgcccttctgtccctgaaatattcaacaatattcaagatgtcaaaactcaaagtatttcttatctagcctatcagggtgctggctttgtgcataatcatttctcagattcagatgcaaaaatgttccagacctgtgtgccccagcaatctagtgctcaagatatgcatgtccctgtacccaagcagttggcacatcttcctttgcctgctctgaaactgcctagtccttgcaaatccaaaagtctgggggacttaacatcagaggacattgcctgcaattttgagagcaagtaccagtgtattagtaagagttttgttacaactggcattagagacaagaagggcgtgactgtgaagacaaagtcgttagagcctatagatgccctgaccgagcagcttcggaagcttgtgtcctttgaccaggaagacaactgccaagtgctatattcaaagcaggatgccaatcagctcccccgggcactggtcaggaagttgtcatccagaagtcagagcagagtgcgcaatattgctagtcgtgccaaggagaaacaggaagccaacaagcagaaagttccaaaccccagcaatggggcaggagtggttcttagaaacaaaccctcagcacccacccctgcagtgaatcgccactccaccggctcctacatcgcaggctacctgaagaacacgaaagggggtggccttgaaggccggggcatcccagagggggcatgcacggctcttcactatggccacgttgaccagttttgttcagataattctgttttgcagactgagccaagcagtgatgataaaccagaaatttattttcttttgagactgtgaattatttaaaactgcattcttaaggttttcaaggtattctgtagaatgtcagagttttcagtaaataagttccttggctttggaatgattttcaaatgtatttttaaacttgtatttgggtctccctttgacttcatgtgttctccctgttaatgcgtttgtatatagatttggtgacatttcccatgtacctattatgatctttctcccttgagttgttgtaaactgtatcagtatgaaatatgtgcatgccctagatgtgaaactcctcagcagctcgggttataatgtgtgtgtgtttcaccaagatgtcctttactgtgtcctcagattgcagtcacaaatgtagtcatttttactctctaactgttgagttgattaagagactttgcaaacgacaaagggatgaattccttactttaatctgttatcatttttcctatgtttccctctttgttcagaagcccagatgcatttttataactcagttttaaaaactttaaaatagttaccttgccttttaggatgttcttatcccacccataatgagagttgaaaggggatggatagctgctccccatgcccttcccactttttggaataggccgtgagggtgtgaggaagaaggctgtcttttgtacataaggacaaaattgtttgttttacataaattttgttacatatttttgctaatggctttgtatgtaacaagaagcgagttgccaaactacctgttgtacttttgaattttctgattgaattacagactgcgaacaacggctttcagaatgagggacttccatcagactctaatgataatagtagcacaaattgaaaacttccccaaagctttcacagaatattttctcataataaaatccaagtgaacagataattagaagaaacccttttccttcagggaaccaagcaactctattttagtactgacatgcattattttcactgtgaattcacttttttattgcatgttcagatgtccctctttgttttttttttttgtaacattaactgcaatgatgttcttcctggaattcatgaaaatataattaaaacacatttttaaaca

SEQ ID NO: 4219 - protein, 1673 aa, Homo sapiens
MADLEVYKNLSPEKVERCMSVMQSGTQMIKLKRGTKGLVRLFYLDEHRTRLRWRPSRKSEKAKILIDSIYKVTEGRQSEIFHRQAEGNFDPSCCFTIYHGNHMESLDLITSNPEEARTWITGLKYLMAGISDEDSLAKRQRTHDQWVKQTFEEADKNGDGLLNIEEIHQLMHKLNVNLPRRKVRQMFQEADTDENQGTLTFEEFCVFYKMMSLRRDLYLLLLSYSDKKDHLTVEELAQFLKVEQKMNNVTTDYCLDIIKKFEVSEENKVKNVLGIEGFTNFMRSPACDIFNPLHHEVYQDMDQPLCNYYIASSHNTYLTGDQLLSQSKVDMYARVLQEGCRCVEVDCWDGPDGEPVVHHGYTLTSKILFRDVVETINKHAFVKNEFPVILSIENHCSIQQQRKIAQYLKGIFGDKLDLSSVDTGECKQLPSPQSLKGKILVKGKKLPYHLGDDAEEGEVSDEDSADEIEDECKFKLHYSNGTTEHQVESFIRKKLESLLKESQIRDKEDPDSFTVRALLKATHEGLNAHLKQSPDVKESGKKSHGRSLMTNFGKHKKTTKSRSKSYSTDDEEDTQQSTGKEGGQLYRLGRRRKTMKLCRELSDLVVYTNSVAAQDIVDDGTTGNVLSFSETRAHQVVQQKSEQFMIYNQKQLTRIYPSAYRIDSSNFNPLPYWNAGCQLVALNYQSEGRMMQLNRAKFKANGNCGYVLKPQQMCKGTFNPFSGDPLPANPKKQLILKVISGQQLPKPPDSMFGDRGEIIDPFVEVEIIGLPVDCCKDQTRVVDDNGFNPVWEETLTFTVHMPEIALVRFLVWDHDPIGRDFVGQRTVTFSSLVPGYRHVYLEGLTEASIFVHITINEIYGKNRQLQGLKGLFNKNPRHSSSENNSHYVRKRSIGDRILRRTASAPAKGRKKSKMGFQEMVEIKDSVSEATRDQDGVLRRTTRSLQARPVSMPVDRNLLGALSLPVSETAKDIEGKENSLAEDKDGRRKGKASIKDPHFLNFNKKLSSSSSALLHKDTSQGDTIVSTAHMSVTGEQLGMSSPRGGRTTSNATSNCQENPCPSKSLSPKQHLAPDPVVNPTQDLHGVKIKEKGNPEDFVEGKSILSGSVLSHSNLEIKNLEGNRGKGRAATSFSLSDVSMLCSDIPDLHSTAILQESVISHLIDNVTLTNENEPGSSISALIGQFDETNNQALTVVSHLHNTSVMSGHCPLPSLGLKMPIKHGFCKGKSKSSFLCSSPELIALSSSETTKHATNTVYETTCTPISKTKPDDDLSSKAKTAALESNLPGSPNTSRGWLPKSPTKGEDWETLKSCSPASSPDLTLEDVIADPTLCFNSGESSLVEIDGESENLSLTTCEYRREGTSQLASPLKLKYNQGVVEHFQRGLRNGYCKETLRPSVPEIFNNIQDVKTQSISYLAYQGAGFVHNHFSDSDAKMFQTCVPQQSSAQDMHVPVPKQLAHLPLPALKLPSPCKSKSLGDLTSEDIACNFESKYQCISKSFVTTGIRDKKGVTVKTKSLEPIDALTEQLRKLVSFDQEDNCQVLYSKQDANQLPRALVRKLSSRSQSRVRNIASRAKEKQEANKQKVPNPSNGAGVVLRNKPSAPTPAVNRHSTGSYIAGYLKNTKGGGLEGRGIPEGACTALHYGHVDQFCSDNSVLQTEPSSDDKPEIYFLLRL

SEQ ID NO: 4220 - DNA, 6435 bp, Homo sapiens
gtgtgagcgtgaggatttgaatgagaaagcaggttgtggcggcggcgccctgctcttccccgctcgtctggggcttctgctggctagtggggagaagtgctcttctaggggggcttttctggcccttggcaggggtttggagttggagtcacaggggccaataactcatcaccccagcacttcggaggtggctccttgtgccacggactccgaggagtccttcagctactgaacactcaaagctgaggagggcaatttggttttgatgctgtgccagaaatcttctgacaatgagttactggaacttggaaaaaaggaactgtgtgcagtaccgcaggcattttctggtggacaacagtgtgtttcatgttgaaagatgcatgagtgtgatgcagtccgggacacagatgatcaagctgaaacgtggaaccaaagggcttgtccgcctcttttacctggatgagcaccggacacgcctccgatggcgaccctctaggaagagtgagaaggcaaaaatacttattgattccatttacaaagtgactgagggccggcagtctgaaatattccacagacaagctgaggggaacttcgaccccagctgctgcttcaccatctaccatggcaaccacatggagtccctggacctcatcacctccaaccccgaggaggcccgcacctggatcacaggcctcaagtacctgatggctggcatcagtgatgaagactcccttgccaaaaggcagaggacccatgaccaatgggtgaagcagacctttgaggaagctgataagaatggtgacggcttgctgaatattgaagagatacatcagctgatgcataaactgaatgttaatctgccccgaagaaaagtcagacaaatgtttcaggaagccgacacagatgagaatcagggaactttgacatttgaagagttctgtgttttttacaaaatgatgtctttgagacgagacctttatttgttacttttgagctacagtgacaagaaagatcacctaactgtggaagaactggctcagtttttgaaggtggagcaaaagatgaataatgtgacaacggactattgtcttgacatcataaagaagtttgaagtttcagaagaaaataaggtgaaaaatgttcttggcatagaaggcttcacgaacttcatgcgtagtcctgcctgtgacatatttaacccattgcaccatgaagtgtaccaagacatggatcagcccctctgcaactactacattgcttcctctcacaatacatacctgactggagaccagctcctttctcagtccaaagtggatatgtatgcacgggtgctgcaagagggctgtcgctgtgtggaagttgactgttgggatggcccagatggagagccagtagtacatcatggttacactctcacttcaaaaattctcttcagagatgttgtggagaccatcaacaagcatgcctttgtgaagaatgagtttcctgttatattgtctatcgagaatcactgcagtatccagcagcaaaggaagattgctcagtacctgaaaggaatattcggagacaaactggacctgtcatctgttgatacaggggagtgcaagcagcttccaagccctcaaagtttgaaaggcaaaattctagtgaagggtaagaagttgccttatcaccttggggatgatgcagaggaaggggaagtttctgatgaggacagtgcagatgaaattgaagacgagtgcaaattcaagctccattatagtaatgggaccactgagcatcaggtggaatctttcataaggaaaaaactggagtcactgttaaaagaatctcaaattcgagataaagaagatcctgatagtttcacagtgcgggcactactgaaggccacgcatgaaggcttaaatgcacacctgaagcagagtccagatgtaaaggaaagtggaaagaaatcacatggacgatccctcatgaccaactttggaaaacataagaaaactacaaaatcacggtctaaatcttacagtactgatgatgaggaagacacacagcagagtactggcaaggagggtggccagctgtacagattgggtcgccgaaggaaaaccatgaagctctgccgagaactctctgatttggttgtgtacacaaactccgtggccgctcaggacattgtggatgacggaaccacaggaaatgtgttatcattcagtgaaacaagagcacatcaggttgttcagcaaaaatcagagcagttcatgatttataatcaaaagcaactcacgaggatttacccctctgcctaccgcattgattccagtaacttcaaccctctcccctactggaacgcaggctgccagctagtggcactgaattatcaatctgaaggacgaatgatgcagttaaaccgagccaaattcaaggcaaatggcaattgtggctatgtcctcaaaccccagcaaatgtgcaaaggtactttcaaccctttctctggtgaccctcttcctgccaaccccaaaaagcagctcatcctgaaagttatcagtggacagcaactccccaaacctccagactccatgtttggagatcgaggcgagatcattgacccttttgttgaagttgaaattattggattgccagtagattgttgtaaagatcaaacccgtgtggtagatgacaatggatttaaccctgtgtgggaagaaacactgacatttacagtacacatgccagaaatagctttggttcggttccttgtgtgggatcacgatcccattggacgagactttgttggacaaagaactgtgaccttcagcagcttagtgcctggctaccggcatgtctatttggaaggactgacagaagcatccatatttgtacacataaccatcaatgaaatctatggaaagaacagacaactccagggtctgaagggactgttcaataagaatcctaggcacagttcttcagaaaacaattcccattatgtacggaagcgatccattggagatagaattctgcgacgcacagctagcgccccagccaaaggcaggaaaaagagcaaaatgggcttccaagaaatggtggagataaaggattctgtgtccgaggccacaagagatcaagatggcgtgctgaggaggaccacacgcagtttgcaagcacgccctgtctctatgcctgttgacagaaaccttctgggagctttgtcgctgcctgtatctgaaacagcaaaagacattgaaggaaaagaaaactctctagcagaagataaagatggcagaagaaaagggaaagcaagtataaaagatccacattttctaaatttcaacaaaaagttatcatcctcctccagtgctctgctccacaaagataccagccaaggggacaccattgtatctactgcccacatgtcagtcacaggagaacagctgggcatgtcaagtcctaggggtgggagaaccacatcaaatgccacaagcaattgccaggaaaacccctgtcccagcaagtctctctccccaaagcagcatttggctcccgatcctgtagttaaccccacacaagatctgcatggtgtgaaaatcaaggaaaagggtaatcctgaggactttgtggaagggaaaagcatcttgtcaggaagcgtcctttctcatagcaacctagaaattaagaacctggaaggtaataggggtaagggccgagctgcaacatccttttctttgtcagacgtctccatgctctgttctgacatacctgacctacattcaactgcaattctgcaggagagtgtaatttcccatcttattgacaatgtcactttaacaaatgagaatgagccgggcagttccatctcagccctgattggccagtttgatgagaccaacaatcaggctctcacagttgtttctcatcttcataataccagtgtgatgtcaggccattgtcccttgcctagcctgggcctaaaaatgcccatcaagcatggtttttgcaagggaaaatccaagtcttccttcctgtgctcatctccggagctgatagcactctcgagttctgagaccaccaaacatgcaacgaacacagtttatgaaactacctgcactcccatctctaaaaccaaaccagatgatgacctttctagtaaggccaagacagcggccttagaaagcaacctgcctggatcccctaatacttctcgtggctggttaccaaaaagtcctaccaagggagaagactgggaaacactgaagagctgcagccctgcctcttcccctgatttgaccctggaggatgtaatagctgatcccactctctgtttcaattctggggagagcagccttgtggaaattgatggagaatcagaaaatctttctctaacaacctgtgaatataggagagagggcacaagtcaacttgcttctcctttaaaactcaagtacaatcagggtgtggtagaacactttcaaagaggtttgagaaacggctactgtaaagagaccctccgcccttctgtccctgaaatattcaacaatattcaagatgtcaaaactcaaagtatttcttatctagcctatcagggtgctggctttgtgcataatcatttctcagattcagatgcaaaaatgttccagacctgtgtgccccagcaatctagtgctcaagatatgcatgtccctgtacccaagcagttggcacatcttcctttgcctgctctgaaactgcctagtccttgcaaatccaaaagtctgggggacttaacatcagaggacattgcctgcaattttgagagcaagtaccagtgtattagtaagagttttgttacaactggcattagagacaagaagggcgtgactgtgaagacaaagtcgttagagcctatagatgccctgaccgagcagcttcggaagcttgtgtcctttgaccaggaagacaactgccaagtgctatattcaaagcaggatgccaatcagctcccccgggcactggtcaggaagttgtcatccagaagtcagagcagagtgcgcaatattgctagtcgtgccaaggagaaacaggaagccaacaagcagaaagttccaaaccccagcaatggggcaggagtggttcttagaaacaaaccctcagcacccacccctgcagtgaatcgccactccaccggctcctacatcgcaggctacctgaagaacacgaaagggggtggccttgaaggccggggcatcccagagggggcatgcacggctcttcactatggccacgttgaccagttttgttcagataattctgttttgcagactgagccaagcagtgatgataaaccagaaatttattttcttttgagactgtgaattatttaaaactgcattcttaaggttttcaaggtattctgtagaatgtcagagttttcagtaaataagttccttggctttggaatgattttcaaatgtatttttaaacttgtatttgggtctccctttgacttcatgtgttctccctgttaatgcgtttgtatatagatttggtgacatttcccatgtacctattatgatctttctcccttgagttgttgtaaactgtatcagtatgaaatatgtgcatgccctagatgtgaaactcctcagcagctcgggttataatgtgtgtgtgtttcaccaagatgtcctttactgtgtcctcagattgcagtcacaaatgtagtcatttttactctctaactgttgagttgattaagagactttgcaaacgacaaagggatgaattccttactttaatctgttatcatttttcctatgtttccctctttgttcagaagcccagatgcatttttataactcagttttaaaaactttaaaatagttaccttgccttttaggatgttcttatcccacccataatgagagttgaaaggggatggatagctgctccccatgcccttcccactttttggaataggccgtgagggtgtgaggaagaaggctgtcttttgtacataaggacaaaattgtttgttttacataaattttgttacatatttttgctaatggctttgtatgtaacaagaagcgagttgccaaactacctgttgtacttttgaattttctgattgaattacagactgcgaacaacggctttcagaatgagggacttccatcagactctaatgataatagtagcacaaattgaaaacttccccaaagctttcacagaatattttctcataataaaatccaagtgaacagataattagaagaaacccttttccttcagggaaccaagcaactctattttagtactgacatgcattattttcactgtgaattcacttttttattgcatgttcagatgtccctctttgttttttttttttgtaacattaactgcaatgatgttcttcctggaattcatgaaaatataattaaaacacatttttaaaca

SEQ ID NO: 4221 - protein, 1685 aa, Homo sapiens
MSYWNLEKRNCVQYRRHFLVDNSVFHVERCMSVMQSGTQMIKLKRGTKGLVRLFYLDEHRTRLRWRPSRKSEKAKILIDSIYKVTEGRQSEIFHRQAEGNFDPSCCFTIYHGNHMESLDLITSNPEEARTWITGLKYLMAGISDEDSLAKRQRTHDQWVKQTFEEADKNGDGLLNIEEIHQLMHKLNVNLPRRKVRQMFQEADTDENQGTLTFEEFCVFYKMMSLRRDLYLLLLSYSDKKDHLTVEELAQFLKVEQKMNNVTTDYCLDIIKKFEVSEENKVKNVLGIEGFTNFMRSPACDIFNPLHHEVYQDMDQPLCNYYIASSHNTYLTGDQLLSQSKVDMYARVLQEGCRCVEVDCWDGPDGEPVVHHGYTLTSKILFRDVVETINKHAFVKNEFPVILSIENHCSIQQQRKIAQYLKGIFGDKLDLSSVDTGECKQLPSPQSLKGKILVKGKKLPYHLGDDAEEGEVSDEDSADEIEDECKFKLHYSNGTTEHQVESFIRKKLESLLKESQIRDKEDPDSFTVRALLKATHEGLNAHLKQSPDVKESGKKSHGRSLMTNFGKHKKTTKSRSKSYSTDDEEDTQQSTGKEGGQLYRLGRRRKTMKLCRELSDLVVYTNSVAAQDIVDDGTTGNVLSFSETRAHQVVQQKSEQFMIYNQKQLTRIYPSAYRIDSSNFNPLPYWNAGCQLVALNYQSEGRMMQLNRAKFKANGNCGYVLKPQQMCKGTFNPFSGDPLPANPKKQLILKVISGQQLPKPPDSMFGDRGEIIDPFVEVEIIGLPVDCCKDQTRVVDDNGFNPVWEETLTFTVHMPEIALVRFLVWDHDPIGRDFVGQRTVTFSSLVPGYRHVYLEGLTEASIFVHITINEIYGKNRQLQGLKGLFNKNPRHSSSENNSHYVRKRSIGDRILRRTASAPAKGRKKSKMGFQEMVEIKDSVSEATRDQDGVLRRTTRSLQARPVSMPVDRNLLGALSLPVSETAKDIEGKENSLAEDKDGRRKGKASIKDPHFLNFNKKLSSSSSALLHKDTSQGDTIVSTAHMSVTGEQLGMSSPRGGRTTSNATSNCQENPCPSKSLSPKQHLAPDPVVNPTQDLHGVKIKEKGNPEDFVEGKSILSGSVLSHSNLEIKNLEGNRGKGRAATSFSLSDVSMLCSDIPDLHSTAILQESVISHLIDNVTLTNENEPGSSISALIGQFDETNNQALTVVSHLHNTSVMSGHCPLPSLGLKMPIKHGFCKGKSKSSFLCSSPELIALSSSETTKHATNTVYETTCTPISKTKPDDDLSSKAKTAALESNLPGSPNTSRGWLPKSPTKGEDWETLKSCSPASSPDLTLEDVIADPTLCFNSGESSLVEIDGESENLSLTTCEYRREGTSQLASPLKLKYNQGVVEHFQRGLRNGYCKETLRPSVPEIFNNIQDVKTQSISYLAYQGAGFVHNHFSDSDAKMFQTCVPQQSSAQDMHVPVPKQLAHLPLPALKLPSPCKSKSLGDLTSEDIACNFESKYQCISKSFVTTGIRDKKGVTVKTKSLEPIDALTEQLRKLVSFDQEDNCQVLYSKQDANQLPRALVRKLSSRSQSRVRNIASRAKEKQEANKQKVPNPSNGAGVVLRNKPSAPTPAVNRHSTGSYIAGYLKNTKGGGLEGRGIPEGACTALHYGHVDQFCSDNSVLQTEPSSDDKPEIYFLLRL

SEQ ID NO: 4222 - DNA, 1931 bp, Homo sapiens
aggaggccgggaacatggcggggcagcccgcggccaccggctcgccgtctgccgacaaggacggaatggagcccaacgtcgtggctcggatctcgcagtgggcagacgaccacctgcgcctagtccggggacacggtattcctctctggcccaagctggagtgcagtggcacgatcatagctcactgctgctgctccacccacttcggccgaaaagatcctcccacttcagcctcccgagtagctggaaccacagaacatcagcactggaatggccatagctggaataatgttacttttgagaagcattcgactgacatcaaaatttacaagctcttcggatattccagtagaatttataagaagaaatgttaaactacgtggacgattacgccgaataactgagaatggtttagaaattgaacatatacctattactttacctattatagcttcattgagaaaagagccacgtggtgctttgctggttaagttggctggagtagaactcgctgaaactgggaaggcatggttacaaaaagagctaaaaccttcccaattactatggttccaacttcttggaaaggagaattcagcactcttttgctatcttctggtgagtaagggtggatatttcagcgtgaatctgaatgaagaaattttgagaagaggccttggcaaaactgttcttgttaaagggcttaaatatgattctaaaatctactggacagttcacagaaacttacttaaagctgaattaacagccttaaaaaaaggagaaggaatatggaaggaagactctgaaaaagaaagttacttagaaaaattcaaagattcctggagagaaatatggaaaaaggacagttttttaaaaacaacaggatcagatttcagcttgaaaaaagaaagttattatgaaaaacttaaaaggacttatgaaatatggaaagacaacatgaacaactgctccttaatactgaagttcagagaacttataagtcgcataaactttcgtagaaaagggtgaaacggtcaagaaatctagaggtaaccttctccaaagagtgaaatatgtaaatatatggacgtttttcattgaatcaaaatggaagttttgccaaatgatcaaagtgttagtccaatggtatttaaatattaaaaagagatgattattataagcataatgtcagaattaatttaaacaaattataattaatgtaatatgattttaggaaggatgaaacactttatgagaagttaccaggctgaatgatttacatatatagtgctaatgtgtgaagagaaagtttaactcttcacccactatgttgtttttagttattttgggctgccatattgaattttttgtttgtttgttttgagaaggcgtttcgctcttgttgcccaggctggagtgcaatggcgtgatcttggctcactgcaacctcctgcttcctgggttcaagcgattctcctgcctcagcctcctgagtagctgggattacaggcatgcaccaccatgcccggctaattttgcatttttagtagagacggggtttctccatgttggtcaggctggtctcaaactcttgacttcagatgatctacccaccttggcatcctaaagtgctgggattacaggcgtgagctaccaagcccggctttttttgttttgacatggagtttcgctcttgtcacccaggcaggagtgcagtggcgttatcttggttcactgcaacctccgcctcctggattcaagtgattctcctgcctgagcctcccaagtacctgggattacaggagctcccaccaagcctggctaagttttgtattgccatattgaatttttgtttagaaaagatatgtgtttatgtttccagttttattacctttcactatttataataaaggaattctttatgctttatgtcc

SEQ ID NO: 4223 - protein, 251 aa, Homo sapiens; identical to SEQ ID NO: 439

SEQ ID NO: 4224 - DNA, 1860 bp, Homo sapiens
gccgccttcccgaggtgagcggcgccccctgccgccagccggaggagctcagggccgctcgcaggaggccgggaacatggcggggcagcccgcggccaccggctcgccgtctgccgacaaggacggaatggagcccaacgtcgtggctcggatctcgcagtgggcagacgaccacctgcgcctagtccggaacatcagcactggaatggccatagctggaataatgttacttttgagaagcattcgactgacatcaaaatttacaagctcttcggatattccagtagaatttataagaagaaatgttaaactacgtggacgattacgccgaataactgagaatggtttagaaattgaacatatacctattactttacctattatagcttcattgagaaaagagccacgtggtgctttgctggttaagttggctggagtagaactcgctgaaactgggaaggcatggttacaaaaagagctaaaaccttcccaattactatggttccaacttcttggaaaggagaattcagcactcttttgctatcttctggtgagtaagggtggatatttcagcgtgaatctgaatgaagaaattttgagaagaggccttggcaaaactgttcttgttaaagggcttaaatatgattctaaaatctactggacagttcacagaaacttacttaaagctgaattaacagccttaaaaaaaggagaaggaatatggaaggaagactctgaaaaagaaagttacttagaaaaattcaaagattcctggagagaaatatggaaaaaggacagttttttaaaaacaacaggatcagatttcagcttgaaaaaagaaagttattatgaaaaacttaaaaggacttatgaaatatggaaagacaacatgaacaactgctccttaatactgaagttcagagaacttataagtcgcataaactttcgtagaaaagggtgaaacggtcaagaaatctagaggtaaccttctccaaagagtgaaatatgtaaatatatggacgtttttcattgaatcaaaatggaagttttgccaaatgatcaaagtgttagtccaatggtatttaaatattaaaaagagatgattattataagcataatgtcagaattaatttaaacaaattataattaatgtaatatgattttaggaaggatgaaacactttatgagaagttaccaggctgaatgatttacatatatagtgctaatgtgtgaagagaaagtttaactcttcacccactatgttgtttttagttattttgggctgccatattgaattttttgtttgtttgttttgagaaggcgtttcgctcttgttgcccaggctggagtgcaatggcgtgatcttggctcactgcaacctcctgcttcctgggttcaagcgattctcctgcctcagcctcctgagtagctgggattacaggcatgcaccaccatgcccggctaattttgcatttttagtagagacggggtttctccatgttggtcaggctggtctcaaactcttgacttcagatgatctacccaccttggcatcctaaagtgctgggattacaggcgtgagctaccaagcccggctttttttgttttgacatggagtttcgctcttgtcacccaggcaggagtgcagtggcgttatcttggttcactgcaacctccgcctcctggattcaagtgattctcctgcctgagcctcccaagtacctgggattacaggagctcccaccaagcctggctaagttttgtattgccatattgaatttttgtttagaaaagatatgtgtttatgtttccagttttattacctttcactatttataataaaggaattctttatgcttt

SEQ ID NO: 4225 - protein, 294 aa, Homo sapiens
MAGQPAATGSPSADKDGMEPNVVARISQWADDHLRLVRNISTGMAIAGIMLLLRSIRLTSKFTSSSDIPVEFIRRNVKLRGRLRRITENGLEIEHIPITLPIIASLRKEPRGALLVKLAGVELAETGKAWLQKELKPSQLLWFQLLGKENSALFCYLLVSKGGYFSVNLNEEILRRGLGKTVLVKGLKYDSKIYWTVHRNLLKAELTALKKGEGIWKEDSEKESYLEKFKDSWREIWKKDSFLKTTGSDFSLKKESYYEKLKRTYEIWKDNMNNCSLILKFRELISRINFRRKG

SEQ ID NO: 4226 - DNA, 580 bp, Homo sapiens
attccctttcaggatgctcctacagcagctgcctaatactctcagttgcagtcagatgttggctgggaccacagtcatctaaggatactgctcaagctggctgttgtctggaaactcagctggggctactgatcagagcacctgcatgtggctgtccagcaaggcaatgttaaggaatcttggaaaatcaggactcagagtttcttgcttgggtcttggaacatgggtgacatttggaggtcaaatttcagatgaggtaagttacctttggcctctattatgctaatgaaagaaaatgcagagagagctgtattgcaggagtcctcttcctgggaccctgacactctacagggataaggtttaattcacaggaaatggtaaaattgactcagagattattgttgattttatttttcctgttgtattttttacatttagactattaatagcccttgaagctgtacattatatatgcaggttgaacagtcagagaatgaaacaatttggaattaacattagtcactttatgaaaagattgtattgctgtgatgttgttttgctttatttgtttgtttacttt

SEQ ID NO: 4227 - protein, 46 aa, Homo sapiens
MWLSSKAMLRNLGKSGLRVSCLGLGTWVTFGGQISDEVSYLWPLLC

SEQ ID NO: 4228 - DNA, 4059 bp, Homo sapiens
ttcagattactttgatgacagtgacttccagtcttctctgaaagatctccacgatgctggcagcccggacaggggcagcggggagtcagatctcagaggagaacaccaagttaaggagacagtctgggttttctgtagcagggaaagacaaatctcccaagaaagcctcagaaaacgctaaagacagcagccttagtccctcaggggaaagccagctcagggcgcgtcaactggctctgctgcgcgaagtggagatgaactggtacctaaagctctgcgacctgtccagcgagcacaccaccgtctgcaccacaggcatgccgcacaggaatcttggaaaatcaggactcagagtttcttgcttgggtcttggaacatgggtgacatttggaggtcaaatttcagatgaggttgctgaacggctgatgaccatcgcctatgaaagtggtgttaacctctttgatactgccgaagtctatgctgctggaaaggctgaagtgattctggggagcatcatcaagaagaaaggctggaggaggtccagtctggtcataacaaccaaactctactggggtggaaaagctgaaacagaaagagggctgtcaagaaagcatattattgaaggattgaagggctccctccagaggctgcagctcgagtatgtggatgtggtctttgcaaatcgaccggacagtaacactcccatggaagaaattgtccgagccatgacacatgtgataaaccaaggcatggcgatgtactggggcacctcgagatggagtgctatggagatcatggaagcctattctgtagcaagacagttcaatatgatcccaccggtctgtgaacaagctgagtaccatcttttccagagagagaaagtggaggtccagctgccagagctctaccacaaaataggtgttggcgcaatgacatggtctccacttgcctgtggaatcatctcaggaaaatacggaaacggggtgcctgaaagttccagggcttcactgaagtgctaccagtggttgaaagaaagaattgtaagtgaagaagggagaaaacagcaaaacaagctaaaagacctttccccaattgcggagcgtctgggatgcacactacctcagctagctgttgcgtggtgcctgagaaatgaaggtgtgagttctgtgctcctgggatcatccactcctgaacaactcattgaaaaccttggtgccattcaggttctcccaaagatgacatcacatgtggtaaatgagattgataacatactgcgcaacaagccctacagcaagaaggactatagatcataaggcaatgcatgaaccacagaagctgcatggttaaaatagcggcctgtgcccagtacagaaaggtgttactaaccagtcttttgaatcacttagcagcttgctgctcaacctctagtgtccctccctggattctttgaggtgtctgctgtcgctaccactgtgcacatctgaaaactcacaaccaagaaaatccattctattttcttatcttggactggagtcacctattcttgcattgctgtatacacctcatgcttatgcaatgggaagaatatgggggccagggggtgtggtactaccttcaggcatttggtaactcaaagaaggctgtacagatatattttttcaaaagaacaaaatccacagatgcaatgtgagttgcgtaagaaacagagtagatagactaaattcagtgaaggaaaggaattgagagatttttcttagtaaatagattattgttaagtaaatagttattaaaaatatatctcactgcaaaaaaaaaaaagcagtatcttcactcaaaagtcttgcttggaagaataagcagaaataattttatatattttttttctattttcacattcatactaacaagttttgttccatttgttattcaataaaacaaaaatttctaggtatttgctttattacctttcaaatatttactgttgcttggccccaagaatggccttgtacaacttatccagaatgtctattaggattctaatgttatgtccacttacaagtagagacagtaaaaggatgaatacccaatctttagtgacaatgcagctgatttatgaaagagagggctacactgctatggaaacttagcttcaaagaaaatgcaatgtatctgcaattaggtgttcattttttactacattttattaaaacctgctttatactttcaactgcttgtaggcacaacttctgcaagtttaaatatttgagctttacaaataaacatacacatgctcagttttttaagtaaacctgtaaaatacccaggaaggcaaatgttcattgtttaattagcactgggattttataatataatgtttggtatttttgaggcattgttaacatgaaagtcaaccactggctttgtgaaaaatgctatgtcactattcagaatatgctgggtaaattgacttgcctagtgaaaagcaaaatgttaaagaaagaacttctggttctataatcatattatatgcactaaactatatgcatgaaagttctttgcatggattaatggggcttacccttgttgcactcgaaatctgaggtgtatctagccctgccactattggctacttaccctcattaatatcccacttgagaaaaattgtgagactatactgtgtcaatatctgtaaaaagagagaaaacatgttttgtttttttttgaagggggtggtgtgggagtggccctttaactctatttggctatctgaggatgtacaaaattctcatttaattttctggtcagcaagttccccacacagaaatcactctgaggtttacagaagaactgtaatattattttaaaatgcgatttttctgtcattagttctagatatgtacttcatggttaaattctaaatctgaaaatgctagtgggagatatcaagaaattttctttttgattactagtacctgtattctaacagagagtttgaattttttgcccgtgttatcagaatgatggaaattgatcattttcagttgttcattgtgtattcaatccagcgaactgctgtatgtatagaggagctgaggtgctgtctaatgggaaatgtgatttgattgatttatttgcttagagtaataaaagcattttgtgcattcaatcttacaatagattttatctgatctttcactgtaaggcttatgtgtattttccatatatgtaaaacatacacatgtaaaatatatgtggccataaattaggcaataatcatctaaataaaaattatattggcagctaagctgcactgaatactcaacagaaatagtagtgatcaaaagtctgagatttaaattgcaatccaaacatattctatcatcaatcaatcaatggagattaactactgaagataccatttctcactgggttttagaacactccgcactaaggttaaggcttcacaaattcacttttaaaaacttacttgcaaatcaaaaccaaatataaatattatggcttagctgtgggaacagccagttttttatatgcgaatctgtcatggtaaatatactaatgtatttcacagttagttagttagttagttatgtccttaagaaaaaattccacgcactcttattattttcttttctcttccaaaaagaattccctggcagagaatctatcattccaaaaggtaacctgggtaccagccatccctatatggaaatctcaggcaaactagaaaccctgtgtctggcttcccactttaaaagaactgtcacttcatcttcatgacaagagtgccaaagtcatgaggcagatgtcagagcctgaaggaaacttagccatctgcaaagccatccctctttgacaaacgagcaaagcaggcctggacagatgatgaaaaaacttgcccaaactcacacactgctagttgatggcagaaccaggcctagaacccaagtattttgtgttctagttcagtgctccattaggtagatttttttttctttttaagctttaaagaagaagttttatgcagaaattgtttgtgag

SEQ ID NO: 4229 - protein, 419 aa, Homo sapiens; identical to SEQ ID NO: 446

SEQ ID NO: 4230 - DNA, 4190 bp, Homo sapiens
atgcacaggcctgggcagggacacacaaccaacagctctgtcgggaacttaggagcctgctcgcctacaaaaatgataagagagatctaaagaaaacaagctaaaccttttgagggacatactgaagccagataacccaaggtattcacagcaagatacagtgagtcttaaagttaagcaccgtgcaattagctttgcttccttgggtttttgaaacatgcatctgtataaacctgcctgtgcagacatcccgagccccaagctgggtctgccaaaatccagtgaatcggctctaaaatgtagatggcacctagcagtgaccaagactcagcctcaggcggcctgcaaacctgtgaggcccagtggagcagccgaacagaaatatgtggaaaagtttctacgtgttcatggaatttcgttgcaggaaaccaccagagcagagacgggcatggcatacaggaatcttggaaaatcaggactcagagtttcttgcttgggtcttggaacatgggtgacatttggaggtcaaatttcagatgaggttgctgaacggctgatgaccatcgcctatgaaagtggtgttaacctctttgatactgccgaagtctatgctgctggaaaggctgaagtgattctggggagcatcatcaagaagaaaggctggaggaggtccagtctggtcataacaaccaaactctactggggtggaaaagctgaaacagaaagagggctgtcaagaaagcatattattgaaggattgaagggctccctccagaggctgcagctcgagtatgtggatgtggtctttgcaaatcgaccggacagtaacactcccatggaagaaattgtccgagccatgacacatgtgataaaccaaggcatggcgatgtactggggcacctcgagatggagtgctatggagatcatggaagcctattctgtagcaagacagttcaatatgatcccaccggtctgtgaacaagctgagtaccatcttttccagagagagaaagtggaggtccagctgccagagctctaccacaaaataggtgttggcgcaatgacatggtctccacttgcctgtggaatcatctcaggaaaatacggaaacggggtgcctgaaagttccagggcttcactgaagtgctaccagtggttgaaagaaagaattgtaagtgaagaagggagaaaacagcaaaacaagctaaaagacctttccccaattgcggagcgtctgggatgcacactacctcagctagctgttgcgtggtgcctgagaaatgaaggtgtgagttctgtgctcctgggatcatccactcctgaacaactcattgaaaaccttggtgccattcaggttctcccaaagatgacatcacatgtggtaaatgagattgataacatactgcgcaacaagccctacagcaagaaggactatagatcataaggcaatgcatgaaccacagaagctgcatggttaaaatagcggcctgtgcccagtacagaaaggtgttactaaccagtcttttgaatcacttagcagcttgctgctcaacctctagtgtccctccctggattctttgaggtgtctgctgtcgctaccactgtgcacatctgaaaactcacaaccaagaaaatccattctattttcttatcttggactggagtcacctattcttgcattgctgtatacacctcatgcttatgcaatgggaagaatatgggggccagggggtgtggtactaccttcaggcatttggtaactcaaagaaggctgtacagatatattttttcaaaagaacaaaatccacagatgcaatgtgagttgcgtaagaaacagagtagatagactaaattcagtgaaggaaaggaattgagagatttttcttagtaaatagattattgttaagtaaatagttattaaaaatatatctcactgcaaaaaaaaaaaagcagtatcttcactcaaaagtcttgcttggaagaataagcagaaataattttatatattttttttctattttcacattcatactaacaagttttgttccatttgttattcaataaaacaaaaatttctaggtatttgctttattacctttcaaatatttactgttgcttggccccaagaatggccttgtacaacttatccagaatgtctattaggattctaatgttatgtccacttacaagtagagacagtaaaaggatgaatacccaatctttagtgacaatgcagctgatttatgaaagagagggctacactgctatggaaacttagcttcaaagaaaatgcaatgtatctgcaattaggtgttcattttttactacattttattaaaacctgctttatactttcaactgcttgtaggcacaacttctgcaagtttaaatatttgagctttacaaataaacatacacatgctcagttttttaagtaaacctgtaaaatacccaggaaggcaaatgttcattgtttaattagcactgggattttataatataatgtttggtatttttgaggcattgttaacatgaaagtcaaccactggctttgtgaaaaatgctatgtcactattcagaatatgctgggtaaattgacttgcctagtgaaaagcaaaatgttaaagaaagaacttctggttctataatcatattatatgcactaaactatatgcatgaaagttctttgcatggattaatggggcttacccttgttgcactcgaaatctgaggtgtatctagccctgccactattggctacttaccctcattaatatcccacttgagaaaaattgtgagactatactgtgtcaatatctgtaaaaagagagaaaacatgttttgtttttttttgaagggggtggtgtgggagtggccctttaactctatttggctatctgaggatgtacaaaattctcatttaattttctggtcagcaagttccccacacagaaatcactctgaggtttacagaagaactgtaatattattttaaaatgcgatttttctgtcattagttctagatatgtacttcatggttaaattctaaatctgaaaatgctagtgggagatatcaagaaattttctttttgattactagtacctgtattctaacagagagtttgaattttttgcccgtgttatcagaatgatggaaattgatcattttcagttgttcattgtgtattcaatccagcgaactgctgtatgtatagaggagctgaggtgctgtctaatgggaaatgtgatttgattgatttatttgcttagagtaataaaagcattttgtgcattcaatcttacaatagattttatctgatctttcactgtaaggcttatgtgtattttccatatatgtaaaacatacacatgtaaaatatatgtggccataaattaggcaataatcatctaaataaaaattatattggcagctaagctgcactgaatactcaacagaaatagtagtgatcaaaagtctgagatttaaattgcaatccaaacatattctatcatcaatcaatcaatggagattaactactgaagataccatttctcactgggttttagaacactccgcactaaggttaaggcttcacaaattcacttttaaaaacttacttgcaaatcaaaaccaaatataaatattatggcttagctgtgggaacagccagttttttatatgcgaatctgtcatggtaaatatactaatgtatttcacagttagttagttagttagttatgtccttaagaaaaaattccacgcactcttattattttcttttctcttccaaaaagaattccctggcagagaatctatcattccaaaaggtaacctgggtaccagccatccctatatggaaatctcaggcaaactagaaaccctgtgtctggcttcccactttaaaagaactgtcacttcatcttcatgacaagagtgccaaagtcatgaggcagatgtcagagcctgaaggaaacttagccatctgcaaagccatccctctttgacaaacgagcaaagcaggcctggacagatgatgaaaaaacttgcccaaactcacacactgctagttgatggcagaaccaggcctagaacccaagtattttgtgttctagttcagtgctccattaggtagatttttttttctttttaagctttaaagaagaagttttatgcagaaattgtttgtgag

SEQ ID NO: 4231 - protein, 408 aa, Homo sapiens; identical to SEQ ID NO: 442

SEQ ID NO: 4232 - DNA, 660 bp, Homo sapiens
ggctggaggaggaaaatccatgtctaagcagaacagctgtgtacgaggaggtccctccttaagcacagtttgcctaaacagctctgaaccgggatggtgccctaaaagggcgtttccggagtttagggtgagaacttaccactgtgcctgctagtgggggccttgagcctgttacatgaagaggagaatcatttgggagcctgcagcagtgattctgttctttcagagcgtctgtggattccctctgcttttctgcctgccttgccattgtcaacaaatggacctgattacacttgtacggttcaactctagttgaaaagaaaataagcctctgaacaaataagcatttgttcctccaggtagcctgtgatgccactgcagtggtggatgttccctgaacacgctgtgcattttctcacctcagggtcttcagtcaagctgctgcatctatgtggaattccctgtctgtctccaccaactgccaaatgcttgctgatctttcaagatggaagtgaaaggacactacctctcctaagctttccctagtgccttcatgtaccaccaacccccaagtcaaaatttacctccaccacctcagcactttcataacctctgcctgacctctactttaggacgaaataaaacttatcttgttctatt

SEQ ID NO: 4233 - protein, 46 aa, Homo sapiens
MKRRIIWEPAAVILFFQSVCGFPLLFCLPCHCQQMDLITLVRFNSS

SEQ ID NO: 4234 - DNA, 4873 bp, Homo sapiens
aattcactggcgtgttccgcggcataagcaccccctctctgccttcccccagttccaactgttgtgctgcagcagatttggtctgagtctgggcagagcccctttttatggagcaaccctcccgatttgttacagcaagagcctggtgcaagtgatctttgccttcccatcgcacacaaaggcaaagagctccttaaagggacctgcctgctcctccgtgcagctgcaaacccgtgtcggtgcaggctcagcaacccaggctttcgctcgagaatgagtggggaggggtcttgaggagcccccacgtcctcccggagcggaggcgggagggagctgacagccggagtggatggagaccaccagtccgaggggacccgcttgcgattagctgcttcttgggatgctccgcgcgccagttgagcatcctgcctgtggtccaggggatgctggcggcgcatcttgcggtaagcctgcgctgatttgagccatcgcccagaagcgagcccgcattcagacaccgcggaccggctccgcgaagggctgcgtgcagtcaccatgaatgctcagctctaggcttctgtaaaaacctcccccactgcatggatttggctgtttaatcagccgagattacagcccgggaagatttgcaaacctgattctccctccagctgctgtgacaacttcggggccgtctgtttacttctctgggtccccggggactctttcctgcatcgcagccccttgtgccactttgtgggcttggctcgaaagtcagccgccaggactcctctgacggcatccccaggaagggggagcaaggagggcttaaaagaaaagcagaaatccccgcaactgctcaacctctcgtgactgcctgtgttctggggttctgagagggaccgtgcgctgcctggggaagcaatgcaagtctccatagcctgcacagagcacaatttgaagagtcggaatggtgaggaccgacttctgagcaagcagagctccaccgcccccaatgtggtgaacgcagcccgggccaaattccgcacggtcgctatcatcgcgcgcagcctggggacgttcacgcctcagcatcacatttctctcaaagagtccaccgcaaagcagactggcatgaaatataggaatcttggaaaatcaggactcagagtttcttgcttgggtcttggaacatgggtgacatttggaggtcaaatttcagatgaggttgctgaacggctgatgaccatcgcctatgaaagtggtgttaacctctttgatactgccgaagtctatgctgctggaaaggctgaagtgattctggggagcatcatcaagaagaaaggctggaggaggtccagtctggtcataacaaccaaactctactggggtggaaaagctgaaacagaaagagggctgtcaagaaagcatattattgaaggattgaagggctccctccagaggctgcagctcgagtatgtggatgtggtctttgcaaatcgaccggacagtaacactcccatggaagaaattgtccgagccatgacacatgtgataaaccaaggcatggcgatgtactggggcacctcgagatggagtgctatggagatcatggaagcctattctgtagcaagacagttcaatatgatcccaccggtctgtgaacaagctgagtaccatcttttccagagagagaaagtggaggtccagctgccagagctctaccacaaaataggtgttggcgcaatgacatggtctccacttgcctgtggaatcatctcaggaaaatacggaaacggggtgcctgaaagttccagggcttcactgaagtgctaccagtggttgaaagaaagaattgtaagtgaagaagggagaaaacagcaaaacaagctaaaagacctttccccaattgcggagcgtctgggatgcacactacctcagctagctgttgcgtggtgcctgagaaatgaaggtgtgagttctgtgctcctgggatcatccactcctgaacaactcattgaaaaccttggtgccattcaggttctcccaaagatgacatcacatgtggtaaatgagattgataacatactgcgcaacaagccctacagcaagaaggactatagatcataaggcaatgcatgaaccacagaagctgcatggttaaaatagcggcctgtgcccagtacagaaaggtgttactaaccagtcttttgaatcacttagcagcttgctgctcaacctctagtgtccctccctggattctttgaggtgtctgctgtcgctaccactgtgcacatctgaaaactcacaaccaagaaaatccattctattttcttatcttggactggagtcacctattcttgcattgctgtatacacctcatgcttatgcaatgggaagaatatgggggccagggggtgtggtactaccttcaggcatttggtaactcaaagaaggctgtacagatatattttttcaaaagaacaaaatccacagatgcaatgtgagttgcgtaagaaacagagtagatagactaaattcagtgaaggaaaggaattgagagatttttcttagtaaatagattattgttaagtaaatagttattaaaaatatatctcactgcaaaaaaaaaaaagcagtatcttcactcaaaagtcttgcttggaagaataagcagaaataattttatatattttttttctattttcacattcatactaacaagttttgttccatttgttattcaataaaacaaaaatttctaggtatttgctttattacctttcaaatatttactgttgcttggccccaagaatggccttgtacaacttatccagaatgtctattaggattctaatgttatgtccacttacaagtagagacagtaaaaggatgaatacccaatctttagtgacaatgcagctgatttatgaaagagagggctacactgctatggaaacttagcttcaaagaaaatgcaatgtatctgcaattaggtgttcattttttactacattttattaaaacctgctttatactttcaactgcttgtaggcacaacttctgcaagtttaaatatttgagctttacaaataaacatacacatgctcagttttttaagtaaacctgtaaaatacccaggaaggcaaatgttcattgtttaattagcactgggattttataatataatgtttggtatttttgaggcattgttaacatgaaagtcaaccactggctttgtgaaaaatgctatgtcactattcagaatatgctgggtaaattgacttgcctagtgaaaagcaaaatgttaaagaaagaacttctggttctataatcatattatatgcactaaactatatgcatgaaagttctttgcatggattaatggggcttacccttgttgcactcgaaatctgaggtgtatctagccctgccactattggctacttaccctcattaatatcccacttgagaaaaattgtgagactatactgtgtcaatatctgtaaaaagagagaaaacatgttttgtttttttttgaagggggtggtgtgggagtggccctttaactctatttggctatctgaggatgtacaaaattctcatttaattttctggtcagcaagttccccacacagaaatcactctgaggtttacagaagaactgtaatattattttaaaatgcgatttttctgtcattagttctagatatgtacttcatggttaaattctaaatctgaaaatgctagtgggagatatcaagaaattttctttttgattactagtacctgtattctaacagagagtttgaattttttgcccgtgttatcagaatgatggaaattgatcattttcagttgttcattgtgtattcaatccagcgaactgctgtatgtatagaggagctgaggtgctgtctaatgggaaatgtgatttgattgatttatttgcttagagtaataaaagcattttgtgcattcaatcttacaatagattttatctgatctttcactgtaaggcttatgtgtattttccatatatgtaaaacatacacatgtaaaatatatgtggccataaattaggcaataatcatctaaataaaaattatattggcagctaagctgcactgaatactcaacagaaatagtagtgatcaaaagtctgagatttaaattgcaatccaaacatattctatcatcaatcaatcaatggagattaactactgaagataccatttctcactgggttttagaacactccgcactaaggttaaggcttcacaaattcacttttaaaaacttacttgcaaatcaaaaccaaatataaatattatggcttagctgtgggaacagccagttttttatatgcgaatctgtcatggtaaatatactaatgtatttcacagttagttagttagttagttatgtccttaagaaaaaattccacgcactcttattattttcttttctcttccaaaaagaattccctggcagagaatctatcattccaaaaggtaacctgggtaccagccatccctatatggaaatctcaggcaaactagaaaccctgtgtctggcttcccactttaaaagaactgtcacttcatcttcatgacaagagtgccaaagtcatgaggcagatgtcagagcctgaaggaaacttagccatctgcaaagccatccctctttgacaaacgagcaaagcaggcctggacagatgatgaaaaaacttgcccaaactcacacactgctagttgatggcagaaccaggcctagaacccaagtattttgtgttctagttcagtgctccattaggtagatttttttttctttttaagctttaaagaagaagttttatgcagaaattgtttgtgag

SEQ ID NO: 4235 - protein, 401 aa, Homo sapiens; identical to SEQ ID NO: 444

SEQ ID NO: 4236 - DNA, 4757 bp, Homo sapiens
accccctctctgccttcccccagttccaactgttgtgctgcagcagatttggtctgagtctgggcagagcccctttttatggagcaaccctcccgatttgttacagcaagagcctggtgcaagtgatctttgccttcccatcgcacacaaaggcaaagagctccttaaagggacctgcctgctcctccgtgcagctgcaaacccgtgtcggtgcaggctcagcaacccaggctttcgctcgagaatgagtggggaggggtcttgaggagcccccacgtcctcccggagcggaggcgggagggagctgacagccggagtggatggagaccaccagtccgaggggacccgcttgcgattagctgcttcttgggatgctccgcgcgccagttgagcatcctgcctgtggtccaggggatgctggcggcgcatcttgcggtaagcctgcgctgatttgagccatcgcccagaagcgagcccgcattcagacaccgcggaccggctccgcgaagggctgcgtgcagtcaccatgaatgctcagctctaggcttctgtaaaaacctcccccactgcatggatttggctgtttaatcagccgagattacagcccgggaagatttgcaaacctgattctccctccagctgctgtgacaacttcggggccgtctgtttacttctctgggtccccggggactctttcctgcatcgcagccccttgtgccactttgtgggcttggctcgaaagtcagccgccaggactcctctgacggcatccccaggaagggggagcaaggagggcttaaaagaaaagcagaaatccccgcaactgctcaacctctcgtgactgcctgtgttctggggttctgagagggaccgtgcgctgcctggggaagcaatgcaagtctccatagcctgcacagagcacaatttgaagagtcggaatggtgaggaccgacttctgagcaagcagagctccaccgcccccaatgtggtgaacgcagcccgggccaaattccgcacggtcgctatcatcgcgcgcagcctggggacgttcacgcctcagcatcacatttctctcaaagagtccaccgcaaagcagactggcatgaaatataggaatcttggaaaatcaggactcagagtttcttgcttgggtcttggaacatgggtgacatttggaggtcaaatttcagatgaggttgctgaacggctgatgaccatcgcctatgaaagtggtgttaacctctttgatactgccgaagtctatgctgctggaaaggctgaagtgattctggggagcatcatcaagaagaaaggctggaggaggtccagtctggtcataacaaccaaactctactggggtggaaaagctgaaacagaaagagggctgtcaagaaagcatattattgaagaaattgtccgagccatgacacatgtgataaaccaaggcatggcgatgtactggggcacctcgagatggagtgctatggagatcatggaagcctattctgtagcaagacagttcaatatgatcccaccggtctgtgaacaagctgagtaccatcttttccagagagagaaagtggaggtccagctgccagagctctaccacaaaataggtgttggcgcaatgacatggtctccacttgcctgtggaatcatctcaggaaaatacggaaacggggtgcctgaaagttccagggcttcactgaagtgctaccagtggttgaaagaaagaattgtaagtgaagaagggagaaaacagcaaaacaagctaaaagacctttccccaattgcggagcgtctgggatgcacactacctcagctagctgttgcgtggtgcctgagaaatgaaggtgtgagttctgtgctcctgggatcatccactcctgaacaactcattgaaaaccttggtgccattcaggttctcccaaagatgacatcacatgtggtaaatgagattgataacatactgcgcaacaagccctacagcaagaaggactatagatcataaggcaatgcatgaaccacagaagctgcatggttaaaatagcggcctgtgcccagtacagaaaggtgttactaaccagtcttttgaatcacttagcagcttgctgctcaacctctagtgtccctccctggattctttgaggtgtctgctgtcgctaccactgtgcacatctgaaaactcacaaccaagaaaatccattctattttcttatcttggactggagtcacctattcttgcattgctgtatacacctcatgcttatgcaatgggaagaatatgggggccagggggtgtggtactaccttcaggcatttggtaactcaaagaaggctgtacagatatattttttcaaaagaacaaaatccacagatgcaatgtgagttgcgtaagaaacagagtagatagactaaattcagtgaaggaaaggaattgagagatttttcttagtaaatagattattgttaagtaaatagttattaaaaatatatctcactgcaaaaaaaaaaaagcagtatcttcactcaaaagtcttgcttggaagaataagcagaaataattttatatattttttttctattttcacattcatactaacaagttttgttccatttgttattcaataaaacaaaaatttctaggtatttgctttattacctttcaaatatttactgttgcttggccccaagaatggccttgtacaacttatccagaatgtctattaggattctaatgttatgtccacttacaagtagagacagtaaaaggatgaatacccaatctttagtgacaatgcagctgatttatgaaagagagggctacactgctatggaaacttagcttcaaagaaaatgcaatgtatctgcaattaggtgttcattttttactacattttattaaaacctgctttatactttcaactgcttgtaggcacaacttctgcaagtttaaatatttgagctttacaaataaacatacacatgctcagttttttaagtaaacctgtaaaatacccaggaaggcaaatgttcattgtttaattagcactgggattttataatataatgtttggtatttttgaggcattgttaacatgaaagtcaaccactggctttgtgaaaaatgctatgtcactattcagaatatgctgggtaaattgacttgcctagtgaaaagcaaaatgttaaagaaagaacttctggttctataatcatattatatgcactaaactatatgcatgaaagttctttgcatggattaatggggcttacccttgttgcactcgaaatctgaggtgtatctagccctgccactattggctacttaccctcattaatatcccacttgagaaaaattgtgagactatactgtgtcaatatctgtaaaaagagagaaaacatgttttgtttttttttgaagggggtggtgtgggagtggccctttaactctatttggctatctgaggatgtacaaaattctcatttaattttctggtcagcaagttccccacacagaaatcactctgaggtttacagaagaactgtaatattattttaaaatgcgatttttctgtcattagttctagatatgtacttcatggttaaattctaaatctgaaaatgctagtgggagatatcaagaaattttctttttgattactagtacctgtattctaacagagagtttgaattttttgcccgtgttatcagaatgatggaaattgatcattttcagttgttcattgtgtattcaatccagcgaactgctgtatgtatagaggagctgaggtgctgtctaatgggaaatgtgatttgattgatttatttgcttagagtaataaaagcattttgtgcattcaatcttacaatagattttatctgatctttcactgtaaggcttatgtgtattttccatatatgtaaaacatacacatgtaaaatatatgtggccataaattaggcaataatcatctaaataaaaattatattggcagctaagctgcactgaatactcaacagaaatagtagtgatcaaaagtctgagatttaaattgcaatccaaacatattctatcatcaatcaatcaatggagattaactactgaagataccatttctcactgggttttagaacactccgcactaaggttaaggcttcacaaattcacttttaaaaacttacttgcaaatcaaaaccaaatataaatattatggcttagctgtgggaacagccagttttttatatgcgaatctgtcatggtaaatatactaatgtatttcacagttagttagttagttagttatgtccttaagaaaaaattccacgcactcttattattttcttttctcttccaaaaagaattccctggcagagaatctatcattccaaaaggtaacctgggtaccagccatccctatatggaaatctcaggcaaactagaaaccctgtgtctggcttcccactttaaaagaactgtcacttcatcttcatgacaagagtgccaaagtcatgaggcagatgtcagagcctgaaggaaacttagccatctgcaaagccatccctctttgacaaacgagcaaagcaggcctggacagatgatgaaaaaacttgcccaaactcacacactgctagttgatggcagaaccaggcctagaacccaagtattttgtgttctagttcagtgctccattaggtagatttttttttctttttaagctttaaagaagaagttttatgcagaaattgtttgtgag

SEQ ID NO: 4237 - protein, 372 aa, Homo sapiens
MQVSIACTEHNLKSRNGEDRLLSKQSSTAPNVVNAARAKFRTVAIIARSLGTFTPQHHISLKESTAKQTGMKYRNLGKSGLRVSCLGLGTWVTFGGQISDEVAERLMTIAYESGVNLFDTAEVYAAGKAEVILGSIIKKKGWRRSSLVITTKLYWGGKAETERGLSRKHIIEEIVRAMTHVINQGMAMYWGTSRWSAMEIMEAYSVARQFNMIPPVCEQAEYHLFQREKVEVQLPELYHKIGVGAMTWSPLACGIISGKYGNGVPESSRASLKCYQWLKERIVSEEGRKQQNKLKDLSPIAERLGCTLPQLAVAWCLRNEGVSSVLLGSSTPEQLIENLGAIQVLPKMTSHVVNEIDNILRNKPYSKKDYRS

SEQ ID NO: 4238 - DNA, 545 bp, Homo sapiens
agcagatttggtctgagtctgggcagagcccctttttatggagcaaccctcccgatttgttacagcaagagcctggtgcaagtgatctttgccttcccatcgcacacaaaggcaaagagctccttaaagggacctgcctgctcctccgtgcagctgcaaacccgtgtcggtgcaggctcagcaacccaggctttcgctcgagaatgagtggggaggggtcttgaggagcccccacgtcctcccggagcggaggcgggagggagctgacagccggagtggatggagaccaccagtccgaggggacttggctcgaaagtcagccgccaggactcctctgacggcatccccaggaagggggagcaaggagggcttaaaagaaaagcagaaatccccgcaactgctcaacctctcgtgactgcctgtgttctggggttctgagagggaccgtgcgctgcctggggaagcaatgcaagtctccatagcctgcacagagcacaatttgaagagtcggaatggtgaggaccgacttctgagcaagcagagct

SEQ ID NO: 4239 - protein, 52 aa, Homo sapiens [sequence omitted]

SEQ ID NO: 4240 - DNA, 2050 bp, Homo sapiens
cttgtttatttatttattttatttaacaaggcgaccagttaggggacccaggttaagcccttcaacagaactatcctgaagagcaaaagtagcaaatgacaggctatgactagggattgaatttggggaaggctggatttgtgaaatgagagccaaaaaagttttcaccttctagcccacaggttaagttactgaaaatcagtcatcaccatttctacccacttgtgtgtttctcctactctggagagtaatctaactcatcatttgcaatcagggcctctgagttctgtttgtgtttgcttttgctcttcgctttgctacttgtccggccgtttgccttcgcatctgacatctgttggtaatagaagcctttgtcttcagtgggcccgccccagtcctcctggctctcgccctctgtggcgtaggagaaaccctcctccactgagaaggggtcatccacgtcgtagcgttggtacgtgctttggtgcagggcctcttctcgagcgctgatttccagggtgctgttccagatgccatatccaaaataaatgagcagacctgtggggcgaggggaaagataagtaaactgaggcccaaagaagttaagtaaatttcccaaagtcacaagacaaaggaggggcagagctgtgatttgaagttggtgctgtttgactccaaaggctgtcagcttctttgggcaaagactgagtcatctctgcattctcagcacctggtgcaatttaagcagaaatatcttgaagatttttcgtatcttcagggagattaggaatgggaatggaatgggaacgccaatgcaggaaggatgagaagagagtgtctgcagatctgataataactgtaaaataacatggccacactgagatacagagggaaggttaagcctccttgaacttacttaaattggtggcagcacgagctttcagcatcatggccagcatgaccaagccatttccctggtgttcccctcagcatgaaacatctgtctacttatttctttgctgagcctgaatggaatattccatctctgaaaaataaactttgtgtttaaattgaaatctttattcctatctggcaaattggctatatatcctcaacaattggaaggaagtgatgtatctgctgccatcagctacaaagcactggacgcccactgtgctatttattagatttacatgaattccaggtgaatctgatccagtggctacaaaaaaagatctgaaacttctataagcccagcatctaaatcagtttttgactgaaatgagtacaggcaagctctgaggcagctctatccagggctatgacaagaatgaagtgaacacattttaccctacatggaaatgtccattccaacaagtgctaatttgacaatggtaatgattactatgggttgaattggattatcccaaaagatatgttaaagtcctaacccctggttcctgtaaatgtgattgtatttggaaataggatggatgcagatatcattagttaacatactggagtagggtggatctttaattaaataaaactgatgtctttgtaagaagagaagagacacagacacagagggaagatgaccatgtgaagatggaggcagagattgaaattatgctgccacaagccaaggaactcttggggctaccagaagctggacgagggcaagggagaattgcctgtagagcttcgaaggggacatagctcttctatcagcttgatttcagaattcctgcctccagaactgcgagacaaaaaagctctgttgttttaagccacctagtttgtgttactttgttatggcagcccttggaaattaacaatgattataatagtaatatgaataatagcaacagcatctcatttactgttttctatgtgttaataacaattccaagtgctttacacatattatgggctttagggtctcattttacagataaggaagcaagtagagaaagcaaaagaaagacattgaaacgtgcaatggggaaatttgtttccatacaaataaaacaaaccatctgaggagcct

SEQ ID NO: 4241 - protein, 62 aa, Homo sapiens [sequence omitted]

SEQ ID NO: 4242 - DNA, 1932 bp, Homo sapiens
ggtcagaaacacaaccaagacgcgaggatcctgaactgtttttcgagactccctggcagctgccatgagcagaaagacaggaagcccaagaggtcaacctggaggtttaatttggaccttactcatccagtagaagatggaatttttgattctggaaattttgagcaatttctacgggagaaggttaaagtcaatggcaaaactggaaatctcgggaatgttgttcacattgaacgcttcaagaataaaatcacagttgtttctgagaaacagttctctaaaaggtatttgaaataccttaccaagaaataccttaagaagaacaatcttcgtgattggcttcgagtggttgcatctgacaaggagacctacgaacttcgttacttccagattagtcaagatgaagatgaatcagagtcggaggactaggcaaaggctccccttacagggctttgcttattaataaaataaatgaagtatacatgagaaataccaagaaattggcttttagtttatcagtgaataaaaaatattatactcttgaacttttgtctcatttttttgagtatgctgtttatatgattttgatttccctctgataactatcaacagtatttaaatagcttatagctggtataattttttcccacgatttccaaaatcttttatgtactcaggtaaaagtagcgttatataggaaatcttttttttagacactctcgttctgtcacccaggctggagtgcagtgactcagcttcctaaatagctggaattacaggtgtgagccaccatgcccggctaattttttgtacttttagtagagtagggtttggccatgttggccaggctggtttcaaactcctgacctcaagtgatctacccacctcggcttcccaaagtgctgattatagctgtgaaccaccatgcccggccaggaaatcttactgtagaacaattttttatatagctgtataaaatgtatatgattgtcttgacagtctcaaatactgtttttaatagcttgtaaatgtaatctcaagtgcttagaacagttcttacatataagttgctctgtagtttgctcttatagttagcccaaagactctgggtgtgaggcctgctgtaaaccaatgttaaactgcttattagaaagccctaaccacctgctttgtaggcaccagaaactcaaaaccaaatctcaactcagctacagaatctactgtggtccttgtctgaaaaaattagttcactcggttggaatcttgtctcagagcatcctcatctctttctcaaaagcccctaccccaacaccggcgtgttggttgtctattgaaacttacaagtggatggaccctttctcccgaataaactggcctttgaaagctctaatcgaaatggtttggcaaaatccatactgcaggagattagggaggacaagaatgatgtgcctttttgtactgctgagcctgatggtggtgccactacttcaggtacttagatgagtcttgatgctaatagaattgtgtcgccaaacatatctggacagttacaacctaatctatgcattaattggtttgggaattgcttgaaattattgtttaattcaatgttttaattcgttttcctaaaaatttaagtgcccccatcatcgtgcaatacctcagtgcagcaactccttgattcttggatgactgaacttcctaacttggctctgccccattgttcccatttttcatgtttttcacaaatagttaaccaggtacctactactgtgcaccgctgcagagcattgaggatgtatgtgatgagtaaaaacacccagcctgctctgctgtgttagtattatgacggaaactgatcaaatcacatgtgaacaaatttactgctacaaaagggagggcttaataaaaggaatttcatctgggaaggca

SEQ ID NO: 4243 - protein, 51 aa, Homo sapiens
MEFLILEILSNFYGRRLKSMAKLEISGMLFTLNASRIKSQLFLRNSSLKGI

SEQ ID NO: 4244 - DNA, 2188 bp, Homo sapiens
ctcgcgtgcgtccgtatccgggagcagccactaggtaactgtagaggccactgcaattaatcggcttgaacagccaggagcggaaacccgagagtcagttcaaccacagccacccgcgtgtgcccgcggaaagccgatggcctactctcgtccggcagcgcactggtttcctgggttaccggcctcagcgctcctcccgctttcttttccgggaggcgacaatctgacgctctcagcgcgtgacgcagcacgctttgatataaatgcagaccgcgcggccgtagcttcctctctgctctcgcggccgactcgcaagatggcgccgcagaaagacaggaagcccaagaggtcaacctggaggtttaatttggaccttactcatccagtagaagatggaatttttgattctggaaattttgagcaatttctacgggagaaggttaaagtcaatggcaaaactggaaatctcgggaatgttgttcacattgaacgcttcaagaataaaatcacagttgtttctgagaaacagttctctaaaaggtatttgaaataccttaccaagaaataccttaagaagaacaatcttcgtgattggcttcgagtggttgcatctgacaaggagacctacgaacttcgttacttccagattagtcaagatgaagatgaatcagagtcggaggactaggcaaaggctccccttacagggctttgcttattaataaaataaatgaagtatacatgagaaataccaagaaattggcttttagtttatcagtgaataaaaaatattatactcttgaacttttgtctcatttttttgagtatgctgtttatatgattttgatttccctctgataactatcaacagtatttaaatagcttatagctggtataattttttcccacgatttccaaaatcttttatgtactcaggtaaaagtagcgttatataggaaatcttttttttagacactctcgttctgtcacccaggctggagtgcagtgactcagcttcctaaatagctggaattacaggtgtgagccaccatgcccggctaattttttgtacttttagtagagtagggtttggccatgttggccaggctggtttcaaactcctgacctcaagtgatctacccacctcggcttcccaaagtgctgattatagctgtgaaccaccatgcccggccaggaaatcttactgtagaacaattttttatatagctgtataaaatgtatatgattgtcttgacagtctcaaatactgtttttaatagcttgtaaatgtaatctcaagtgcttagaacagttcttacatataagttgctctgtagtttgctcttatagttagcccaaagactctgggtgtgaggcctgctgtaaaccaatgttaaactgcttattagaaagccctaaccacctgctttgtaggcaccagaaactcaaaaccaaatctcaactcagctacagaatctactgtggtccttgtctgaaaaaattagttcactcggttggaatcttgtctcagagcatcctcatctctttctcaaaagcccctaccccaacaccggcgtgttggttgtctattgaaacttacaagtggatggaccctttctcccgaataaactggcctttgaaagctctaatcgaaatggtttggcaaaatccatactgcaggagattagggaggacaagaatgatgtgcctttttgtactgctgagcctgatggtggtgccactacttcaggtacttagatgagtcttgatgctaatagaattgtgtcgccaaacatatctggacagttacaacctaatctatgcattaattggtttgggaattgcttgaaattattgtttaattcaatgttttaattcgttttcctaaaaatttaagtgcccccatcatcgtgcaatacctcagtgcagcaactccttgattcttggatgactgaacttcctaacttggctctgccccattgttcccatttttcatgtttttcacaaatagttaaccaggtacctactactgtgcaccgctgcagagcattgaggatgtatgtgatgagtaaaaacacccagcctgctctgctgtgttagtattatgacggaaactgatcaaatcacatgtgaacaaatttactgctacaaaagggagggcttaataaaaggaatttcatctgggaaggca

SEQ ID NO: 4245 - protein, 182 aa, Homo sapiens
MAYSRPAAHWFPGLPASALLPLSFPGGDNLTLSARDAARFDINADRAAVASSLLSRPTRKMAPQKDRKPKRSTWRFNLDLTHPVEDGIFDSGNFEQFLREKVKVNGKTGNLGNVVHIERFKNKITVVSEKQFSKRYLKYLTKKYLKKNNLRDWLRVVASDKETYELRYFQISQDEDESESED

SEQ ID NO: 4246 - DNA, 2255 bp, Homo sapiens
ctcgcgtgcgtccgtatccgggagcagccactaggtaactgtagaggccactgcaattaatcggcttgaacagccaggagcggaaacccgagagtcagttcaaccacagccacccgcgtgtgcccgcggaaagccgatggcctactctcgtccggcagcgcactggtttcctgggttaccggcctcagcgctcctcccgctttcttttccgggaggcgacaatctgacgctctcagcgcgtgacgcagcacgctttgatataaatgcagaccgcgcggccgtagcttcctctctgctctcgcggccgactcgcaagatggcgccgcagaaagacaggaagcccaagaggtcaacctggaggtttaatttggaccttactcatccagtagaagatggaatttttgattctggaaattttggtaccttccctagtgaatatctagggttctcttccctagttttgcattttttctgttttaaaataggagcaatttctacgggagaaggttaaagtcaatggcaaaactggaaatctcgggaatgttgttcacattgaacgcttcaagaataaaatcacagttgtttctgagaaacagttctctaaaaggtatttgaaataccttaccaagaaataccttaagaagaacaatcttcgtgattggcttcgagtggttgcatctgacaaggagacctacgaacttcgttacttccagattagtcaagatgaagatgaatcagagtcggaggactaggcaaaggctccccttacagggctttgcttattaataaaataaatgaagtatacatgagaaataccaagaaattggcttttagtttatcagtgaataaaaaatattatactcttgaacttttgtctcatttttttgagtatgctgtttatatgattttgatttccctctgataactatcaacagtatttaaatagcttatagctggtataattttttcccacgatttccaaaatcttttatgtactcaggtaaaagtagcgttatataggaaatcttttttttagacactctcgttctgtcacccaggctggagtgcagtgactcagcttcctaaatagctggaattacaggtgtgagccaccatgcccggctaattttttgtacttttagtagagtagggtttggccatgttggccaggctggtttcaaactcctgacctcaagtgatctacccacctcggcttcccaaagtgctgattatagctgtgaaccaccatgcccggccaggaaatcttactgtagaacaattttttatatagctgtataaaatgtatatgattgtcttgacagtctcaaatactgtttttaatagcttgtaaatgtaatctcaagtgcttagaacagttcttacatataagttgctctgtagtttgctcttatagttagcccaaagactctgggtgtgaggcctgctgtaaaccaatgttaaactgcttattagaaagccctaaccacctgctttgtaggcaccagaaactcaaaaccaaatctcaactcagctacagaatctactgtggtccttgtctgaaaaaattagttcactcggttggaatcttgtctcagagcatcctcatctctttctcaaaagcccctaccccaacaccggcgtgttggttgtctattgaaacttacaagtggatggaccctttctcccgaataaactggcctttgaaagctctaatcgaaatggtttggcaaaatccatactgcaggagattagggaggacaagaatgatgtgcctttttgtactgctgagcctgatggtggtgccactacttcaggtacttagatgagtcttgatgctaatagaattgtgtcgccaaacatatctggacagttacaacctaatctatgcattaattggtttgggaattgcttgaaattattgtttaattcaatgttttaattcgttttcctaaaaatttaagtgcccccatcatcgtgcaatacctcagtgcagcaactccttgattcttggatgactgaacttcctaacttggctctgccccattgttcccatttttcatgtttttcacaaatagttaaccaggtacctactactgtgcaccgctgcagagcattgaggatgtatgtgatgagtaaaaacacccagcctgctctgctgtgttagtattatgacggaaactgatcaaatcacatgtgaacaaatttactgctacaaaagggagggcttaataaaaggaatttcatctgggaaggca

SEQ ID NO: 4247 - protein, 124 aa, Homo sapiens
MAYSRPAAHWFPGLPASALLPLSFPGGDNLTLSARDAARFDINADRAAVASSLLSRPTRKMAPQKDRKPKRSTWRFNLDLTHPVEDGIFDSGNFGTFPSEYLGFSSLVLHFFCFKIGAISTGEG

SEQ ID NO: 4248 - DNA, 543 bp, Homo sapiens
ggtcagaaacacaaccaagacgcgaggatcctgaactgtttttcgagactccctggcagctgccatgagcagaaagacaggaagcccaagaggtcaacctggaggtttaatttggaccttactcatccagtagaagatggaatttttgattctggaaattttgagcaatttctacgggagaaggttaaagtcaatggcaaaactggaaatctcgggaatgttgttcacattgaacgcttcaagaataaaatcacagttgtttctgagaaacagttctctaaaaggtatttgaaataccttaccaagaaataccttaagaagaacaatcttcgtgattggcttcgagtggttgcatctgacaaggagacctacgaacttcgttacttccagattagtcaagatgaagatgaatcagagtcggaggactaggcaaaggctccccttacagggctttgcttattaataaaataaatgaagtatacatgagaaataccaagaaattggcttttagtttatcagtgaataaaaaatattatactcttg

SEQ ID NO: 4249 - protein, 51 aa, Homo sapiens; identical to SEQ ID NO: 4243

SEQ ID NO: 4250 - DNA, 866 bp, Homo sapiens
ctcgcgtgcgtccgtatccgggagcagccactaggtaactgtagaggccactgcaattaatcggcttgaacagccaggagcggaaacccgagagtcagttcaaccacagccacccgcgtgtgcccgcggaaagccgatggcctactctcgtccggcagcgcactggtttcctgggttaccggcctcagcgctcctcccgctttcttttccgggaggcgacaatctgacgctctcagcgcgtgacgcagcacgctttgatataaatgcagaccgcgcggccgtagcttcctctctgctctcgcggccgactcgcaagatggcgccgcagaaagacaggaagcccaagaggtcaacctggaggtttaatttggaccttactcatccagtagaagatggaatttttgattctggaaattttggtaccttccctagtgaatatctagggttctcttccctagttttgcattttttctgttttaaaataggagcaatttctacgggagaaggttaaagtcaatggcaaaactggaaatctcgggaatgttgttcacattgaacgcttcaagaataaaatcacagttgtttctgagaaacagttctctaaaaggtatttgaaataccttaccaagaaataccttaagaagaacaatcttcgtgattggcttcgagtggttgcatctgacaaggagacctacgaacttcgttacttccagattagtcaagatgaagatgaatcagagtcggaggactaggcaaaggctccccttacagggctttgcttattaataaaataaatgaagtatacatgagaaataccaagaaattggcttttagtttatcagtgaataaaaaatattatactcttg

SEQ ID NO: 4251 - protein, 124 aa, Homo sapiens; identical to SEQ ID NO: 4247

SEQ ID NO: 4252 - DNA, 799 bp, Homo sapiens
ctcgcgtgcgtccgtatccgggagcagccactaggtaactgtagaggccactgcaattaatcggcttgaacagccaggagcggaaacccgagagtcagttcaaccacagccacccgcgtgtgcccgcggaaagccgatggcctactctcgtccggcagcgcactggtttcctgggttaccggcctcagcgctcctcccgctttcttttccgggaggcgacaatctgacgctctcagcgcgtgacgcagcacgctttgatataaatgcagaccgcgcggccgtagcttcctctctgctctcgcggccgactcgcaagatggcgccgcagaaagacaggaagcccaagaggtcaacctggaggtttaatttggaccttactcatccagtagaagatggaatttttgattctggaaattttgagcaatttctacgggagaaggttaaagtcaatggcaaaactggaaatctcgggaatgttgttcacattgaacgcttcaagaataaaatcacagttgtttctgagaaacagttctctaaaaggtatttgaaataccttaccaagaaataccttaagaagaacaatcttcgtgattggcttcgagtggttgcatctgacaaggagacctacgaacttcgttacttccagattagtcaagatgaagatgaatcagagtcggaggactaggcaaaggctccccttacagggctttgcttattaataaaataaatgaagtatacatgagaaataccaagaaattggcttttagtttatcagtgaataaaaaatattatactcttg

SEQ ID NO: 4253 - protein, 182 aa, Homo sapiens; identical to SEQ ID NO: 4245

SEQ ID NO: 4254 - DNA, 820 bp, Homo sapiens
ctcgcgtgcgtccgtatccgggagcagccactaggtaactgtagaggccactgcaattaatcggcttgaacagccaggagcggaaacccgagagtcagttcaaccacagccacccgcgtgtgcccgcggaaagccgatggcctactctcgtccggcagcgcactggtttcctgggttaccggcctcagcgctcctcccgctttcttttccgggaggcgacaatctgacgctctcagcgcgtgacgcagcacgctttgatataaatgcagaccgcgcggccgtagcttcctctctgctctcgcggccgactcgcaagatggcgccgcagaaagacaggaagcccaagaggtcaacctggaggtttaatttggaccttactcatccagtagaagatggaatttttgattctggaaattttggtaccttccctagtgaatatctagggttctcttccctagttttgcattttttctgttttaaaataggagcaatttctacgggagaaggttaaagtcaatggcaaaactggaaatctcgggaatgttgttcacattgaacgcttcaagaataaaatcacagttgtttctgagaaacagttctctaaaaggtatttgaaataccttaccaagaaataccttaagaagaacaatcttcgtgattggcttcgagtggttgcatctgacaaggagacctacgaacttcgttacttccagattagtcaagatgaagatgaatcagagtcggaggactaggcaaaggctccccttacagggctttgcttattaataaaataaatgaagtatacatgagaaataccaag

SEQ ID NO: 4255 - protein, 124 aa, Homo sapiens; identical to SEQ ID NO: 4247

SEQ ID NO: 4256 - DNA, 753 bp, Homo sapiens
ctcgcgtgcgtccgtatccgggagcagccactaggtaactgtagaggccactgcaattaatcggcttgaacagccaggagcggaaacccgagagtcagttcaaccacagccacccgcgtgtgcccgcggaaagccgatggcctactctcgtccggcagcgcactggtttcctgggttaccggcctcagcgctcctcccgctttcttttccgggaggcgacaatctgacgctctcagcgcgtgacgcagcacgctttgatataaatgcagaccgcgcggccgtagcttcctctctgctctcgcggccgactcgcaagatggcgccgcagaaagacaggaagcccaagaggtcaacctggaggtttaatttggaccttactcatccagtagaagatggaatttttgattctggaaattttgagcaatttctacgggagaaggttaaagtcaatggcaaaactggaaatctcgggaatgttgttcacattgaacgcttcaagaataaaatcacagttgtttctgagaaacagttctctaaaaggtatttgaaataccttaccaagaaataccttaagaagaacaatcttcgtgattggcttcgagtggttgcatctgacaaggagacctacgaacttcgttacttccagattagtcaagatgaagatgaatcagagtcggaggactaggcaaaggctccccttacagggctttgcttattaataaaataaatgaagtatacatgagaaataccaag

SEQ ID NO: 4257 - protein, 182 aa, Homo sapiens; identical to SEQ ID NO: 4245

SEQ ID NO: 4258 - DNA, 5537 bp, Homo sapiens; identical to SEQ ID NO: 447

SEQ ID NO: 4259 - protein, 153 aa, Homo sapiens; identical to SEQ ID NO: 448

SEQ ID NO: 4260 - DNA, 1252 bp, Homo sapiens
ggataatagataaattcataatgcttttttgggtacactgaaatgtttacatactgaattctgtaatatgaactaggaacgcatttactatgagaaaatatggctcttaagcagtgtaagagtgaaaatataagcatatttccattaacagtatattgtactgatcagcagctctcattttaacatcagttaggcataatatttcatagttttcaagccttttttttctgctaacattcagacaagtaacaggcaacaaagatttaagaaaaatttatggtggaaaaccttaaaaattgagacaattcaatctatttaatctattaaattttttctctgaattgggtatatggcatcattatttgattttagcagggaacatttggatttagcttatgaaacacagatgttctatgggaacatggcttgaagccaatatgtaatttaatgtttttccattaaacaaacatctgaacaccaacttagctaccaagtgaggtcaagtgcctgaaaagtactgtatacatctaataagcatgttttccttatgtaaaagatgcactttatggcaatgcataccaggctttcacctgctagaaacatacttgttgccaactttgccatctaccactattctcctccttagaacaggtagaaacctattttacgatagacttaagtttatcttagttcaagattgcactttttaaaaaactctggactattttcagcaatgaccgaacagcttgtcacacatcatagttgtgatcttttttgaggagttatttattgtggttaatatctactataaataagcattcttgtgcttgttacaaagcataatgcaaattactagttctatactagtataatgaaaatgactagttctatactgttatgtacttttgtcttcctccccaaaaaggaaacagtttagcattgtctaaattcagtggcacttttttagtaatacatttttttttcttagatacaggagaactattgcttttacctgcagaaactcaaatgttttcgctaaaactttaaaattctaaaatacgtagtatgggtattactaattgtacattttacatttcaaaaatagttaaaattcaaatgttaagtctttgacttaaaaaacctttaaatatagataataccttaacaattataactttgtgatattattaaaatatatttgtctgttaacttcatcagttgtattaaataaaaatagttaacagcttgcact

SEQ ID NO: 4261 - protein, 57 aa, Homo sapiens
MFSLCKRCTLWQCIPGFHLLETYLLPTLPSTTILLLRTGRNLFYDRLKFILVQDCTF

SEQ ID NO: 4262 - DNA, 3535 bp, Homo sapiens
ggaactgccgcggccgccaccgccgctgccggcgccgctgctgtaggggaccagcgcgggtgcgcagacgaaaggcgctctttgccagctgaaagctgatatgcattcaagatggttacctttccctgctgacagaaactggtgaagttcgtgaggatcttaaactgccagaaggtgaactaggcaaagaaatagagggaaaatacaatgcaggtgaagatgtacaggtgtctgtcatgtgtgcaatgagtgaagaatatgctgtagccataaaaccctgcaaataaacggaaacatcaggcatgaacactgtttatgtctgaatcaactgcagatctaatttggttctaagttgtcaccaaagctatagccttcataagcaacctcatttctttttttaattgttttcagattgtgctgggttagttttgcaagcaattgataatttttaaaaaattatcaatatgtataattttttttgaattttgtagatatgtttcctataatattcctgtggttttcagtatgtcagtccaagaaacaaacaagatagcttcagcagatgtgatttgtctgagcaaatcattcctgtgttttagttagatgataaaccagggttttaaatcaaacaatgtagcataaagtggtattgaagtaccatatttaagttgaactgctctgcattaattacagatttaatataaaatgaactgattatatattggaattgttgcactttcagcctgtgtagggcaaacacaaatccttaaacaaaaatcatgttatcaaaaactgtcagttattttggtggccacatgcaaccatgtgattactttggtcatactatttaccaaattgttggcaaacttgatgtaaccttatatggtggttttagtcccttcttatggttggcagaagggcactgaactgttgggtgaaagttagttagcaagtaagattataaggaagacacaaaagacagtggcaaagagggttgattaaatctataagtttttatgtgaggactttgtaagtcagcataaaaatgaaaagttgtttctcagttgtttttgcttttaactttgcccccaacgtttaaagggagtgatctgctttacatgatactatgcaatgcttgttttccaactatgttgaataaatagtaatatttatcagtaaatactcctttccaacttccttttttttttttttttttttgagactgagtctcactccatcagccaggctggagtgcagtggtgcaatctcggctcactgcaacctctgcctcccgagttcaagcaattctcctgcctcagcctcccaagtagctgggactacaggtgcatgccaccacgcccagctacttttttgtgtattttagtagagatggggtttcaccatgttgtctaggctggtcttgaactcctgacctcaggtgatccacctgcctcagcctcccaaagtgctgggattacaggcatgagccaccacacccagcccctttccaaccatttctaagtagattttttgacattaatgtatttattaaacaaaaactgagaattccttaaattgatttggaatttttgttaattttatgtcctttttttcctaaagtgaattaaagtgaatcatggaagcagcattactttatatgaatattattatttaagttaagttattttaagtatatgcattttttctgattgttgtgtgacttaattcagttgctggtgtgaactataactagcaaataattctataaactgaattattttaaaaggtattttaggtgacaccactgcatttctatttcatcttttgagtcatatgtatattatttccagaattttagacattattacagggtttgtgaggacctttgactcagtgacaatcatcatattggagcaaaacatagaacaaaatcactatctcagaaataccttaattctctaagactggctcttagacctctcccatcatgccttgacctctaaaaagccctttgttcctatcttctaaaggaaagtatatcatatatgatgatgtaactgatctaatcagtgactggaaatagcattagtaacagaagatcccaagttttagttgcttaatttgtacacacttttaaatattgtcttagcctcggcaaaccaatttggggaagaagcaagatactttaagagaaatacaaaggaaatttctaaagcacaagaaatagtgaggtagtagttagtcgtctttcctacaacattttagcttttgcccatctaaagcacaattaaaattaggctacattctttccagtattctatttaagtacctactacatactgctctagtttcttagtactctgtaatgtgtatcttaattgctactggttggcattgtaactcataggaattccagaaaattattaatccgtgctgcttgcagttcattcatatggcccctcttaaccatgctggtgttatgattcagtattaactctcaattagcatgcccctgttcttcctaacttgtaaaatttcacataaatatattttcaattgtgtacaaattaagggtgtacaaattataataatgcatctctatcttcatactttgaatggcaaacgctatttatgcataaatattttcattttaagtaatatatgaagtgtaaatactcgatatataagtatagattttaaagatatgggactttattttcacataagtcaatagatgtttctctagaacaaaatatttagtaaagctttataaattatattaaaaggaagcggggaacatgtattttttaacatagaacagaagtgacttcattctttttagacatcagaaatgttaaagttgattcccaatatttgttgtacttttttgtagcaaatgttaaaaatcacgagttaccatgtatagaatgtggactgtcatgttgatatcattgtacagtgataagccatttttatctgtatacatttcaccaatttattaacaggttgaatatttgtttctttttagaacattttatttatactgtgaagactttgttataccttatttgctacaacatagatcatatcattgctactttgacttagcatttgcatcataaacataattatgatgtttttttcatgctcccttccaggggctcagtcacttgaagaaactgttgctaaccaagctcttgactctgtttcccttaatgatacaagtctctgtaccagcgctttatgttaattaccaaaactctcctgcatcagagcatgatatctataataggagatactgcaataaaatgattaggctgtaaaatttggagacacaatttttcattacaatgcaatttgcatgtgcacatgtgcgcacataactttatatgttagttcttttttccaaactcccaactcttaaaagtattgtagtctgttggtgcctcaactgttggtaactttttttttttaaatttacaactttccacaacttgtttttgtactttaaggtttctcaattagaatatttcta

SEQ ID NO: 4263 - protein, 52 aa, Homo sapiens
MPLFFLTCKISHKYIFNCVQIKGVQIIIMHLYLHTLNGKRYLCINIFILSNI

SEQ ID NO: 4264 - DNA, 3626 bp, Homo sapiens
ggaactgccgcggccgccaccgccgctgccggcgccgctgctgtaggggaccagcgcgggtgcgcagacgaaaggcgctctttgccagctgaaagttcccacggaaaaactaccatctcccctgcccaccatggcagacgaaattgatttcactactggagatgccggggcttccagcacttaccctatgcagtgctcggccttgcgcaaaaacggcttcgtggtgctcaaaggacgaccatgcaaaatagtggagatgtcaacttccaaaactggaaagcatggtcatgccaaggttcaccttgttggaattgatattttcacgggcaaaaaatatgaagatatttgtccttctactcacaacatggatgttccaaatattaagagaaatgattatcaactgatatgcattcaagatggttacctttccctgctgacagaaactggtgaagttcgtgaggatcttaaactgccagaaggtgaactaggcaaagaaatagagggaaaatacaatgcaggtgaagatgtacaggtgtctgtcatgtgtgcaatgagtgaagaatatgctgtagccataaaaccctgcaaataaacggaaacatcaggcatgaacactgtttatgtctgaatcaactgcagatctaatttggttctaagttgtcaccaaagctatagccttcataagcaacctcatttctttttttaattgttttcagattgtgctgggttagttttgcaagcaattgataatttttaaaaaattatcaatatgtataattttttttgaattttgtagatatgtttcctataatattcctgtggttttcagtatgtcagtccaagaaacaaacaagatagcttcagcagatgtgatttgtctgagcaaatcattcctgtgttttagttagatgataaaccagggttttaaatcaaacaatgtagcataaagtggtattgaagtaccatatttaagttgaactgctctgcattaattacagatttaatataaaatgaactgattatatattggaattgttgcactttcagcctgtgtagggcaaacacaaatccttaaacaaaaatcatgttatcaaaaactgtcagttattttggtggccacatgcaaccatgtgattactttggtcatactatttaccaaattgttggcaaacttgatgtaaccttatatggtggttttagtcccttcttatggttggcagaagggcactgaactgttgggtgaaagttagttagcaagtaagattataaggaagacacaaaagacagtggcaaagagggttgattaaatctataagtttttatgtgaggactttgtaagtcagcataaaaatgaaaagttgtttctcagttgtttttgcttttaactttgcccccaacgtttaaagggagtgatctgctttacatgatactatgcaatgcttgttttccaactatgttgaataaatagtaatatttatcagtaaatactcctttccaacttccttttttttttttttttttttgagactgagtctcactccatcagccaggctggagtgcagtggtgcaatctcggctcactgcaacctctgcctcccgagttcaagcaattctcctgcctcagcctcccaagtagctgggactacaggtgcatgccaccacgcccagctacttttttgtgtattttagtagagatggggtttcaccatgttgtctaggctggtcttgaactcctgacctcaggtgatccacctgcctcagcctcccaaagtgctgggattacaggcatgagccaccacacccagcccctttccaaccatttctaagtagattttttgacattaatgtatttattaaacaaaaactgagaattccttaaattgatttggaatttttgttaattttatgtcctttttttcctaaagtgaattaaagtgaatcatggaagcagcattactttatatgaatattattatttaagttaagttattttaagtatatgcattttttctgattgttgtgtgacttaattcagttgctggtgtgaactataactagcaaataattctataaactgaattattttaaaaggtattttaggtgacaccactgcatttctatttcatcttttgagtcatatgtatattatttccagaattttagacattattacagggtttgtgaggacctttgactcagtgacaatcatcatattggagcaaaacatagaacaaaatcactatctcagaaataccttaattctctaagactggctcttagacctctcccatcatgccttgacctctaaaaagccctttgttcctatcttctaaaggaaagtatatcatatatgatgatgtaactgatctaatcagtgactggaaatagcattagtaacagaagatcccaagttttagttgcttaatttgtacacacttttaaatattgtcttagcctcggcaaaccaatttggggaagaagcaagatactttaagagaaatacaaaggaaatttctaaagcacaagaaatagtgaggtagtagttagtcgtctttcctacaacattttagcttttgcccatctaaagcacaattaaaattaggctacattctttccagtattctatttaagtacctactacatactgctctagtttcttagtactctgtaatgtgtatcttaattgctactggttggcattgtaactcataggaattccagaaaattattaatccgtgctgcttgcagttcattcatatggcccctcttaaccatgctggtgttatgattcagtattaactctcaattagcatgcccctgttcttcctaacttgtaaaatttcacataaatatattttcaattgtgtacaaattaagggtgtacaaattataataatgcatctctatcttcatactttgaatggcaaacgctatttatgcataaatattttcattttaagtaatatatgaagtgtaaatactcgatatataagtatagattttaaagatatgggactttattttcacataagtcaatagatgtttctctagaacaaaatatttagtaaagctttataaattatattaaaaggaagcggggaacatgtattttttaacatagaacagaagtgacttcattctttttagacatcagaaatgttaaagttgattcccaatatttgttgtacttttttgtagcaaatgttaaaaatcacgagttaccatgtatagaatgtggactgtcatgttgatatcattgtacagtgataagccatttttatctgtatacatttcaccaatttattaacaggttgaatatttgtttctttttagaacattttatttatactgtgaagactttgttataccttatttgctacaacatagatcatatcattgctactttgacttagcatttgcatcataaacataattatgatgtttttttcatgctcccttccaggggctcagtcacttgaagaaactgttgctaaccaagctcttgactctgtttcccttaatgatacaagtctctgtaccagcgctttatgttaattaccaaaactctcctgcatcagagcatgatatctataataggagatactgcaataaaatgattaggctgt

SEQ ID NO: 4265 - protein, 153 aa, Homo sapiens; identical to SEQ ID NO: 448

SEQ ID NO: 4266 - DNA, 3321 bp, Homo sapiens
ggaactgccgcggccgccaccgccgctgccggcgccgctgctgtaggggaccagcgcgggtgcgcagacgaaaggcgctctttgccagctgaaagctgatatgcattcaagatggttacctttccctgctgacagaaactggtgaagttcgtgaggatcttaaactgccagaaggtgaactaggcaaagaaatagagggaaaatacaatgcaggtgaagatgtacaggtgtctgtcatgtgtgcaatgagtgaagaatatgctgtagccataaaaccctgcaaataaacggaaacatcaggcatgaacactgtttatgtctgaatcaactgcagatctaatttggttctaagttgtcaccaaagctatagccttcataagcaacctcatttctttttttaattgttttcagattgtgctgggttagttttgcaagcaattgataatttttaaaaaattatcaatatgtataattttttttgaattttgtagatatgtttcctataatattcctgtggttttcagtatgtcagtccaagaaacaaacaagatagcttcagcagatgtgatttgtctgagcaaatcattcctgtgttttagttagatgataaaccagggttttaaatcaaacaatgtagcataaagtggtattgaagtaccatatttaagttgaactgctctgcattaattacagatttaatataaaatgaactgattatatattggaattgttgcactttcagcctgtgtagggcaaacacaaatccttaaacaaaaatcatgttatcaaaaactgtcagttattttggtggccacatgcaaccatgtgattactttggtcatactatttaccaaattgttggcaaacttgatgtaaccttatatggtggttttagtcccttcttatggttggcagaagggcactgaactgttgggtgaaagttagttagcaagtaagattataaggaagacacaaaagacagtggcaaagagggttgattaaatctataagtttttatgtgaggactttgtaagtcagcataaaaatgaaaagttgtttctcagttgtttttgcttttaactttgcccccaacgtttaaagggagtgatctgctttacatgatactatgcaatgcttgttttccaactatgttgaataaatagtaatatttatcagtaaatactcctttccaacttccttttttttttttttttttttgagactgagtctcactccatcagccaggctggagtgcagtggtgcaatctcggctcactgcaacctctgcctcccgagttcaagcaattctcctgcctcagcctcccaagtagctgggactacaggtgcatgccaccacgcccagctacttttttgtgtattttagtagagatggggtttcaccatgttgtctaggctggtcttgaactcctgacctcaggtgatccacctgcctcagcctcccaaagtgctgggattacaggcatgagccaccacacccagcccctttccaaccatttctaagtagattttttgacattaatgtatttattaaacaaaaactgagaattccttaaattgatttggaatttttgttaattttatgtcctttttttcctaaagtgaattaaagtgaatcatggaagcagcattactttatatgaatattattatttaagttaagttattttaagtatatgcattttttctgattgttgtgtgacttaattcagttgctggtgtgaactataactagcaaataattctataaactgaattattttaaaaggtattttaggtgacaccactgcatttctatttcatcttttgagtcatatgtatattatttccagaattttagacattattacagggtttgtgaggacctttgactcagtgacaatcatcatattggagcaaaacatagaacaaaatcactatctcagaaataccttaattctctaagactggctcttagacctctcccatcatgccttgacctctaaaaagccctttgttcctatcttctaaaggaaagtatatcatatatgatgatgtaactgatctaatcagtgactggaaatagcattagtaacagaagatcccaagttttagttgcttaatttgtacacacttttaaatattgtcttagcctcggcaaaccaatttggggaagaagcaagatactttaagagaaatacaaaggaaatttctaaagcacaagaaatagtgaggtagtagttagtcgtctttcctacaacattttagcttttgcccatctaaagcacaattaaaattaggctacattctttccagtattctatttaagtacctactacatactgctctagtttcttagtactctgtaatgtgtatcttaattgctactggttggcattgtaactcataggaattccagaaaattattaatccgtgctgcttgcagttcattcatatggcccctcttaaccatgctggtgttatgattcagtattaactctcaattagcatgcccctgttcttcctaacttgtaaaatttcacataaatatattttcaattgtgtacaaattaagggtgtacaaattataataatgcatctctatcttcatactttgaatggcaaacgctatttatgcataaatattttcattttaagtaatatatgaagtgtaaatactcgatatataagtatagattttaaagatatgggactttattttcacataagtcaatagatgtttctctagaacaaaatatttagtaaagctttataaattatattaaaaggaagcggggaacatgtattttttaacatagaacagaagtgacttcattctttttagacatcagaaatgttaaagttgattcccaatatttgttgtacttttttgtagcaaatgttaaaaatcacgagttaccatgtatagaatgtggactgtcatgttgatatcattgtacagtgataagccatttttatctgtatacatttcaccaatttattaacaggttgaatatttgtttctttttagaacattttatttatactgtgaagactttgttataccttatttgctacaacatagatcatatcattgctactttgacttagcatttgcatcataaacataattatgatgtttttttcatgctcccttccaggggctcagtcacttgaagaaactgttgctaaccaagctcttgactctgtttcccttaatgatacaagtctctgtaccagcgctttatgttaattaccaaaactctcctgcatcagagcatgatatctataataggagatactgcaataaaatgattaggctgt

SEQ ID NO: 4267 - protein, 52 aa, Homo sapiens; identical to SEQ ID NO: 4263

SEQ ID NO: 4268 - DNA, 568 bp, Homo sapiens
gctgctgtaggggaccagcgcgggtgcgcagacgaaaggcgctctttgccagctgaaagttcccacggaaaaactaccatctcccctgcccaccatggcagacgaaattgatttcactactggagatgccggggcttccagcacttaccctatgcagtgctcggccttgcgcaaaaacggcttcgtggtgctcaaaggacgaccatgcaaaatagtggagatgtcaacttccaaaactggaaagcatggtcatgccaaggttcaccttgttggaattgatattttcacgggcaaaaaatatgaagatatttgtccttctactcacaacatggatgttccaaatattaagagaaatgattatcaagtgtctgtcatgtgtgcaatgagtgaagaatatgctgtagccataaaaccctgcaaataaacggaaacatcaggcatgaacactgtttatgtctgaatcaactgcagatctaatttggttctaagttgtcaccaaagctatagccttcataagcaacctcatttctttttttaattgttttcagattgtgctgggttagttttg

SEQ ID NO: 4269 - protein, 109 aa, Homo sapiens
MADEIDFTTGDAGASSTYPMQCSALRKNGFVVLKGRPCKIVEMSTSKTGKHGHAKVHLVGIDIFTGKKYEDICPSTHNMDVPNIKRNDYQVSVMCAMSEEYAVAIKPCK

SEQ ID NO: 4270 - DNA, 642 bp, Homo sapiens
gaactgccgcggccgccaccgccgctgccggcgccgctgctgtaggggaccagcgcgggtgcgcagacgaaaggcgctctttgccagctgaaagttcccacggaaaaactaccatctcccctgcccaccatggcagacgaaattgatttcactactggagatgccggggcttccagcacttaccctatgcagtgctcggccttgcgcaaaaacggcttcgtggtgctcaaaggacgaccatgcaaaatagtggagatgtcaacttccaaaactggaaagcatggtcatgccaaggttcaccttgttggaattgatattttcacgggcaaaaaatatgaagatatttgtccttctactcacaacatggatgttccaaatattaagagaaatgattatcaactgatatgcattcaagatggttacctttccctgctgacagaaactggtgaagttcgtgaggatcttaaactgccagaaggtgaactaggcaaagaaatagagggaaaatacaatgcaggtgaagatgtacaggtgtctgtcatgtgtgcaatgagtgaagaatatgctgtagccataaaaccctgcaaataaacggaaacatcaggcatgaacactgtttatgtctgaatcaactgcagatct

SEQ ID NO: 4271 - protein, 153 aa, Homo sapiens; identical to SEQ ID NO: 448

SEQ ID NO: 4272 - DNA, 604 bp, Homo sapiens
gtctcttggaactgccgcggccgccaccgccgctgccggcgccgctgctgtaggggaccagcgcgggtgcgcagacgaaaggcgctctttgccagctgaaagttcccacggaaaaactaccatctcccctgcccaccatggcagacgaaattgatttcactactggagatgccggggcttccagcacttaccctatgcagtgctcggccttgcgcaaaaacggcttcgtggtgctcaaaggacgaccatgcaaaatagtggagatgtcaacttccaaaactggaaagcatggtcatgccaaggttcaccttgttggaattgatattttcacgggcaaaaaatatgaagatatttgtccttctactcacaacatggatgttccaaatattaagagaaatgattatcaaaaactggtgaagttcgtgaggatcttaaactgccagaaggtgaactaggcaaagaaatagagggaaaatacaatgcaggtgaagatgtacaggtgtctgtcatgtgtgcaatgagtgaagaatatgctgtagccataaaaccctgcaaataaacggaaacatcaggcatgaacactgtttatgtctgaatcaactgc

SEQ ID NO: 4273 - protein, 105 aa, Homo sapiens
MADEIDFTTGDAGASSTYPMQCSALRKNGFVVLKGRPCKIVEMSTSKTGKHGHAKVHLVGIDIFTGKKYEDICPSTHNMDVPNIKRNDYQKLVKFVRILNCQKVN

SEQ ID NO: 4274 - DNA, 4087 bp, Homo sapiens
tctggagactcctgcctatgggaaagaggttgacatcacgcgccaatcggcatggctcttagagagagcagcttagtttttgaatcggttgtggcggccgccggcgaggaatggcggtatttgtgagaggagtcggcgtttgaagaggtggaactcctagggcttttttgagagtgctgatttagaagaatacaaatcatggctgaaaatagtgtattaacatccactactgggaggactagcttggcagactcttccatttttgattctaaagttactgagatttccaaggaaaacttacttattggatctacttcatatgtagaagaagagatgcctcagattgaaacaagagtgatattggttcaagaagctggaaaacaagaagaacttataaaagccttaaaggacattaaagtgggctttgtaaagatggagtcagtggaagaatttgaaggtttggattctccggaatttgaaaatgtatttgtagtcacggactttcaggattctgtctttaatgacctctacaaggctgattgtagagttattggaccaccagttgtattaaattgttcacaaaaaggagagcctttgccattttcatgtcgcccgttgtattgtacaagtatgatgaatctagtactatgctttactggatttaggaaaaaagaagaactagtcaggttggtgacattggtccatcacatgggtggagttattcgaaaagactttaattcaaaagttacacatttggtggcaaattgtacacaaggagaaaaattcagggttgctgtgagtctaggtactccaattatgaagccagaatggatttataaagcttgggaaaggcggaatgaacaggatttctatgcagcagttgatgactttagaaatgaatttaaagttcctccatttcaagattgtattttaagtttcctgggattttcagatgaagagaaaaccaatatggaagaaatgactgaaatgcaaggaggtaaatatttaccgcttggagatgaaagatgcactcaccttgtagttgaagagaatatagtaaaagatcttccctttgaaccttcaaagaaactttatgttgtcaagcaagagtggttctggggaagcattcaaatggatgcccgagctggagaaactatgtatttatatgaaaaggcaaatactcctgagctcaagaaatcagtgtcaatgctttctctaaatacccctaacagcaatcgcaaacgacgtcgtttaaaagaaacacttgctcagctttcaagagagacagacgtgtcaccatttccaccccgtaagcgcccatcagctgagcattccctttccatagggtcactcctagatatctccaacacaccagagtctagcattaactatggagacaccccaaagtcttgtactaagtcttctaaaagctccactccagttccttcaaagcagtcagcaaggtggcaagttgcaaaagagctttatcaaactgaaagtaattatgttaatatattggcaacaattattcagttatttcaagtaccattggaagaggaaggacaacgtggtggacctatccttgcaccagaggagattaagactatttttggtagcatcccagatatctttgatgtacacactaagataaaggatgatcttgaagaccttatagttaattgggatgagagcaaaagcattggtgacatttttctgaaatattcaaaagatttggtaaaaacctaccctccctttgtaaacttctttgaaatgagcaaggaaacaattattaaatgtgaaaaacagaaaccaagatttcatgcttttctcaagataaaccaagcaaaaccagaatgtggacggcagagccttgttgaacttcttatccgaccagtacagaggttacccagtgttgcattacttttaaatgatcttaagaagcatacagctgatgaaaatccagacaaaagcactttagaaaaagctattggatcactgaaggaagtaatgacgcatattaatgaggataagagaaaaacagaagctcaaaagcaaatttttgatgttgtttatgaagtagatggatgcccagctaatcttttatcttctcaccgaagcttagtacagcgggttgaaacaatttctctaggtgagcacccctgtgacagaggagaacaagtaactctcttcctcttcaatgattgcctagagatagcaagaaaacggcacaaggttattggcacttttaggagtcctcatggccaaacccgacccccagcttctcttaagcatattcacctaatgcctctttctcagattaagaaggtattggacataagagagacagaagattgccataatgcttttgccttgcttgtgaggccaccaacagagcaggcaaatgtgctactcagtttccagatgacatcagatgaacttccaaaagaaaactggctaaagatgctgtgtcgacatgtagctaacaccatttgtaaagcagatgctgagaatcttatttatactgctgatccagaatcctttgaagtaaatacaaaagatatggacagtacattgagtagagcatcaagagcaataaaaaagacttcaaaaaaggttacaagagcattctctttctccaaaactccaaaaagagctcttcgaagggctcttatgacatcccacggctcagtggagggaagaagtccttccagcaatgataagcatgtaatgagtcgtctttctagcacatcatcattagcaggtatcccttctccctcccttgtcagccttccttccttctttgaaaggagaagtcatacgttaagtagatctacaactcatttgatatgaagcgttaccaaaatcttaaattatagaaatgtatagacacctcatactcaaataagaaactgacttaaatggtacttgtaattagcacttggtgaaagctggaaggaagataaataacactaaactatgctatttgatttttcttcttgaaagagtaaggtttacctgttacattttcaagttaattcatgtaaaaaatgatagtgattttgatgtaatttatctcttgtttgaatctgtcattcaaaggccaataatttaagttgctatcagctgatattagtagctttgcaaccctgatagagtaaataaattttatgggcgggtgccaaatactgctgtgaatctatttgtatagtatccatgaatgaatttatggaaatagatatttgtgcagctcaatttatgcagagattaaatgacatcataatactggatgaaaacttgcatagaattctgattaaatagtgggtctgtttcacatgtgcagtttgaagtatttaaataaccactcctttcacagtttattttcttctcaagcgttttcaagatctagcatgtggattttaaaagatttgccctcattaacaagaataacatttaaaggagattgtttcaaaatatttttgcaaattgagataaggacagaaagattgagaaacattgtatattttgcaaaaacaagatgtttgtagctgtttcagagagagtacggtatatttatggtaattttatccactagcaaatcttgatttagtttgatagtgtgtggaattttattttgaaggataagaccatgggaaaattgtggtaaagactgtttgtacccttcatgaaataattctgaagttgccatcagttttactaatcttctgtgaaatgcatagatatgcgcatgttcaactttttattgtggtcttataattaaatgtaaaattgaaaattcatttgctgtttcaaagtgtgatatctttcacaatagcctttttatagtcagtaattcagaataatcaagttcatatggataaatgcatttttatttcctatttctttagggagtgctacaaatgtttgtcacttaaatttcaagtttctgttttaatagttaactgactatagattgttttctatgccatgtatgtgccacttctgagagtagtaaatgactctttgctacattttaaaagcaattgtattagtaagaactttgtaaataaatacctaaaacccaagtgta

SEQ ID NO: 4275 - protein, 883 aa, Homo sapiens; identical to SEQ ID NO: 450

SEQ ID NO: 4276 - DNA, 4129 bp, Homo sapiens
gaatcggttgtggcggccgccggcgaggaatggcggtatttgtgagaggagtcggcgtttgaagaggtggaactcctagggcttttttgagagtgacggagtctacctcttgttacctagactggagtgcagtggcacgatctcggctcactgcaacctctgcctcccgggttcaagcgattctcctgcctcagcctcctgagtagctgggattacagctgatttagaagaatacaaatcatggctgaaaatagtgtattaacatccactactgggaggactagcttggcagactcttccatttttgattctaaagttactgagatttccaaggaaaacttacttattggatctacttcatatgtagaagaagagatgcctcagattgaaacaagagtgatattggttcaagaagctggaaaacaagaagaacttataaaagccttaaaggacattaaagtgggctttgtaaagatggagtcagtggaagaatttgaaggtttggattctccggaatttgaaaatgtatttgtagtcacggactttcaggattctgtctttaatgacctctacaaggctgattgtagagttattggaccaccagttgtattaaattgttcacaaaaaggagagcctttgccattttcatgtcgcccgttgtattgtacaagtatgatgaatctagtactatgctttactggatttaggaaaaaagaagaactagtcaggttggtgacattggtccatcacatgggtggagttattcgaaaagactttaattcaaaagttacacatttggtggcaaattgtacacaaggagaaaaattcagggttgctgtgagtctaggtactccaattatgaagccagaatggatttataaagcttgggaaaggcggaatgaacaggatttctatgcagcagttgatgactttagaaatgaatttaaagttcctccatttcaagattgtattttaagtttcctgggattttcagatgaagagaaaaccaatatggaagaaatgactgaaatgcaaggaggtaaatatttaccgcttggagatgaaagatgcactcaccttgtagttgaagagaatatagtaaaagatcttccctttgaaccttcaaagaaactttatgttgtcaagcaagagtggttctggggaagcattcaaatggatgcccgagctggagaaactatgtatttatatgaaaaggcaaatactcctgagctcaagaaatcagtgtcaatgctttctctaaatacccctaacagcaatcgcaaacgacgtcgtttaaaagaaacacttgctcagctttcaagagagacagacgtgtcaccatttccaccccgtaagcgcccatcagctgagcattccctttccatagggtcactcctagatatctccaacacaccagagtctagcattaactatggagacaccccaaagtcttgtactaagtcttctaaaagctccactccagttccttcaaagcagtcagcaaggtggcaagttgcaaaagagctttatcaaactgaaagtaattatgttaatatattggcaacaattattcagttatttcaagtaccattggaagaggaaggacaacgtggtggacctatccttgcaccagaggagattaagactatttttggtagcatcccagatatctttgatgtacacactaagataaaggatgatcttgaagaccttatagttaattgggatgagagcaaaagcattggtgacatttttctgaaatattcaaaagatttggtaaaaacctaccctccctttgtaaacttctttgaaatgagcaaggaaacaattattaaatgtgaaaaacagaaaccaagatttcatgcttttctcaagataaaccaagcaaaaccagaatgtggacggcagagccttgttgaacttcttatccgaccagtacagaggttacccagtgttgcattacttttaaatgatcttaagaagcatacagctgatgaaaatccagacaaaagcactttagaaaaagctattggatcactgaaggaagtaatgacgcatattaatgaggataagagaaaaacagaagctcaaaagcaaatttttgatgttgtttatgaagtagatggatgcccagctaatcttttatcttctcaccgaagcttagtacagcgggttgaaacaatttctctaggtgagcacccctgtgacagaggagaacaagtaactctcttcctcttcaatgattgcctagagatagcaagaaaacggcacaaggttattggcacttttaggagtcctcatggccaaacccgacccccagcttctcttaagcatattcacctaatgcctctttctcagattaagaaggtattggacataagagagacagaagattgccataatgcttttgccttgcttgtgaggccaccaacagagcaggcaaatgtgctactcagtttccagatgacatcagatgaacttccaaaagaaaactggctaaagatgctgtgtcgacatgtagctaacaccatttgtaaagcagatgctgagaatcttatttatactgctgatccagaatcctttgaagtaaatacaaaagatatggacagtacattgagtagagcatcaagagcaataaaaaagacttcaaaaaaggttacaagagcattctctttctccaaaactccaaaaagagctcttcgaagggctcttatgacatcccacggctcagtggagggaagaagtccttccagcaatgataagcatgtaatgagtcgtctttctagcacatcatcattagcaggtatcccttctccctcccttgtcagccttccttccttctttgaaaggagaagtcatacgttaagtagatctacaactcatttgatatgaagcgttaccaaaatcttaaattatagaaatgtatagacacctcatactcaaataagaaactgacttaaatggtacttgtaattagcacttggtgaaagctggaaggaagataaataacactaaactatgctatttgatttttcttcttgaaagagtaaggtttacctgttacattttcaagttaattcatgtaaaaaatgatagtgattttgatgtaatttatctcttgtttgaatctgtcattcaaaggccaataatttaagttgctatcagctgatattagtagctttgcaaccctgatagagtaaataaattttatgggcgggtgccaaatactgctgtgaatctatttgtatagtatccatgaatgaatttatggaaatagatatttgtgcagctcaatttatgcagagattaaatgacatcataatactggatgaaaacttgcatagaattctgattaaatagtgggtctgtttcacatgtgcagtttgaagtatttaaataaccactcctttcacagtttattttcttctcaagcgttttcaagatctagcatgtggattttaaaagatttgccctcattaacaagaataacatttaaaggagattgtttcaaaatatttttgcaaattgagataaggacagaaagattgagaaacattgtatattttgcaaaaacaagatgtttgtagctgtttcagagagagtacggtatatttatggtaattttatccactagcaaatcttgatttagtttgatagtgtgtggaattttattttgaaggataagaccatgggaaaattgtggtaaagactgtttgtacccttcatgaaataattctgaagttgccatcagttttactaatcttctgtgaaatgcatagatatgcgcatgttcaactttttattgtggtcttataattaaatgtaaaattgaaaattcatttgctgtttcaaagtgtgatatctttcacaatagcctttttatagtcagtaattcagaataatcaagttcatatggataaatgcatttttatttcctatttctttagggagtgctacaaatgtttgtcacttaaatttcaagtttctgttttaatagttaactgactatagattgttttctatgccatgtatgtgccacttctgagagtagtaaatgactctttgctacattttaaaagcaattgtattagtaagaactttgtaaataaatacctaaaacccaagtgta

SEQ ID NO: 4277 - protein, 883 aa, Homo sapiens; identical to SEQ ID NO: 450

SEQ ID NO: 4278 - DNA, 4048 bp, Homo sapiens
aggcttcccggatccgggaactccctcgccgcaccccacccccagcagccgggccctgacgcggagtgggagaccgaagcccccagtattgctgggcatcttcgccctcacctgttggctcttttggacagaagagtctgatttagaagaatacaaatcatggctgaaaatagtgtattaacatccactactgggaggactagcttggcagactcttccatttttgattctaaagttactgagatttccaaggaaaacttacttattggatctacttcatatgtagaagaagagatgcctcagattgaaacaagagtgatattggttcaagaagctggaaaacaagaagaacttataaaagccttaaaggacattaaagtgggctttgtaaagatggagtcagtggaagaatttgaaggtttggattctccggaatttgaaaatgtatttgtagtcacggactttcaggattctgtctttaatgacctctacaaggctgattgtagagttattggaccaccagttgtattaaattgttcacaaaaaggagagcctttgccattttcatgtcgcccgttgtattgtacaagtatgatgaatctagtactatgctttactggatttaggaaaaaagaagaactagtcaggttggtgacattggtccatcacatgggtggagttattcgaaaagactttaattcaaaagttacacatttggtggcaaattgtacacaaggagaaaaattcagggttgctgtgagtctaggtactccaattatgaagccagaatggatttataaagcttgggaaaggcggaatgaacaggatttctatgcagcagttgatgactttagaaatgaatttaaagttcctccatttcaagattgtattttaagtttcctgggattttcagatgaagagaaaaccaatatggaagaaatgactgaaatgcaaggaggtaaatatttaccgcttggagatgaaagatgcactcaccttgtagttgaagagaatatagtaaaagatcttccctttgaaccttcaaagaaactttatgttgtcaagcaagagtggttctggggaagcattcaaatggatgcccgagctggagaaactatgtatttatatgaaaaggcaaatactcctgagctcaagaaatcagtgtcaatgctttctctaaatacccctaacagcaatcgcaaacgacgtcgtttaaaagaaacacttgctcagctttcaagagagacagacgtgtcaccatttccaccccgtaagcgcccatcagctgagcattccctttccatagggtcactcctagatatctccaacacaccagagtctagcattaactatggagacaccccaaagtcttgtactaagtcttctaaaagctccactccagttccttcaaagcagtcagcaaggtggcaagttgcaaaagagctttatcaaactgaaagtaattatgttaatatattggcaacaattattcagttatttcaagtaccattggaagaggaaggacaacgtggtggacctatccttgcaccagaggagattaagactatttttggtagcatcccagatatctttgatgtacacactaagataaaggatgatcttgaagaccttatagttaattgggatgagagcaaaagcattggtgacatttttctgaaatattcaaaagatttggtaaaaacctaccctccctttgtaaacttctttgaaatgagcaaggaaacaattattaaatgtgaaaaacagaaaccaagatttcatgcttttctcaagataaaccaagcaaaaccagaatgtggacggcagagccttgttgaacttcttatccgaccagtacagaggttacccagtgttgcattacttttaaatgatcttaagaagcatacagctgatgaaaatccagacaaaagcactttagaaaaagctattggatcactgaaggaagtaatgacgcatattaatgaggataagagaaaaacagaagctcaaaagcaaatttttgatgttgtttatgaagtagatggatgcccagctaatcttttatcttctcaccgaagcttagtacagcgggttgaaacaatttctctaggtgagcacccctgtgacagaggagaacaagtaactctcttcctcttcaatgattgcctagagatagcaagaaaacggcacaaggttattggcacttttaggagtcctcatggccaaacccgacccccagcttctcttaagcatattcacctaatgcctctttctcagattaagaaggtattggacataagagagacagaagattgccataatgcttttgccttgcttgtgaggccaccaacagagcaggcaaatgtgctactcagtttccagatgacatcagatgaacttccaaaagaaaactggctaaagatgctgtgtcgacatgtagctaacaccatttgtaaagcagatgctgagaatcttatttatactgctgatccagaatcctttgaagtaaatacaaaagatatggacagtacattgagtagagcatcaagagcaataaaaaagacttcaaaaaaggttacaagagcattctctttctccaaaactccaaaaagagctcttcgaagggctcttatgacatcccacggctcagtggagggaagaagtccttccagcaatgataagcatgtaatgagtcgtctttctagcacatcatcattagcaggtatcccttctccctcccttgtcagccttccttccttctttgaaaggagaagtcatacgttaagtagatctacaactcatttgatatgaagcgttaccaaaatcttaaattatagaaatgtatagacacctcatactcaaataagaaactgacttaaatggtacttgtaattagcacttggtgaaagctggaaggaagataaataacactaaactatgctatttgatttttcttcttgaaagagtaaggtttacctgttacattttcaagttaattcatgtaaaaaatgatagtgattttgatgtaatttatctcttgtttgaatctgtcattcaaaggccaataatttaagttgctatcagctgatattagtagctttgcaaccctgatagagtaaataaattttatgggcgggtgccaaatactgctgtgaatctatttgtatagtatccatgaatgaatttatggaaatagatatttgtgcagctcaatttatgcagagattaaatgacatcataatactggatgaaaacttgcatagaattctgattaaatagtgggtctgtttcacatgtgcagtttgaagtatttaaataaccactcctttcacagtttattttcttctcaagcgttttcaagatctagcatgtggattttaaaagatttgccctcattaacaagaataacatttaaaggagattgtttcaaaatatttttgcaaattgagataaggacagaaagattgagaaacattgtatattttgcaaaaacaagatgtttgtagctgtttcagagagagtacggtatatttatggtaattttatccactagcaaatcttgatttagtttgatagtgtgtggaattttattttgaaggataagaccatgggaaaattgtggtaaagactgtttgtacccttcatgaaataattctgaagttgccatcagttttactaatcttctgtgaaatgcatagatatgcgcatgttcaactttttattgtggtcttataattaaatgtaaaattgaaaattcatttgctgtttcaaagtgtgatatctttcacaatagcctttttatagtcagtaattcagaataatcaagttcatatggataaatgcatttttatttcctatttctttagggagtgctacaaatgtttgtcacttaaatttcaagtttctgttttaatagttaactgactatagattgttttctatgccatgtatgtgccacttctgagagtagtaaatgactctttgctacattttaaaagcaattgtattagtaagaactttgtaaataaatacctaaaacccaagtgta

SEQ ID NO: 4279 - protein, 883 aa, Homo sapiens; identical to SEQ ID NO: 450

SEQ ID NO: 4280 - DNA, 3956 bp, Homo sapiens
tttcaaatggtatttttgattttcctcttccagtccttaaagcagctgatttagaagaatacaaatcatggctgaaaatagtgtattaacatccactactgggaggactagcttggcagactcttccatttttgattctaaagttactgagatttccaaggaaaacttacttattggatctacttcatatgtagaagaagagatgcctcagattgaaacaagagtgatattggttcaagaagctggaaaacaagaagaacttataaaagccttaaaggacattaaagtgggctttgtaaagatggagtcagtggaagaatttgaaggtttggattctccggaatttgaaaatgtatttgtagtcacggactttcaggattctgtctttaatgacctctacaaggctgattgtagagttattggaccaccagttgtattaaattgttcacaaaaaggagagcctttgccattttcatgtcgcccgttgtattgtacaagtatgatgaatctagtactatgctttactggatttaggaaaaaagaagaactagtcaggttggtgacattggtccatcacatgggtggagttattcgaaaagactttaattcaaaagttacacatttggtggcaaattgtacacaaggagaaaaattcagggttgctgtgagtctaggtactccaattatgaagccagaatggatttataaagcttgggaaaggcggaatgaacaggatttctatgcagcagttgatgactttagaaatgaatttaaagttcctccatttcaagattgtattttaagtttcctgggattttcagatgaagagaaaaccaatatggaagaaatgactgaaatgcaaggaggtaaatatttaccgcttggagatgaaagatgcactcaccttgtagttgaagagaatatagtaaaagatcttccctttgaaccttcaaagaaactttatgttgtcaagcaagagtggttctggggaagcattcaaatggatgcccgagctggagaaactatgtatttatatgaaaaggcaaatactcctgagctcaagaaatcagtgtcaatgctttctctaaatacccctaacagcaatcgcaaacgacgtcgtttaaaagaaacacttgctcagctttcaagagagacagacgtgtcaccatttccaccccgtaagcgcccatcagctgagcattccctttccatagggtcactcctagatatctccaacacaccagagtctagcattaactatggagacaccccaaagtcttgtactaagtcttctaaaagctccactccagttccttcaaagcagtcagcaaggtggcaagttgcaaaagagctttatcaaactgaaagtaattatgttaatatattggcaacaattattcagttatttcaagtaccattggaagaggaaggacaacgtggtggacctatccttgcaccagaggagattaagactatttttggtagcatcccagatatctttgatgtacacactaagataaaggatgatcttgaagaccttatagttaattgggatgagagcaaaagcattggtgacatttttctgaaatattcaaaagatttggtaaaaacctaccctccctttgtaaacttctttgaaatgagcaaggaaacaattattaaatgtgaaaaacagaaaccaagatttcatgcttttctcaagataaaccaagcaaaaccagaatgtggacggcagagccttgttgaacttcttatccgaccagtacagaggttacccagtgttgcattacttttaaatgatcttaagaagcatacagctgatgaaaatccagacaaaagcactttagaaaaagctattggatcactgaaggaagtaatgacgcatattaatgaggataagagaaaaacagaagctcaaaagcaaatttttgatgttgtttatgaagtagatggatgcccagctaatcttttatcttctcaccgaagcttagtacagcgggttgaaacaatttctctaggtgagcacccctgtgacagaggagaacaagtaactctcttcctcttcaatgattgcctagagatagcaagaaaacggcacaaggttattggcacttttaggagtcctcatggccaaacccgacccccagcttctcttaagcatattcacctaatgcctctttctcagattaagaaggtattggacataagagagacagaagattgccataatgcttttgccttgcttgtgaggccaccaacagagcaggcaaatgtgctactcagtttccagatgacatcagatgaacttccaaaagaaaactggctaaagatgctgtgtcgacatgtagctaacaccatttgtaaagcagatgctgagaatcttatttatactgctgatccagaatcctttgaagtaaatacaaaagatatggacagtacattgagtagagcatcaagagcaataaaaaagacttcaaaaaaggttacaagagcattctctttctccaaaactccaaaaagagctcttcgaagggctcttatgacatcccacggctcagtggagggaagaagtccttccagcaatgataagcatgtaatgagtcgtctttctagcacatcatcattagcaggtatcccttctccctcccttgtcagccttccttccttctttgaaaggagaagtcatacgttaagtagatctacaactcatttgatatgaagcgttaccaaaatcttaaattatagaaatgtatagacacctcatactcaaataagaaactgacttaaatggtacttgtaattagcacttggtgaaagctggaaggaagataaataacactaaactatgctatttgatttttcttcttgaaagagtaaggtttacctgttacattttcaagttaattcatgtaaaaaatgatagtgattttgatgtaatttatctcttgtttgaatctgtcattcaaaggccaataatttaagttgctatcagctgatattagtagctttgcaaccctgatagagtaaataaattttatgggcgggtgccaaatactgctgtgaatctatttgtatagtatccatgaatgaatttatggaaatagatatttgtgcagctcaatttatgcagagattaaatgacatcataatactggatgaaaacttgcatagaattctgattaaatagtgggtctgtttcacatgtgcagtttgaagtatttaaataaccactcctttcacagtttattttcttctcaagcgttttcaagatctagcatgtggattttaaaagatttgccctcattaacaagaataacatttaaaggagattgtttcaaaatatttttgcaaattgagataaggacagaaagattgagaaacattgtatattttgcaaaaacaagatgtttgtagctgtttcagagagagtacggtatatttatggtaattttatccactagcaaatcttgatttagtttgatagtgtgtggaattttattttgaaggataagaccatgggaaaattgtggtaaagactgtttgtacccttcatgaaataattctgaagttgccatcagttttactaatcttctgtgaaatgcatagatatgcgcatgttcaactttttattgtggtcttataattaaatgtaaaattgaaaattcatttgctgtttcaaagtgtgatatctttcacaatagcctttttatagtcagtaattcagaataatcaagttcatatggataaatgcatttttatttcctatttctttagggagtgctacaaatgtttgtcacttaaatttcaagtttctgttttaatagttaactgactatagattgttttctatgccatgtatgtgccacttctgagagtagtaaatgactctttgctacattttaaaagcaattgtattagtaagaactttgtaaataaatacctaaaacccaagtgta

SEQ ID NO: 4281 - protein, 883 aa, Homo sapiens; identical to SEQ ID NO: 450

SEQ ID NO: 4282 - DNA, 3959 bp, Homo sapiens
gcccaatgaccatgtttatgtatttttattcaaattttattttttcagctgatttagaagaatacaaatcatggctgaaaatagtgtattaacatccactactgggaggactagcttggcagactcttccatttttgattctaaagttactgagatttccaaggaaaacttacttattggatctacttcatatgtagaagaagagatgcctcagattgaaacaagagtgatattggttcaagaagctggaaaacaagaagaacttataaaagccttaaaggacattaaagtgggctttgtaaagatggagtcagtggaagaatttgaaggtttggattctccggaatttgaaaatgtatttgtagtcacggactttcaggattctgtctttaatgacctctacaaggctgattgtagagttattggaccaccagttgtattaaattgttcacaaaaaggagagcctttgccattttcatgtcgcccgttgtattgtacaagtatgatgaatctagtactatgctttactggatttaggaaaaaagaagaactagtcaggttggtgacattggtccatcacatgggtggagttattcgaaaagactttaattcaaaagttacacatttggtggcaaattgtacacaaggagaaaaattcagggttgctgtgagtctaggtactccaattatgaagccagaatggatttataaagcttgggaaaggcggaatgaacaggatttctatgcagcagttgatgactttagaaatgaatttaaagttcctccatttcaagattgtattttaagtttcctgggattttcagatgaagagaaaaccaatatggaagaaatgactgaaatgcaaggaggtaaatatttaccgcttggagatgaaagatgcactcaccttgtagttgaagagaatatagtaaaagatcttccctttgaaccttcaaagaaactttatgttgtcaagcaagagtggttctggggaagcattcaaatggatgcccgagctggagaaactatgtatttatatgaaaaggcaaatactcctgagctcaagaaatcagtgtcaatgctttctctaaatacccctaacagcaatcgcaaacgacgtcgtttaaaagaaacacttgctcagctttcaagagagacagacgtgtcaccatttccaccccgtaagcgcccatcagctgagcattccctttccatagggtcactcctagatatctccaacacaccagagtctagcattaactatggagacaccccaaagtcttgtactaagtcttctaaaagctccactccagttccttcaaagcagtcagcaaggtggcaagttgcaaaagagctttatcaaactgaaagtaattatgttaatatattggcaacaattattcagttatttcaagtaccattggaagaggaaggacaacgtggtggacctatccttgcaccagaggagattaagactatttttggtagcatcccagatatctttgatgtacacactaagataaaggatgatcttgaagaccttatagttaattgggatgagagcaaaagcattggtgacatttttctgaaatattcaaaagatttggtaaaaacctaccctccctttgtaaacttctttgaaatgagcaaggaaacaattattaaatgtgaaaaacagaaaccaagatttcatgcttttctcaagataaaccaagcaaaaccagaatgtggacggcagagccttgttgaacttcttatccgaccagtacagaggttacccagtgttgcattacttttaaatgatcttaagaagcatacagctgatgaaaatccagacaaaagcactttagaaaaagctattggatcactgaaggaagtaatgacgcatattaatgaggataagagaaaaacagaagctcaaaagcaaatttttgatgttgtttatgaagtagatggatgcccagctaatcttttatcttctcaccgaagcttagtacagcgggttgaaacaatttctctaggtgagcacccctgtgacagaggagaacaagtaactctcttcctcttcaatgattgcctagagatagcaagaaaacggcacaaggttattggcacttttaggagtcctcatggccaaacccgacccccagcttctcttaagcatattcacctaatgcctctttctcagattaagaaggtattggacataagagagacagaagattgccataatgcttttgccttgcttgtgaggccaccaacagagcaggcaaatgtgctactcagtttccagatgacatcagatgaacttccaaaagaaaactggctaaagatgctgtgtcgacatgtagctaacaccatttgtaaagcagatgctgagaatcttatttatactgctgatccagaatcctttgaagtaaatacaaaagatatggacagtacattgagtagagcatcaagagcaataaaaaagacttcaaaaaaggttacaagagcattctctttctccaaaactccaaaaagagctcttcgaagggctcttatgacatcccacggctcagtggagggaagaagtccttccagcaatgataagcatgtaatgagtcgtctttctagcacatcatcattagcaggtatcccttctccctcccttgtcagccttccttccttctttgaaaggagaagtcatacgttaagtagatctacaactcatttgatatgaagcgttaccaaaatcttaaattatagaaatgtatagacacctcatactcaaataagaaactgacttaaatggtacttgtaattagcacttggtgaaagctggaaggaagataaataacactaaactatgctatttgatttttcttcttgaaagagtaaggtttacctgttacattttcaagttaattcatgtaaaaaatgatagtgattttgatgtaatttatctcttgtttgaatctgtcattcaaaggccaataatttaagttgctatcagctgatattagtagctttgcaaccctgatagagtaaataaattttatgggcgggtgccaaatactgctgtgaatctatttgtatagtatccatgaatgaatttatggaaatagatatttgtgcagctcaatttatgcagagattaaatgacatcataatactggatgaaaacttgcatagaattctgattaaatagtgggtctgtttcacatgtgcagtttgaagtatttaaataaccactcctttcacagtttattttcttctcaagcgttttcaagatctagcatgtggattttaaaagatttgccctcattaacaagaataacatttaaaggagattgtttcaaaatatttttgcaaattgagataaggacagaaagattgagaaacattgtatattttgcaaaaacaagatgtttgtagctgtttcagagagagtacggtatatttatggtaattttatccactagcaaatcttgatttagtttgatagtgtgtggaattttattttgaaggataagaccatgggaaaattgtggtaaagactgtttgtacccttcatgaaataattctgaagttgccatcagttttactaatcttctgtgaaatgcatagatatgcgcatgttcaactttttattgtggtcttataattaaatgtaaaattgaaaattcatttgctgtttcaaagtgtgatatctttcacaatagcctttttatagtcagtaattcagaataatcaagttcatatggataaatgcatttttatttcctatttctttagggagtgctacaaatgtttgtcacttaaatttcaagtttctgttttaatagttaactgactatagattgttttctatgccatgtatgtgccacttctgagagtagtaaatgactctttgctacattttaaaagcaattgtattagtaagaactttgtaaataaatacctaaaacccaagtgta

SEQ ID NO: 4283 - protein, 883 aa, Homo sapiens; identical to SEQ ID NO: 450

SEQ ID NO: 4284 - DNA, 2068 bp, Homo sapiens
ttgcatacatctgtcattttccaaggagtgacacttaatgtttatggttattctggaaccctagattgccataatgcttttgccttgcttgtgaggccaccaacagagcaggcaaatgtgctactcagtttccagatgacatcagatgaacttccaaaagaaaactggctaaagatgctgtgtcgacatgtagctaacaccatttgtaaagcagatgctgagaatcttatttatactgctgatccagaatcctttgaagtaaatacaaaagatatggacagtacattgagtagagcatcaagagcaataaaaaagacttcaaaaaaggttacaagagcattctctttctccaaaactccaaaaagagctcttcgaagggctcttatgacatcccacggctcagtggagggaagaagtccttccagcaatgataagcatgtaatgagtcgtctttctagcacatcatcattagcaattacccattctgtttccacaagcaatgtaattggatttactaagcatgtttatgttcagcgcctaaactctactggtgggcgctctcagtactcctggtttcaatctgtacgtcattctgctttccgagctagtttttcagagatactagaaggaaatactgatttttcaaatttcaaaaaagttctttccaagtcatctttgacatttgtgaagaattaggagatttgccaaccactaatggaaacaagcctcatgaagtttaatggtatcccttctccctcccttgtcagccttccttccttctttgaaaggagaagtcatacgttaagtagatctacaactcatttgatatgaagcgttaccaaaatcttaaattatagaaatgtatagacacctcatactcaaataagaaactgacttaaatggtacttgtaattagcacttggtgaaagctggaaggaagataaataacactaaactatgctatttgatttttcttcttgaaagagtaaggtttacctgttacattttcaagttaattcatgtaaaaaatgatagtgattttgatgtaatttatctcttgtttgaatctgtcattcaaaggccaataatttaagttgctatcagctgatattagtagctttgcaaccctgatagagtaaataaattttatgggcgggtgccaaatactgctgtgaatctatttgtatagtatccatgaatgaatttatggaaatagatatttgtgcagctcaatttatgcagagattaaatgacatcataatactggatgaaaacttgcatagaattctgattaaatagtgggtctgtttcacatgtgcagtttgaagtatttaaataaccactcctttcacagtttattttcttctcaagcgttttcaagatctagcatgtggattttaaaagatttgccctcattaacaagaataacatttaaaggagattgtttcaaaatatttttgcaaattgagataaggacagaaagattgagaaacattgtatattttgcaaaaacaagatgtttgtagctgtttcagagagagtacggtatatttatggtaattttatccactagcaaatcttgatttagtttgatagtgtgtggaattttattttgaaggataagaccatgggaaaattgtggtaaagactgtttgtacccttcatgaaataattctgaagttgccatcagttttactaatcttctgtgaaatgcatagatatgcgcatgttcaactttttattgtggtcttataattaaatgtaaaattgaaaattcatttgctgtttcaaagtgtgatatctttcacaatagcctttttatagtcagtaattcagaataatcaagttcatatggataaatgcatttttatttcctatttctttagggagtgctacaaatgtttgtcacttaaatttcaagtttctgttttaatagttaactgactatagattgttttctatgccatgtatgtgccacttctgagagtagtaaatgactctttgctacattttaaaagcaattgtattagtaagaactttgtaaataaatacctaaaacccaagtgta

SEQ ID NO: 4285 - protein, 186 aa, Homo sapiens
MTSDELPKENWLKMLCRHVANTICKADAENLIYTADPESFEVNTKDMDSTLSRASRAIKKTSKKVTRAFSFSKTPKRALRRALMTSHGSVEGRSPSSNDKHVMSRLSSTSSLAITHSVSTSNVIGFTKHVYVQRLNSTGGRSQYSWFQSVRHSAFRASFSEILEGNTDFSNFKKVLSKSSLTFVKN

SEQ ID NO: 4286 - DNA, 2371 bp, Homo sapiens
catttcttagctgtgtgtcctgtagcaagtttcttattctctcaactgcatttttgcagatgatgttatatactgaggggcaatttgggtggtgattaagagcatggactctggaaccctagtgttcaaatccttgctctgctatttactagctgtatgtgttttggcaagttattaacaatctgtttcaatttcgttgtctgtaaagtgagtcttaagtagttataaggattaagcgagttattatatgtaaagtgcttagaacagtacctggcacattgtgagtgctcttgagttttataagtgatttctttttatttataaaatttccgcaggtaagacacataaataatactcattaaatatatattttaaagttgcttaaagtcttcagttaacacatcaaagagttatggctaaatctattagtgtatttatacaggtttttcatcaacattaatcttaaccaatgggagagaagctgcatttagttgataaaatgaatatatgcaaagtagtttggccaattaaaattgacaaatgcagataaacattaatttgtgaaaattagattatagctttctcgaagccacctgtagcaactattgtaaacattttcatctttcaaatgaaaataaatgaattttatagaaaattttagaaaattaatttatttatggttatgtcacttttaatagacagcatatgtaagaagcagctaaaataccttcaagacattaatgtcatcttctcaattgcttgtttctgttctaacagattacccattctgtttccacaagcaatgtaattggatttactaagcatgtttatgttcagcgcctaaactctactggtgggcgctctcagtactcctggtttcaatctgtacgtcattctgctttccgagctagtttttcagagatactagaaggaaatactgatttttcaaatttcaaaaaagttctttccaagtcatctttgacatttgtgaagaattaggagatttgccaaccactaatggaaacaagcctcatgaagtttaatggtatcccttctccctcccttgtcagccttccttccttctttgaaaggagaagtcatacgttaagtagatctacaactcatttgatatgaagcgttaccaaaatcttaaattatagaaatgtatagacacctcatactcaaataagaaactgacttaaatggtacttgtaattagcacttggtgaaagctggaaggaagataaataacactaaactatgctatttgatttttcttcttgaaagagtaaggtttacctgttacattttcaagttaattcatgtaaaaaatgatagtgattttgatgtaatttatctcttgtttgaatctgtcattcaaaggccaataatttaagttgctatcagctgatattagtagctttgcaaccctgatagagtaaataaattttatgggcgggtgccaaatactgctgtgaatctatttgtatagtatccatgaatgaatttatggaaatagatatttgtgcagctcaatttatgcagagattaaatgacatcataatactggatgaaaacttgcatagaattctgattaaatagtgggtctgtttcacatgtgcagtttgaagtatttaaataaccactcctttcacagtttattttcttctcaagcgttttcaagatctagcatgtggattttaaaagatttgccctcattaacaagaataacatttaaaggagattgtttcaaaatatttttgcaaattgagataaggacagaaagattgagaaacattgtatattttgcaaaaacaagatgtttgtagctgtttcagagagagtacggtatatttatggtaattttatccactagcaaatcttgatttagtttgatagtgtgtggaattttattttgaaggataagaccatgggaaaattgtggtaaagactgtttgtacccttcatgaaataattctgaagttgccatcagttttactaatcttctgtgaaatgcatagatatgcgcatgttcaactttttattgtggtcttataattaaatgtaaaattgaaaattcatttgctgtttcaaagtgtgatatctttcacaatagcctttttatagtcagtaattcagaataatcaagttcatatggataaatgcatttttatttcctatttctttagggagtgctacaaatgtttgtcacttaaatttcaagtttctgttttaatagttaactgactatagattgttttctatgccatgtatgtgccacttctgagagtagtaaatgactctttgctacattttaaaagcaattgtattagtaagaactttgtaaataaatacctaaaacccaagtgta

SEQ ID NO: 4287 - protein, 38 aa, Homo sapiens
METSLMKFNGIPSPSLVSLPSFFERRSHTLSRSTTHLI

SEQ ID NO: 4288 - DNA, 4933 bp, Homo sapiens
ccaccgactcctgcccgcctcaacacaatgccttacctgtgaagcttgaggccactcaagttccaaatttgtgacaaatcccccagggctcactggagtggcagatatagacctgcagctaactggatttgatttataagagagaaatctgcagtcaatgcccactcttgccacactgctaatatggaaaacagaatgttcaataggatatggtctgataaatagtgatgattgaagatgctgctccaatacatgtgaaatcaatgggagatatctgctgtctgaagatctttcagagcttttctcgacaagctcccctgtaagaaatcggaggtatattctaccattatacagtctttctcaagtggatataaatacgtttgcctcactgtaaccagacaactagacaactaatgtgggaccatggcactgcccagatgcacgtggccaaattatgtttggagagcagtgatggcatgcttggtacaccggggattgggtgccccattgactctctgtatgttgggatgtttgcttcaggctggccatgtgctatcacaaaaattggatgatgtggacccactggtggctaccaactttggaaagataagagggattaagaaggaactcaataatgaaattttggggcctgttattcaatttcttggggttccatatgcagccccaccaacaggggaacgtcgttttcagcctccagaaccaccatctccctggtcagatatcagaaatgccactcaatttgctcctgtgtgtccccagaatatcattgatggcagattgccagaagtcatgcttcctgtgtggtttactaataacttggatgtggtttcatcatatgtgcaagaccagagcgaagactgcctatatttaaatatatatgtcccgactgaggatgatattcgggacagtgggggtcccaaaccagtgatggtgtatatccatggtggctcatatatggaaggtactggaaatttatatgatggaagtgtcttggcaagttatggcaatgtgatcgtcatcacagtcaactatcgacttggagtactcggtttcttgagtacaggcgatcaggctgcaaaggggaactatggactccttgatctcatacaagctttaagatggactagtgaaaacattggattctttggtggtgaccccttaagaatcactgtttttggatctggtgctgggggttcatgtgtcaacctgctgactttatcccattattctgaaggtaaccgttggagcaattcaaccaaaggactttttcaacgagcaatagctcaaagtggaacagccctttccagctgggctgttagttttcaacctgcaaaatatgctagaatgttggccacaaaagttggttgcaatgtttcagatacagtagagttagtggaatgcctacagaagaagccttacaaagaacttgttgaccaagatattcaaccagctcgataccacatagcctttggacctgtgattgatggtgatgtaataccagacgacccccagatattgatggagcaaggagagtttctcaactatgatataatgttaggagtgaaccaaggggaagggttaaaatttgttgaaaatatagtagatagcgatgatggtatatcagctagtgattttgactttgctgtttcaaattttgttgataatttatatggatatcctgaaggcaaagatgttttgagagaaaccattaagttcatgtatactgactgggctgaccgtcataaccctgaaaccagaagaaagacattactggctttgtttacggaccatcagtgggtggcaccagctgtagccacagcggatcttcactcaaactttggttcacctacgtacttctatgccttttaccatcattgccaaacagatcaggttccagcttgggctgatgcagcccacggagacgaggttccctatgtactgggaatccccatgattggccctacagagttatttccttgcaatttctccaaaaatgatgtgatgctgagtgcagttgtaatgacatactggacaaattttgctaaaactggtgacccaaatcaaccagtccctcaagacacgaaattcattcataccaaacccaaccgttttgaagaagtagcatggaccagatattcccagaaagaccaactttatctccatattggattaaaaccaagagttaaagaacattacagagccaataaggtgaacctctggttggagttggtacctcatctgcataatctcaatgacatttctcagtatacctctacaacaactaaagtgccatcaactgacatcactttcagacctacgagaaaaaattctgtacctgtcacgtcagcctttcccactgccaagcaggatgatcccaaacaacaaccaagtccattttcagtggatcaaagggactactcaacagagctgagtgtcactattgcagttggagcatcactgctgtttctgaacatcttggcctttgcagccctgtactacaaaaaggataagaggagacatgatgttcacaggagatgcagccctcagcgcactactaccaatgatctaacccatgcacaagaagaggaaatcatgtccctccaaatgaagcacactgatttggatcatgaatgtgagtccattcatccacatgaggtggttcttcggaccgcctgtcccccagattacacactagctatgaggaggtcacctgatgatgttcccttaatgacacccaacaccattacaatgattcccaacactataccagggattcagcccttacacacattcaatacatttactggaggacagaacaatactctgccccatccccatccccacccccattcacattcaacaaccagggtatagccagataagagaaacaaactattttttttgatggattgcagtaaacgatcactgaagattccttggctttcaacctacaagacttactatttaaataaggaggaatattatgtgaatatacatatcaagaactttgggggttttgaaaaaaatgaattgtatatatacaaatcaactttaaaaacaaatttcaattgcttgaagcaattgttctgaatgatactttttcattcacattcaagaattaattttttgaagatttaagttacataatggaattaggcatgtggaacaccaaacaggaaagaactatgtctgaaatataaaaaataaaaataaaaaaacaactatgaatatgcacaagggacacaccagtggaatgtcagataattttcaccagtttttatttggagccgttttattgtgtagaccatatttacatatttggataagtacacaaagcgtcaatgctgttaatggccttagcaaaggctcatgctgaaatttgccagtaaaacaaagaagtttaaagactggcaggtacaccattatcacataagtgctgtcagtataaagttgtggggataaaggaaactggatatttttagcacgatgtgcatgataatttatatgcttggtggctgtgctgctgattaagccgtaattaaaattcttctcatcccattggagtttttaatagaagcttcctccatcaattggcagaacctaaagaagattttaaggggcaaaagtaattacaataaaataattcacagtagtttcaatatagaaggaattagctattaaaggtatttgaagaaactataggtatagtggtgaatactcgctgatatgaatcccagaaaaaaatttcctgtttttaatgttcttttcaatcccatctagataatttatagaaatataaccctaattggacatgtggtacaggatctataagttgctgtgtttttttgttactctgtattttgttccttttggtaaggtgaagtgtgtccaaagagttacttgcaacagtctttcatgatatgaggatgcccccgtattaccactctgattatagttctgagttctttgatttactcatgctgcatgacaaaatgtttactaataacaattcattataaagttatatccctctttacatcacttatctttctcactgaggttcattcactggaatttactcacgcaatctcagtagagtacaacgtagatacagaacctaggagagtcaacatctggaggattttagtctttcttacacatatgtgtgattttaaacgaatattctcagaccacaggaaactcttcatccccctgttgtttaccagtaacagtatatcacagacctttccaaatgtttgtatatgtaatcagatgtacatttatattgaaaaacaaatgagatggacttaaagagcacatcctgataaatactttctctctcacctgtactatatttctattagactaaagttatgtgattttttttttacattttttcagatgactagcaattttgatagtttataagataatgcaaagaactttctctgacaaactaactgcagtaacagaaacctttcttttcagttactctttttcaagaatgaaagattattatacaaaaaattgtatactacttgatggaaccaactttgtacatcttggccatgtcactggtcattgtgtgaaataaagataatctggataatgactattagtccaatgctaagaaacatgatctttgctcattaaagagctaaaatgtttattgctgttttgtctttcttttttctaaaaaaagaaaaaaaagaaaaaaaggaaaagaagaacaaagaaacatgactgtctcaaagagtaatttttctagattagaccagtcaggtttttgaagacatataggtaacttccacagaaaacacaaacatgtatttaaaggcaagtctcatctaagatgaaactcataaaaattatttaatgtttgttatgaatttaaaagctccagaaatccatg

SEQ ID NO: 4289 - protein, 823 aa, Homo sapiens; identical to SEQ ID NO: 452

SEQ ID NO: 4290 - DNA, 5381 bp, Homo sapiens
aaagaaaccagagttttttttcagtcacccgaacagggttatgaaattgttcttctggacatcagcaccgggaattcatttttgaggtcaatttccaatcgagataaatctattggattagtaggattatctgattgcagccgaaagaagtaacgttgtttgatcatttgtatttcttgcctgatggtcggatttacatggaggtggctttgggtccccaggattctggatcgtggttgcatctggagagaaaaaaggatcaatcgacacgttttagaagtgtccgtgggtgaataaaaaaggaggggggggtgcaaaactggggttgcggatgcttaaagcaaaaaaagagaaaaggaagcgtcttgaatcctggaacaagaattaccgggtgctcgagatttcaaaaaagcgtctagaaactggtaaatacttggaccatttcagcttgaatttgacggcgaagtgttgtagagaccgtctccttgaatcattgcaaagggaccggggaaagatgagggggctccctctgtggatttatcttgctgagggatatagacctgcagctaactggatttgatttataagagagaaatctgcagtcaatgcccactcttgccacactgctaatatggaaaacagaatgttcaataggatatggtctgataaatagtgatgattgaagatgctgctccaatacatgtgaaatcaatgggagatatctgctgtctgaagatctttcagagcttttctcgacaagctcccctgtaagaaatcggaggtatattctaccattatacagtctttctcaagtggatataaatacgtttgcctcactgtaaccagacaactagacaactaatgtgggaccatggcactgcccagatgcacgtggccaaattatgtttggagagcagtgatggcatgcttggtacaccggggattgggtgccccattgactctctgtatgttgggatgtttgcttcaggctggccatgtgctatcacaaaaattggatgatgtggacccactggtggctaccaactttggaaagataagagggattaagaaggaactcaataatgaaattttggggcctgttattcaatttcttggggttccatatgcagccccaccaacaggggaacgtcgttttcagcctccagaaccaccatctccctggtcagatatcagaaatgccactcaatttgctcctgtgtgtccccagaatatcattgatggcagattgccagaagtcatgcttcctgtgtggtttactaataacttggatgtggtttcatcatatgtgcaagaccagagcgaagactgcctatatttaaatatatatgtcccgactgaggatgatattcgggacagtgggggtcccaaaccagtgatggtgtatatccatggtggctcatatatggaaggtactggaaatttatatgatggaagtgtcttggcaagttatggcaatgtgatcgtcatcacagtcaactatcgacttggagtactcggtttcttgagtacaggcgatcaggctgcaaaggggaactatggactccttgatctcatacaagctttaagatggactagtgaaaacattggattctttggtggtgaccccttaagaatcactgtttttggatctggtgctgggggttcatgtgtcaacctgctgactttatcccattattctgaaggtaaccgttggagcaattcaaccaaaggactttttcaacgagcaatagctcaaagtggaacagccctttccagctgggctgttagttttcaacctgcaaaatatgctagaatgttggccacaaaagttggttgcaatgtttcagatacagtagagttagtggaatgcctacagaagaagccttacaaagaacttgttgaccaagatattcaaccagctcgataccacatagcctttggacctgtgattgatggtgatgtaataccagacgacccccagatattgatggagcaaggagagtttctcaactatgatataatgttaggagtgaaccaaggggaagggttaaaatttgttgaaaatatagtagatagcgatgatggtatatcagctagtgattttgactttgctgtttcaaattttgttgataatttatatggatatcctgaaggcaaagatgttttgagagaaaccattaagttcatgtatactgactgggctgaccgtcataaccctgaaaccagaagaaagacattactggctttgtttacggaccatcagtgggtggcaccagctgtagccacagcggatcttcactcaaactttggttcacctacgtacttctatgccttttaccatcattgccaaacagatcaggttccagcttgggctgatgcagcccacggagacgaggttccctatgtactgggaatccccatgattggccctacagagttatttccttgcaatttctccaaaaatgatgtgatgctgagtgcagttgtaatgacatactggacaaattttgctaaaactggtgacccaaatcaaccagtccctcaagacacgaaattcattcataccaaacccaaccgttttgaagaagtagcatggaccagatattcccagaaagaccaactttatctccatattggattaaaaccaagagttaaagaacattacagagccaataaggtgaacctctggttggagttggtacctcatctgcataatctcaatgacatttctcagtatacctctacaacaactaaagtgccatcaactgacatcactttcagacctacgagaaaaaattctgtacctgtcacgtcagcctttcccactgccaagcaggatgatcccaaacaacaaccaagtccattttcagtggatcaaagggactactcaacagagctgagtgtcactattgcagttggagcatcactgctgtttctgaacatcttggcctttgcagccctgtactacaaaaaggataagaggagacatgatgttcacaggagatgcagccctcagcgcactactaccaatgatctaacccatgcacaagaagaggaaatcatgtccctccaaatgaagcacactgatttggatcatgaatgtgagtccattcatccacatgaggtggttcttcggaccgcctgtcccccagattacacactagctatgaggaggtcacctgatgatgttcccttaatgacacccaacaccattacaatgattcccaacactataccagggattcagcccttacacacattcaatacatttactggaggacagaacaatactctgccccatccccatccccacccccattcacattcaacaaccagggtatagccagataagagaaacaaactattttttttgatggattgcagtaaacgatcactgaagattccttggctttcaacctacaagacttactatttaaataaggaggaatattatgtgaatatacatatcaagaactttgggggttttgaaaaaaatgaattgtatatatacaaatcaactttaaaaacaaatttcaattgcttgaagcaattgttctgaatgatactttttcattcacattcaagaattaattttttgaagatttaagttacataatggaattaggcatgtggaacaccaaacaggaaagaactatgtctgaaatataaaaaataaaaataaaaaaacaactatgaatatgcacaagggacacaccagtggaatgtcagataattttcaccagtttttatttggagccgttttattgtgtagaccatatttacatatttggataagtacacaaagcgtcaatgctgttaatggccttagcaaaggctcatgctgaaatttgccagtaaaacaaagaagtttaaagactggcaggtacaccattatcacataagtgctgtcagtataaagttgtggggataaaggaaactggatatttttagcacgatgtgcatgataatttatatgcttggtggctgtgctgctgattaagccgtaattaaaattcttctcatcccattggagtttttaatagaagcttcctccatcaattggcagaacctaaagaagattttaaggggcaaaagtaattacaataaaataattcacagtagtttcaatatagaaggaattagctattaaaggtatttgaagaaactataggtatagtggtgaatactcgctgatatgaatcccagaaaaaaatttcctgtttttaatgttcttttcaatcccatctagataatttatagaaatataaccctaattggacatgtggtacaggatctataagttgctgtgtttttttgttactctgtattttgttccttttggtaaggtgaagtgtgtccaaagagttacttgcaacagtctttcatgatatgaggatgcccccgtattaccactctgattatagttctgagttctttgatttactcatgctgcatgacaaaatgtttactaataacaattcattataaagttatatccctctttacatcacttatctttctcactgaggttcattcactggaatttactcacgcaatctcagtagagtacaacgtagatacagaacctaggagagtcaacatctggaggattttagtctttcttacacatatgtgtgattttaaacgaatattctcagaccacaggaaactcttcatccccctgttgtttaccagtaacagtatatcacagacctttccaaatgtttgtatatgtaatcagatgtacatttatattgaaaaacaaatgagatggacttaaagagcacatcctgataaatactttctctctcacctgtactatatttctattagactaaagttatgtgattttttttttacattttttcagatgactagcaattttgatagtttataagataatgcaaagaactttctctgacaaactaactgcagtaacagaaacctttcttttcagttactctttttcaagaatgaaagattattatacaaaaaattgtatactacttgatggaaccaactttgtacatcttggccatgtcactggtcattgtgtgaaataaagataatctggataatgactattagtccaatgctaagaaacatgatctttgctcattaaagagctaaaatgtttattgctgttttgtctttcttttttctaaaaaaagaaaaaaaagaaaaaaaggaaaagaagaacaaagaaacatgactgtctcaaagagtaatttttctagattagaccagtcaggtttttgaagacatataggtaacttccacagaaaacacaaacatgtatttaaaggcaagtctcatctaagatgaaactcataaaaattatttaatgtttgttatgaatttaaaagctccagaaatccatg

SEQ ID NO: 4291 - protein, 823 aa, Homo sapiens; identical to SEQ ID NO: 452

SEQ ID NO: 4292 - DNA, 854 bp, Homo sapiens
tctctctccctttctctctctctctctgtttctatctctctctacctaaacaagctaagaactgaaaagttctgattgacaggttgaaagacctggagcacttaagtcttctattattcaccaatcttttctccttcagcaggtggctccaatgtttaaaacctagaggttgaaccaggggttgtgaaccttaaatagagtgttatgagctactgactcttaaactttgagcttcagaggaagttaacagcaagtctgatgactcatatgcattctcacatgcttgaaggtggctgaagatgaaaatagccgaactagcagcaattgttttaaaaaccgcaaggattattcgccgttgaaaataaaatcttgtgctccattcaagtacaggcacatcttctaaggaacaccaccacacaaagaatgcggattgtttttccaatgtttttagagatgatactgcattgagaaacgccacatactgagagctctgttatcatacccattttatggatgacgaagaacacttggagaagataagaaaatggccacagttacaatgagatcaaaacagctcaatcttaaaatcaagtctctcactccaaatggagatttttatgctacattattaccaaaataattttgtttctcttttcctcaaggaagcacacatttgctgtgagcattatatattacttattaaaatttagtgattttagaatcgtaagaactttagtagaatatagttgaaaaatctgcataccttgtatagatctaaatcaaaggatactagaaaatacaagctatataaagggattacttaattattcctattttatcctgtgtgaaattag

SEQ ID NO: 4293 - protein, 34 aa, Homo sapiens
MEIFMLHYYQNNFVSLFLKEAHICCEHYILLIKI

SEQ ID NO: 4294 - DNA, 765 bp, Homo sapiens
tctctctccctttctctctctctctctgtttctatctctctctacctaaacaagctaagaactgaaaagttctgattgacaggttgaaagacctggagcacttaagtcttctattattcaccaatcttttctccttcagcaggtggctccaatgtttaaaacctagaggttgaaccaggggttgtgaaccttaaatagagtgttatgagctactgactcttaaactttgagcttcagaggaagttaacagcaagtctgatgactcatatgcattctcacatgcttgaaggtggctgaagatgaaaatagccgaactagcagcaattgttttaaaaaccgcaaggattattcgccgttgaaaataaaatcttgtgctccattcaagtacaggcacatcttctaaggaacaccaccacacaaattatcatacccattttatggatgacgaagaacacttggagaagataagaaaatggccacagttacaatgagatcaaaacagctcaatcttaaaatcaagtctctcactccaaatggagatttttatgctacattattaccaaaataattttgtttctcttttcctcaaggaagcacacatttgctgtgagcattatatattacttattaaaatttagtgattttagaatcgtaagaactttagtagaatatagttgaaaaatctgcataccttgtatagatctaaatcaaaggatactagaaaatacaagctatataaagggattacttaattattcctatttt

SEQ ID NO: 4295 - protein, 34 aa, Homo sapiens; identical to SEQ ID NO: 4293

SEQ ID NO: 4296 - DNA, 1574 bp, Homo sapiens
gtaaatatgtttggataacccagcagagccatttaacctttgggaacaaggcaactagcgtctggcagcaggaatccaaccagtgccctgagttctgaggcagagaggaggacagaagaaacaagaggctggagattgtcaaattcagtatcccagttggctcttgattcttggtgaaaccatccctcagctcctagagggagattgttagatcatgaaactaattaccatccttttcctctgctccaggctgctactaagtttaacccaggaatcacagtccgaggaaattgactgcaatgacaaggatttatttaaagctgtggatgctgctctgaagaaatataacagtcaaaaccaaagtaacaaccagtttgtattgtaccgcataactgaagccactaagacggttggctctgacacgttttattccttcaagtacgaaatcaaggagggggattgtcctgttcaaagtggcaaaacctggcaggactgtgagtacaaggatgctgcaaaagcagccactggagaatgcacggcaaccgtggggaagaggagcagtacgaaattctccgtggctacccagacctggagcccattctgagacacggcattcagtactttaacaacaacactcaacattcctccctcttcatgcttaatgaagtaaaacgggcccaaagacaggtggtggctggattgaactttcgaattacctactcaattgtgcaaacgaattgttccaaagagaattttctgttcttaactccagactgcaagtccctttggaatggtgataccggtgaatgtacagataatgcatacatcgatattcagctacgaattgcttccttctcacagaactgtgacatttatccagggaaggattttgtacaaccacctaccaagatttgcgtgggctgccccagagatatacccaccaacagcccagagctggaggagacactgactcacaccatcacaaagcttaatgcagagaataacgcaactttctatttcaagattgacaatgtgaaaaaagcaagagtacaggtggtggctggcaagaaatattttattgacttcgtggccagggaaaccacatgttccaaggaaagtaatgaagagttgaccgaaagctgtgagaccaaaaaacttggccaaagcctagattgcaacgctgaagtttatgtggtaccctgggagaaaaaaatttaccctactgtcaactgtcaaccactgggaatgatctcactgatgaaaaggcctccaggtttttcacctttccgatcatcacgaataggggaaataaaagaagaaacaactagtcacctaaggtcctgcgagtacaagggtcgacccccaaaggcaggggcagagccagcatctgagagggaggtctcttgaccaatgggcagaatcttcactccaggcacatagccccaaccacctctgccagcaaccttgagaggaaggacaagaagaaagatgggatagaatttaaatagagaagaatgccattttatcactctgcctctgggtgaaataaagatcagtcttgatgttctaactct

SEQ ID NO: 4297 - protein, 291 aa, Homo sapiens
MHGNRGEEEQYEILRGYPDLEPILRHGIQYFNNNTQHSSLFMLNEVKRAQRQVVAGLNFRITYSIVQTNCSKENFLFLTPDCKSLWNGDTGECTDNAYIDIQLRIASFSQNCDIYPGKDFVQPPTKICVGCPRDIPTNSPELEETLTHTITKLNAENNATFYFKIDNVKKARVQVVAGKKYFIDFVARETTCSKESNEELTESCETKKLGQSLDCNAEVYVVPWEKKIYPTVNCQPLGMISLMKRPPGFSPFRSSRIGEIKEETTSHLRSCEYKGRPPKAGAEPASEREVS

SEQ ID NO: 4298 - DNA, 1665 bp, Homo sapiens
gtaaatatgtttggataacccagcagagccatttaacctttgggaacaaggcaactagcgtctggcagcaggaatccaaccagtgccctgagttctgaggcagagaggaggacagaagaaacaagaggctggagattgtcaaattcagtatcccagttggctcttgattcttggtgaaaccatccctcagctcctagagggagattgttagatcatgaaactaattaccatccttttcctctgctccaggctgctactaagtttaacccaggaatcacagtccgaggaaattgactgcaatgacaaggatttatttaaagctgtggatgctgctctgaagaaatataacagtcaaaaccaaagtaacaaccagtttgtattgtaccgcataactgaagccactaagacggttggctctgacacgttttattccttcaagtacgaaatcaaggagggggattgtcctgttcaaagtggcaaaacctggcaggactgtgagtacaaggatgctgcaaaagcagccactggagaatgcacggcaaccgtggggaagaggagcagtacgaaattctccgtggctacccagacctgccagattactccagccgagggccctgtggtgacagcccagtacgactgcctcggctgtgtgcatcctatatcaacgcagagcccagacctggagcccattctgagacacggcattcagtactttaacaacaacactcaacattcctccctcttcatgcttaatgaagtaaaacgggcccaaagacaggtggtggctggattgaactttcgaattacctactcaattgtgcaaacgaattgttccaaagagaattttctgttcttaactccagactgcaagtccctttggaatggtgataccggtgaatgtacagataatgcatacatcgatattcagctacgaattgcttccttctcacagaactgtgacatttatccagggaaggattttgtacaaccacctaccaagatttgcgtgggctgccccagagatatacccaccaacagcccagagctggaggagacactgactcacaccatcacaaagcttaatgcagagaataacgcaactttctatttcaagattgacaatgtgaaaaaagcaagagtacaggtggtggctggcaagaaatattttattgacttcgtggccagggaaaccacatgttccaaggaaagtaatgaagagttgaccgaaagctgtgagaccaaaaaacttggccaaagcctagattgcaacgctgaagtttatgtggtaccctgggagaaaaaaatttaccctactgtcaactgtcaaccactgggaatgatctcactgatgaaaaggcctccaggtttttcacctttccgatcatcacgaataggggaaataaaagaagaaacaactagtcacctaaggtcctgcgagtacaagggtcgacccccaaaggcaggggcagagccagcatctgagagggaggtctcttgaccaatgggcagaatcttcactccaggcacatagccccaaccacctctgccagcaaccttgagaggaaggacaagaagaaagatgggatagaatttaaatagagaagaatgccattttatcactctgcctctgggtgaaataaagatcagtcttgatgttctaactct

SEQ ID NO: 4299 - protein, 427 aa, Homo sapiens; identical to SEQ ID NO: 454

SEQ ID NO: 4300 - DNA, 1557 bp, Homo sapiens
gtaaatatgtttggataacccagcagagccatttaacctttgggaacaaggcaactagcgtctggcagcaggaatccaaccagtgccctgagttctgaggcagagaggaggacagaagaaacaagaggctggagattgtcaaattcagtatcccagttggctcttgattcttggtgaaaccatccctcagctcctagagggagattgttagatcatgaaactaattaccatccttttcctctgctccaggctgctactaagtttaacccaggaatcacagtccgaggaaattgactgcaatgacaaggatttatttaaagctgtggatgctgctctgaagaaatataacagtcaaaaccaaagtaacaaccagtttgtattgtaccgcataactgaagccactaagacggttggctctgacacgttttattccttcaagtacgaaatcaaggagggggattgtcctgttcaaagtggcaaaacctggcaggactgtgagtacaaggatgctgcaaaagcagccactggagaatgcacggcaaccgtggggaagaggagcagtacgaaattctccgtggctacccagacctgccagattactccagccgagggccctgtggtgacagcccagtacgactgcctcggctgtgtgcatcctatatcaacgcagagcccagacctggagcccattctgagacacggcattcagtactttaacaacaacactcaacattcctccctcttcatgcttaatgaagtaaaacgggcccaaagacaggataccggtgaatgtacagataatgcatacatcgatattcagctacgaattgcttccttctcacagaactgtgacatttatccagggaaggattttgtacaaccacctaccaagatttgcgtgggctgccccagagatatacccaccaacagcccagagctggaggagacactgactcacaccatcacaaagcttaatgcagagaataacgcaactttctatttcaagattgacaatgtgaaaaaagcaagagtacaggtggtggctggcaagaaatattttattgacttcgtggccagggaaaccacatgttccaaggaaagtaatgaagagttgaccgaaagctgtgagaccaaaaaacttggccaaagcctagattgcaacgctgaagtttatgtggtaccctgggagaaaaaaatttaccctactgtcaactgtcaaccactgggaatgatctcactgatgaaaaggcctccaggtttttcacctttccgatcatcacgaataggggaaataaaagaagaaacaactagtcacctaaggtcctgcgagtacaagggtcgacccccaaaggcaggggcagagccagcatctgagagggaggtctcttgaccaatgggcagaatcttcactccaggcacatagccccaaccacctctgccagcaaccttgagaggaaggacaagaagaaagatgggatagaatttaaatagagaagaatgccattttatcactctgcctctgggtgaaataaagatcagtcttgatgttctaactct

SEQ ID NO: 4301 - protein, 391 aa, Homo sapiens
MKLITILFLCSRLLLSLTQESQSEEIDCNDKDLFKAVDAALKKYNSQNQSNNQFVLYRITEATKTVGSDTFYSFKYEIKEGDCPVQSGKTWQDCEYKDAAKAATGECTATVGKRSSTKFSVATQTCQITPAEGPVVTAQYDCLGCVHPISTQSPDLEPILRHGIQYFNNNTQHSSLFMLNEVKRAQRQDTGECTDNAYIDIQLRIASFSQNCDIYPGKDFVQPPTKICVGCPRDIPTNSPELEETLTHTITKLNAENNATFYFKIDNVKKARVQVVAGKKYFIDFVARETTCSKESNEELTESCETKKLGQSLDCNAEVYVVPWEKKIYPTVNCQPLGMISLMKRPPGFSPFRSSRIGEIKEETTSHLRSCEYKGRPPKAGAEPASEREVS

SEQ ID NO: 4302 - DNA, 2127 bp, Homo sapiens
gtaaatatgtttggataacccagcagagccatttaacctttgggaacaaggcaactagcgtctggcagcaggaatccaaccagtgccctgagttctgaggcagagaggaggacagaagaaacaagaggctggagattgtcaaattcagtatcccagttggctcttgattcttggtgaaaccatccctcagctcctagagggagattgttagatcatgaaactaattaccatccttttcctctgctccaggctgctactaagtttaacccaggaatcacagtccgaggaaattgactgcaatgacaaggatttatttaaagctgtggatgctgctctgaagaaatataacagtcaaaaccaaagtaacaaccagtttgtattgtaccgcataactgaagccactaagacggttggctctgacacgttttattccttcaagtacgaaatcaaggagggggattgtcctgttcaaagtggcaaaacctggcaggactgtgagtacaaggatgctgcaaaagcagccactggagaatgcacggcaaccgtggggaagaggagcagtacgaaattctccgtggctacccagacctgccagattactccagccgagggccctgtggtgacagcccagtacgactgcctcggctgtgtgcatcctatatcaacgcagagcccagacctggagcccattctgagacacggcattcagtactttaacaacaacactcaacattcctccctcttcatgcttaatgaagtaaaacgggcccaaagacaggtggtggctggattgaactttcgaattacctactcaattgtgcaaacgaattgttccaaagagaattttctgttcttaactccagactgcaagtccctttggaatggtgataccggtgaatgtacagataatgcatacatcgatattcagctacgaattgcttccttctcacagaactgtgacatttatccagggaaggattttgtacaaccacctaccaagatttgcgtgggctgccccagagatatacccaccaacagcccagagctggaggagacactgactcacaccatcacaaagcttaatgcagagaataacgcaactttctatttcaagattgacaatgtgaaaaaagcaagagtacaggtggtggctggcaagaaatattttattgacttcgtggccagggaaaccacatgttccaaggaaagtaatgaagagttgaccgaaagctgtgagaccaaaaaacttggccaaagcctagattgcaacgctgaagtttatgtggtaccctgggagaaaaaaatttaccctactgtcaactgtcaaccactgggaatgatctcactgatgaaaaggcctccaggtttttcacctttccgatcatcacgaataggggaaataaaagaagaaacaactagtcacctaaggtcctgcgagtacaagggtcgacccccaaaggcaggggcagagccagcatctgagagggaggtctcttgaccaatgggcagaatcttcactccaggcacatagccccaaccacctctgccagcaaccttgagaggaaggacaagaagaaagatgggatagaatttaaatagagaagaatgccattttatcactctgcctctgggtgaaataaagatcagtcttgatgttctaactctaattcacagtggtctcctttcagccctacccattctgcagcaaattccagctggtcagagagtcagtgctgtggctctgccatggaggctcataacccaacactggaacattccctagccaaggcagaagtccttaggcgggacttccttaccaccacgggtgctaaaagaagagttagtaggtcatgcttctaccagtaatctaaggactctctccttctcttcttcctctttctccagatttccaagccttagctaagagtaatttggcttgtttagtattgttttcttatggtccagttaattaccaaaaatatttttaaaatcatctctgttaatagaatgtctaccaacttctcactatcagaaaatactcaacctccaaacaatttgaaattatctttctgatccaggtaaagaagcaaattgaaaatcaataaagtaaaaagtgacggagatttt

SEQ ID NO: 4303 - protein, 427 aa, Homo sapiens; identical to SEQ ID NO: 454

SEQ ID NO: 4304 - DNA, 2019 bp, Homo sapiens
gtaaatatgtttggataacccagcagagccatttaacctttgggaacaaggcaactagcgtctggcagcaggaatccaaccagtgccctgagttctgaggcagagaggaggacagaagaaacaagaggctggagattgtcaaattcagtatcccagttggctcttgattcttggtgaaaccatccctcagctcctagagggagattgttagatcatgaaactaattaccatccttttcctctgctccaggctgctactaagtttaacccaggaatcacagtccgaggaaattgactgcaatgacaaggatttatttaaagctgtggatgctgctctgaagaaatataacagtcaaaaccaaagtaacaaccagtttgtattgtaccgcataactgaagccactaagacggttggctctgacacgttttattccttcaagtacgaaatcaaggagggggattgtcctgttcaaagtggcaaaacctggcaggactgtgagtacaaggatgctgcaaaagcagccactggagaatgcacggcaaccgtggggaagaggagcagtacgaaattctccgtggctacccagacctgccagattactccagccgagggccctgtggtgacagcccagtacgactgcctcggctgtgtgcatcctatatcaacgcagagcccagacctggagcccattctgagacacggcattcagtactttaacaacaacactcaacattcctccctcttcatgcttaatgaagtaaaacgggcccaaagacaggataccggtgaatgtacagataatgcatacatcgatattcagctacgaattgcttccttctcacagaactgtgacatttatccagggaaggattttgtacaaccacctaccaagatttgcgtgggctgccccagagatatacccaccaacagcccagagctggaggagacactgactcacaccatcacaaagcttaatgcagagaataacgcaactttctatttcaagattgacaatgtgaaaaaagcaagagtacaggtggtggctggcaagaaatattttattgacttcgtggccagggaaaccacatgttccaaggaaagtaatgaagagttgaccgaaagctgtgagaccaaaaaacttggccaaagcctagattgcaacgctgaagtttatgtggtaccctgggagaaaaaaatttaccctactgtcaactgtcaaccactgggaatgatctcactgatgaaaaggcctccaggtttttcacctttccgatcatcacgaataggggaaataaaagaagaaacaactagtcacctaaggtcctgcgagtacaagggtcgacccccaaaggcaggggcagagccagcatctgagagggaggtctcttgaccaatgggcagaatcttcactccaggcacatagccccaaccacctctgccagcaaccttgagaggaaggacaagaagaaagatgggatagaatttaaatagagaagaatgccattttatcactctgcctctgggtgaaataaagatcagtcttgatgttctaactctaattcacagtggtctcctttcagccctacccattctgcagcaaattccagctggtcagagagtcagtgctgtggctctgccatggaggctcataacccaacactggaacattccctagccaaggcagaagtccttaggcgggacttccttaccaccacgggtgctaaaagaagagttagtaggtcatgcttctaccagtaatctaaggactctctccttctcttcttcctctttctccagatttccaagccttagctaagagtaatttggcttgtttagtattgttttcttatggtccagttaattaccaaaaatatttttaaaatcatctctgttaatagaatgtctaccaacttctcactatcagaaaatactcaacctccaaacaatttgaaattatctttctgatccaggtaaagaagcaaattgaaaatcaataaagtaaaaagtgacggagatttt

SEQ ID NO: 4305 - protein, 391 aa, Homo sapiens; identical to SEQ ID NO: 4301

SEQ ID NO: 4306 - DNA, 935 bp, Homo sapiens
atcccagttggctcttgattcttggtgaaaccatccctcagctcctagagggagattgttagatcatgaaactaattaccatcccttccctagccaagccaggtgtaacagttaccttttctgactttcaggactctgatctcattgcaactatgatgcctcctatatcaccagctcccatacagagtgatgacgattggatccctgatatccagatagacccaaatggcctttcatttaacccaatatcagattttccagacacgacctccccaaaatgtcctggacgcccctggaagtcagttagtgaaattaatccaaccacacaaatgaaagaatcttattatttcgatctcactgatggcctttcttaatttaagtggctatgggtatttctttcatactttattaaagtatcaatatccctctctccattgtccagatgaaaatatcctgatataatgcaccaaaaaccatgcagcttcggaacagtctaaagagaagtggtgagactcccagtggagacaccatcagtctccacggactgcataaaattgtgtgccacaattctaactcttttctgaatcttcttcccaagttttctaaactagcacagtaaacagacaaactaatgtgccgtatggcctgctgcaattggcttctctgataacaaatatgtaccttacaacatatgtcatgaatttgcatacaaagattcttgtcattcttaataaactgtggcacttggtatttgaatgtgtgtgaaaataagggaagtcaagagattaaatgctgaacttattaatggaatagaaataataaggaggctgaggctggagaattgcttgaacccgggaggcggaggttgcagtgagccgagatcgtgccactgcgctccagcctgggcatcagagcaagattctgtctcagaaaaa

SEQ ID NO: 4307 - protein, 102 aa, Homo sapiens
MKLITIPSLAKPGVTVTFSDFQDSDLIATMMPPISPAPIQSDDDWIPDIQIDPNGLSFNPISDFPDTTSPKCPGRPWKSVSEINPTTQMKESYYFDLTDGLS

SEQ ID NO: 4308 - DNA, 254 bp, Homo sapiens
ggttgctggcagaggtggttggggctatgtgcctggagtgaagattctgcccattggtcaagagacctccctctcagatgctggctctgcccctgcctttgggggtcgacccttgtactcgcaggaccttaggtgactctgactttgtcaaaggaaaaatttctgcatgtgcacacacagatcttggaagtttattcatctcagcagaggcagacaggagcatcaacagccttggggacagcagcagtggtggt

SEQ ID NO: 4309 - protein, 58 aa, Homo sapiens
MLALPLPLGVDPCTRRTLGDSDFVKGKISACAHTDLGSLFISAEADRSINSLGDSSSG

SEQ ID NO: 4310 - DNA, 2132 bp, Homo sapiens
ggcgcggctcccccggcccgcctctgcgtcagggacgcggaaaccccgtaggagcagggcgggcggggaaagcgaggtttaactaactccgcagctatattcttccgccgcgaggattttatccgaggtaacgaccccaggatcacaattttgtagctgaccgaagcacggcgagaaaattcctccgcaagaaacgggttccggccacgagcctataaaaaacgggtggttgggcgccgctgtcttttcagtcgggcgctgagtggtttttcggatcatgtctggtggctccgcggattataacagagaacatggcggcccagagggaatggaccccgatggtgtcatcgagagcaactggaatgagattgttgataactttgatgatatgaatttaaaggagtctctccttcgtggcatctatgcttacggttttgagaagccttccgctattcagcagagagctattattccctgtattaaagggtatgatgtgattgctcaagctcagtcaggtactggcaagacagccacatttgctatttccatcctgcaacagttggagattgagttcaaggagacccaagcactagtattggcccccaccagagaactggctcaacagatccaaaaggtaattctggcacttggagactatatgggagccacttgtcatgcctgcattggtggaacaaatgttcgaaatgaaatgcaaaaactgcaggctgaagcaccacatattgttgttggtacacccgggagagtgtttgatatgttaaacagaagatacctttctccaaaatggatcaaaatgtttgttttggatgaagcagatgaaatgttgagccgtggttttaaggatcaaatctatgagattttccaaaaactaaacacaagtattcaggttgtgttgctttctgccacaatgccaactgatgtgttggaagtgaccaaaaaattcatgagagatccaattcgaattctggtgaaaaaggaagaattgacccttgaaggaatcaaacagttttatattaatgttgagagagaggaatggaagttggatacactttgtgacttgtacgagacactgaccattacacaggctgttatttttctcaatacgaggcgcaaggtggactggctgactgagaagatgcatgccagagacttcacagtttctgctctgcatggtgacatggaccagaaggagagagatgttatcatgagggaattccggtcagggtcaagtcgtgttctgatcactactgacttgttggctcgcgggattgatgtgcaacaagtgtctttggttataaattatgatctacctaccaatcgtgaaaactatattcacagaattggcagagggggtcgatttgggaggaaaggtgtggctataaactttgttactgaagaagacaagaggattcttcgtgacattgagactttctacaatactacagtggaggagatgcccatgaatgtggctgaccttatttaattcctgggatgagagttttggatgcagtgctcgctgttgctgaataggcgatcacaacgtgcattgtgcttctttctttgggaatatttgaatcttgtctcaatgctcataacggatcagaaatacagattttgatagcaaagcgacgttagtcgtgagctcttgtgaggaaagtcattggctttatcctctttagagttagactgttggggtgggtataaaagatggggtctgtaaaatctttctttcttagaaatttatttcctagttctgtagaaatggttgtattagatgttctctatcatttaataatatacttgtggactaaaagatataagtgctgtataaaatcagccaattatgttaaactagcatatctgcctttattgtgtttgtcattagcctgagtagaaaggcctttaaaatttttttagaaagcatttgaatgcattttgtttggtattgtatttattcaataaagtatttaattagtgctaagtgtgaactggaccctgttgctaagccccagcaagcaatcctaggtagggtttaatccccagtaaaattgccatattgcacatgtcttaatgaagtttgaatgttaaataaattgtatattcactttaaaggt

SEQ ID NO: 4311 - protein, 407 aa, Homo sapiens; identical to SEQ ID NO: 456

SEQ ID NO: 4312 - DNA, 1562 bp, Homo sapiens
gctgtcttttcagtcgggcgctgagtggtttttcggatcatgtctggtggctccgcggattataacagagaacatggcggcccagagggaatggaccccgatggtgtcatcgagagcaactggaatgagattgttgataactttgatgatatgaatttaaaggagtctctccttcgtggcatctatgcttacggttttgagaagccttccgctattcagcagagagctattattccctgtattaaagatccaaaaggtaattctggcacttggagactatatgggagccacttgtcatgcctgcattggtggaacaaatgttcgaaatgaaatgcaaaaactgcaggctgaagcaccacatattgttgttggtacacccgggagagtgtttgatatgttaaacagaagatacctttctccaaaatggatcaaaatgtttgttttggatgaagcagatgaaatgttgagccgtggttttaaggatcaaatctatgagattttccaaaaactaaacacaagtattcaggttgtgttgctttctgccacaatgccaactgatgtgttggaagtgaccaaaaaattcatgagagatccaattcgaattctggtgaaaaaggaagaattgacccttgaaggaatcaaacagttttatattaatgttgagagagaggaatggaagttggatacactttgtgacttgtacgagacactgaccattacacaggctgttatttttctcaatacgaggcgcaaggtggactggctgactgagaagatgcatgccagagacttcacagtttctgctctgcatggtgacatggaccagaaggagagagatgttatcatgagggaattccggtcagggtcaagtcgtgttctgatcactactgacttgttggctcgcgggattgatgtgcaacaagtgtctttggttataaattatgatctacctaccaatcgtgaaaactatattcacagaattggcagagggggtcgatttgggaggaaaggtgtggctataaactttgttactgaagaagacaagaggattcttcgtgacattgagactttctacaatactacagtggaggagatgcccatgaatgtggctgaccttatttaattcctgggatgagagttttggatgcagtgctcgctgttgctgaataggcgatcacaacgtgcattgtgcttctttctttgggaatatttgaatcttgtctcaatgctcataacggatcagaaatacagattttgatagcaaagcgacgttagtcgtgagctcttgtgaggaaagtcattggctttatcctctttagagttagactgttggggtgggtataaaagatggggtctgtaaaatctttctttcttagaaatttatttcctagttctgtagaaatggttgtattagatgttctctatcatttaataatatacttgtggactaaaagatataagtgctgtataaaatcagccaattatgttaaactagcatatctgcctttattgtgtttgtcattagcctgagtagaaaggcctttaaaatttttttagaaagc

SEQ ID NO: 4313 - protein, 312 aa, Homo sapiens
MLTVLRSLPLFSRELLFPVLKIQKVILALGDYMGATCHACIGGTNVRNEMQKLQAEAPHIVVGTPGRVFDMLNRRYLSPKWIKMFVLDEADEMLSRGFKDQIYEIFQKLNTSIQVVLLSATMPTDVLEVTKKFMRDPIRILVKKEELTLEGIKQFYINVEREEWKLDTLCDLYETLTITQAVIFLNTRRKVDWLTEKMHARDFTVSALHGDMDQKERDVIMREFRSGSSRVLITTDLLARGIDVQQVSLVINYDLPTNRENYIHRIGRGGRFGRKGVAINFVTEEDKRILRDIETFYNTTVEEMPMNVADLI

SEQ ID NO: 4314 - DNA, 1619 bp, Homo sapiens
gctgtcttttcagtcgggcgctgagtggtttttcggatcatgtctggtggctccgcggattataacagagaacatggcggcccagagggaatggaccccgatggtgtcatcgagagcaactggaatgagattgttgataactttgatgatatgaatttaaaggagtctctccttcgtggcatctatgcttacggttttgagaagccttccgctattcagcagagagctattattccctgtattaaagatccaaaaggtaattctggcacttggagactatatgggagccacttgtcatgcctgcattggtggaacaaatgttcgaaatgaaatgcaaaaactgcaggctgaagcaccacatattgttgttggtacacccgggagagtgtttgatatgttaaacagaagatacctttctccaaaatggatcaaaatgtttgttttggatgaagcagatgaaatgttgagccgtggttttaaggatcaaatctatgagattttccaaaaactaaacacaagtattcaggttgtgttgctttctgccacaatgccaactgatgtgttggaagtgaccaaaaaattcatgagagatccaattcgaattctggtgaaaaaggaagaattgacccttgaaggaatcaaacagttttatattaatgttgagagagaggaatggaagttggatacactttgtgacttgtacgagacactgaccattacacaggctgttatttttctcaatacgaggcgcaaggtggactggctgactgagaagatgcatgccagagacttcacagtttctgctctgcatggtgacatggaccagaaggagagagatgttatcatgagggaattccggtcagggtcaagtcgtgttctgatcactactgacttgttggctcgcgggattgatgtgcaacaagtgtctttggttataaattatgatctacctaccaatcgtgaaaactatattcacagaattggcagagggggtcgatttgggaggaaaggtgtggctataaactttgttactgaagaagacaagaggattcttcgtgacattgagactttctacaatactacagtggaggagatgcccatgaatgtggctgaccttatttaattcctgggatgagagttttggatgcagtgctcgctgttgctgaataggcgatcacaacgtgcattgtgcttctttctttgggaatatttgaatcttgtctcaatgctcataacggatcagaaatacagattttgatagcaaagcgacgttagtcgtgagctcttgtgaggaaagtcattggctttatcctctttagagttagactgttggggtgggtataaaagatggggtctgtaaaatctttctttcttagaaatttatttcctagttctgtagaaatggttgtattagatgttctctatcatttaataatatacttgtggactaaaagatataagtgctgtataaaatcagccaattatgttaaactagcatatctgcctttattgtgtttgtcattagcctgagtagaaaggcctttaaaatttttttagaaagcatttgaatgcattttgtttggtattgtatttattcaataaagtatttaattagtgct

SEQ ID NO: 4315 - protein, 312 aa, Homo sapiens; identical to SEQ ID NO: 4313

SEQ ID NO: 4316 - DNA, 1754 bp, Homo sapiens
gctgtcttttcagtcgggcgctgagtggtttttcggatcatgtctggtggctccgcggattataacagagaacatggcggcccagagggaatggaccccgatggtgtcatcgagagcaactggaatgagattgttgataactttgatgatatgaatttaaaggagtctctccttcgtggcatctatgcttacggttttgagaagccttccgctattcagcagagagctattattccctgtattaaagatccaaaaggtaattctggcacttggagactatatgggagccacttgtcatgcctgcattggtggaacaaatgttcgaaatgaaatgcaaaaactgcaggctgaagcaccacatattgttgttggtacacccgggagagtgtttgatatgttaaacagaagatacctttctccaaaatggatcaaaatgtttgttttggatgaagcagatgaaatgttgagccgtggttttaaggatcaaatctatgagattttccaaaaactaaacacaagtattcaggttgtgttgctttctgccacaatgccaactgatgtgttggaagtgaccaaaaaattcatgagagatccaattcgaattctggtgaaaaaggaagaattgacccttgaaggaatcaaacagttttatattaatgttgagagagaggaatggaagttggatacactttgtgacttgtacgagacactgaccattacacaggctgttatttttctcaatacgaggcgcaaggtggactggctgactgagaagatgcatgccagagacttcacagtttctgctctgcatggtgacatggaccagaaggagagagatgttatcatgagggaattccggtcagggtcaagtcgtgttctgatcactactgacttgttggctcgcgggattgatgtgcaacaagtgtctttggttataaattatgatctacctaccaatcgtgaaaactatattcacagaattggcagagggggtcgatttgggaggaaaggtgtggctataaactttgttactgaagaagacaagaggattcttcgtgacattgagactttctacaatactacagtggaggagatgcccatgaatgtggctgaccttatttaattcctgggatgagagttttggatgcagtgctcgctgttgctgaataggcgatcacaacgtgcattgtgcttctttctttgggaatatttgaatcttgtctcaatgctcataacggatcagaaatacagattttgatagcaaagcgacgttagtcgtgagctcttgtgaggaaagtcattggctttatcctctttagagttagactgttggggtgggtataaaagatggggtctgtaaaatctttctttcttagaaatttatttcctagttctgtagaaatggttgtattagatgttctctatcatttaataatatacttgtggactaaaagatataagtgctgtataaaatcagccaattatgttaaactagcatatctgcctttattgtgtttgtcattagcctgagtagaaaggcctttaaaatttttttagaaagcatttgaatgcattttgtttggtattgtatttattcaataaagtatttaattagtgctaagtgtgaactggaccctgttgctaagccccagcaagcaatcctaggtagggtttaatccccagtaaaattgccatattgcacatgtcttaatgaagtttgaatgttaaataaattgtatattcactttaaaggt

SEQ ID NO: 4317 - protein, 312 aa, Homo sapiens; identical to SEQ ID NO: 4313

SEQ ID NO: 4318 - DNA, 2227 bp, Homo sapiens
gctgtcttttcagtcgggcgctgagtggtttttcggatcatgtctggtggctccgcggattataacagagaacatggcggcccagagggaatggaccccgatggtgtcatcgagagcaactggaatgagattgttgataactttgatgatatgaatttaaaggagtctctccttcgtggcatctatgcttacggttttgagaagccttccgctattcagcagagagctattattccctgtattaaagatccaaaaggtaattctggcacttggagactatatgggagccacttgtcatgcctgcattggtggaacaaatgttcgaaatgaaatgcaaaaactgcaggctgaagcaccacatattgttgttggtacacccgggagagtgtttgatatgttaaacagaagatacctttctccaaaatggatcaaaatgtttgttttggatgaagcagatgaaatgttgagccgtggttttaaggatcaaatctatgagattttccaaaaactaaacacaagtattcaggttgtgttgctttctgccacaatgccaactgatgtgttggaagtgaccaaaaaattcatgagagatccaattcgaattctggtgaaaaaggaagaattgacccttgaaggaatcaaacagttttatattaatgttgagagagaggaatggaagttggatacactttgtgacttgtacgagacactgaccattacacaggctgttatttttctcaatacgaggcgcaaggtggactggctgactgagaagatgcatgccagagacttcacagtttctgctctgcatggtgacatggaccagaaggagagagatgttatcatgagggaattccggtcagggtcaagtcgtgttctgatcactactgacttgttggctcgcgggattgatgtgcaacaagtgtctttggttataaattatgatctacctaccaatcgtgaaaactatattcacagaattggcagagggggtcgatttgggaggaaaggtgtggctataaactttgttactgaagaagacaagaggattcttcgtgacattgagactttctacaatactacagtggaggagatgcccatgaatgtggctgaccttatttaattcctgggatgagagttttggatgcagtgctcgctgttgctgaataggcgatcacaacgtgcattgtgcttctttctttgggaatatttgaatcttgtctcaatgctcataacggatcagaaatacagattttgatagcaaagcgacgttagtcgtgagctcttgtgaggaaagtcattggctttatcctctttagagttagactgttggggtgggtataaaagatggggtctgtaaaatctttctttcttagaaatttatttcctagttctgtagaaatggttgtattagatgttctctatcatttaataatatacttgtggactaaaagatataagtgctgtataaaatcagccaattatgttaaactagcatatctgcctttattgtgtttgtcattagcctgagtagaaaggcctttaaaatttttttagaaagcatttgaatgcattttgtttggtattgtatttattcaataaagtatttaattagtgctaagtgtgaactggaccctgttgctaagccccagcaagcaatcctaggtagggtttaatccccagtaaaattgccatattgcacatgtcttaatgaagtttgaatgttaaataaattgtatattcactttaaaggtgcttttggtcattttatttttattacaacttcattatttacaaaaccccccatccagatatattcacgttaacaattctgagataactgctgcatcacagttgcacaaaggctgatgagttgcaaatgttcatcagcaccatctgctaggcatttgtcaacttcctacgagaaaaatttaagaaattagcatccttcaggtagttaaatgttccattgacatgtgcaaagtacctacttacggcaagtttttctgtgataatagacttctgtttatcagataagttattttctacaaccacatcatggagttgattgacgagctgagttgctgcatgaccctcatctattaaatcctataataaaaaaaacttttggtatgatgacttaatattcctttccccaaagttagtaagctgactttaccttgaccacagcttctagtttgtcaaaagagccactctgacaggcagc

SEQ ID NO: 4319 - protein, 312 aa, Homo sapiens; identical to SEQ ID NO: 4313

SEQ ID NO: 4320 - DNA, 4016 bp, Homo sapiens
tgtcttttcagtcgggcgctgagtggtttttcggatcatgtctggtggctccgcggattataacagagaacatggcggcccagagggaatggaccccgatggtgtcatcgagagcaactggaatgagattgttgataactttgatgatatgaatttaaaggagtctctccttcgtggcatctatgcttacggttttgagaagccttccgctattcagcagagagctattattccctgtattaaagatccaaaaggtaattctggcacttggagactatatgggagccacttgtcatgcctgcattggtggaacaaatgttcgaaatgaaatgcaaaaactgcaggctgaagcaccacatattgttgttggtacacccgggagagtgtttgatatgttaaacagaagatacctttctccaaaatggatcaaaatgtttgttttggatgaagcagatgaaatgttgagccgtggttttaaggatcaaatctatgagattttccaaaaactaaacacaagtattcaggtaagcattacttcacccccctcttaaaggtagagatggggtttatttaatgcaggtactgttacaatacaactgatgtgttttgttgtcgttccccctgcttaaagcacttgatgcataactctgtctaccttcattccgtagtaagacagagacgcttggcttcagacattttcctttgggtattaatgtgtaagttgtgctacaacataattttctctttttaaggttgtgttgctttctgccacaatgccaactgatgtgttggaagtgaccaaaaaattcatgagagatccaattcgaattctggtgaaaaaggaagaattgacccttgaaggaatcaaacagttttatattaatgttgagagagaggtaactgtctgattgttagacattattttaccttcttgtataagcactgtgctaaaattgcagacactaggaccatgtcttggtttttgcaataatgctagcagagtacacacaagaagaaaagtaacagcactagattgtaaagactggggtggacctctttcttaatgtccaatgtcctttgtcttaagatttggtgcaatatctcattagacctaacagaatgaagttaatttttataatttctacgttttgagactgggttatgagactggctaagactggccaattttggtattttgggtagagacagtttcactttcttgaaaccctggtctggttggaactctgggctctaagtgctaggatcccaaagggctgggattacaggcattagcactgtggctggcccagaatgaatttttaactgaagagttggaaaaactaaatgactgttaactttaacttctaaacattacaggaatggaagttggatacactttgtgacttgtacgagacactgaccattacacaggctgttatttttctcaatacgaggcgcaaggtggactggctgactgagaagatgcatgccagagacttcacagtttctgctctggtaagaggtgttctaaaatgtctggatttccactaaagcaggattcagactacaatatagctgctaagtgctgtgttgtcgttccccctgcttaaaataaagttgtttcttaactatacctgtctgctattctcctgtagcagccagggacgcttggtctcatacatgttgattaaaattaaataccgacctgactggtgattcttgaattaaggtttattaatttgcagcatggtgacatggaccagaaggagagagatgttatcatgagggaattccggtcagggtcaagtcgtgttctgatcactactgacttgttggtaagtctcttaatgctttttaaaaatctaccaaaagttagctttttggggggcaggtttttaagtaacctttgccaacttgggctatttggaagagtaaaagaccacactccacagtgggctataccacttagtatagttcgctactattttgtggcctacatgacaggtgtcaagtttttttgaatcaatttttaaaacatgccattgtgtttcaggctcgcgggattgatgtgcaacaagtgtctttggttataaattatgatctacctaccaatcgtgaaaactatattcacaggtgagaagccagcatcttggctgtattgaaaaaaattcatacgtttttctactgtgatttgtatgaaaggtaacatcaaatcaaggaatagattcagtaaagtcagtagtgttcagtaagatgatgtaattaaatttgtactagggaaggttgatgagaacaaagtgggaaaacttgtaaacattgcccagattgtggacatagggtttttttccacaattgttggtcttaccttatgcttgagcttttagtgatgttcttgtgtccatgtgtttttcttggtgattttttctatagttgggattttcttggtgtcgcctggtagcaatttgagtgaaccctggtttagttatagtggctttatccctaaataaattgaattgtactttgttatatgatgtaaaaaaagactttttaaaaaatacaggagtcgatagcagcagttggtgacgagatggcactcagaaacggcgttgacgtaatttaggacgtggaatcataagcgaaacagcacactgtttgaataaagagcgagtcggtatttatatttgtttttcttttgtcatgattatttgatttttaagttgctccagctaaggcatttttttgtattagtatttctattagggaacctttcttattaggtggtttgtattgtctggtttctaacatgcaggtagctgtttggcagttaaacacgtttagagtaatttgagttacaacgtgtgaaactgagcaaaaaagcagtgataagtttgggttaccataccaaatatttgttttcccactggaaaaaagtaagttttagaaaatagttaacctttgcagcatttgtttacagtttacagttccagaagtgcgtcgaaatggattacataactgctcttttattcctggtgttcacatctgtcccaggctgacacctgctcttggctggcccactttggtatgggctttaatttcactaccccaaacacgatactgtcatctgctttataataatgctcaagatgcctgataaaaatctcattttgcagccagacaagccttgaatccttttggcactaactgcaaaggaagatttttttctctagatatgcattagcagctagtgctccagttagaagcacgaactataaccttgataagtaaacagcagctggtggttaacaagtggatcgtcatgttcagtagtttatacattatgtgagaagtaacgttctgattctttttcttacacagaattggcagagggggtcgatttgggaggaaaggtgtggctataaactttgttactgaagaagacaagaggattcttcgtgacattgagactttctacaatactacagtggaggagatgcccatgaatgtggctgaccttatttaattcctgggatgagagttttggatgcagtgctcgctgttgctgaataggcgatcacaacgtgcattgtgcttctttctttgggaatatttgaatcttgtctcaatgctcataacggatcagaaatacagattttgatagcaaagcgacgttagtcgtgagctcttgtgaggaaagtcattggctttatcctctttagagttagactgttggggtgggtataaaagatggggtctgtaaaatctttctttcttagaaatttatttcctagttctgtagaaatggttgtattagatgttctctatcatttaataatatacttgtggactaaaagatataagtgctgtataaaatcagccaattatgttaaactagcatatctgcctttattgtgtttgtcattagcctgagtagaaaggcctttaaaatttttttagaaagcatttgaatgcattttgtttggtattgtatttattcaataaagtatttaattagtgct

SEQ ID NO: 4321 - protein, 122 aa, Homo sapiens
MLTVLRSLPLFSRELLFPVLKIQKVILALGDYMGATCHACIGGTNVRNEMQKLQAEAPHIVVGTPGRVFDMLNRRYLSPKWIKMFVLDEADEMLSRGFKDQIYEIFQKLNTSIQVSITSPPS

SEQ ID NO: 4322 - DNA, 4151 bp, Homo sapiens
tgtcttttcagtcgggcgctgagtggtttttcggatcatgtctggtggctccgcggattataacagagaacatggcggcccagagggaatggaccccgatggtgtcatcgagagcaactggaatgagattgttgataactttgatgatatgaatttaaaggagtctctccttcgtggcatctatgcttacggttttgagaagccttccgctattcagcagagagctattattccctgtattaaagatccaaaaggtaattctggcacttggagactatatgggagccacttgtcatgcctgcattggtggaacaaatgttcgaaatgaaatgcaaaaactgcaggctgaagcaccacatattgttgttggtacacccgggagagtgtttgatatgttaaacagaagatacctttctccaaaatggatcaaaatgtttgttttggatgaagcagatgaaatgttgagccgtggttttaaggatcaaatctatgagattttccaaaaactaaacacaagtattcaggtaagcattacttcacccccctcttaaaggtagagatggggtttatttaatgcaggtactgttacaatacaactgatgtgttttgttgtcgttccccctgcttaaagcacttgatgcataactctgtctaccttcattccgtagtaagacagagacgcttggcttcagacattttcctttgggtattaatgtgtaagttgtgctacaacataattttctctttttaaggttgtgttgctttctgccacaatgccaactgatgtgttggaagtgaccaaaaaattcatgagagatccaattcgaattctggtgaaaaaggaagaattgacccttgaaggaatcaaacagttttatattaatgttgagagagaggtaactgtctgattgttagacattattttaccttcttgtataagcactgtgctaaaattgcagacactaggaccatgtcttggtttttgcaataatgctagcagagtacacacaagaagaaaagtaacagcactagattgtaaagactggggtggacctctttcttaatgtccaatgtcctttgtcttaagatttggtgcaatatctcattagacctaacagaatgaagttaatttttataatttctacgttttgagactgggttatgagactggctaagactggccaattttggtattttgggtagagacagtttcactttcttgaaaccctggtctggttggaactctgggctctaagtgctaggatcccaaagggctgggattacaggcattagcactgtggctggcccagaatgaatttttaactgaagagttggaaaaactaaatgactgttaactttaacttctaaacattacaggaatggaagttggatacactttgtgacttgtacgagacactgaccattacacaggctgttatttttctcaatacgaggcgcaaggtggactggctgactgagaagatgcatgccagagacttcacagtttctgctctggtaagaggtgttctaaaatgtctggatttccactaaagcaggattcagactacaatatagctgctaagtgctgtgttgtcgttccccctgcttaaaataaagttgtttcttaactatacctgtctgctattctcctgtagcagccagggacgcttggtctcatacatgttgattaaaattaaataccgacctgactggtgattcttgaattaaggtttattaatttgcagcatggtgacatggaccagaaggagagagatgttatcatgagggaattccggtcagggtcaagtcgtgttctgatcactactgacttgttggtaagtctcttaatgctttttaaaaatctaccaaaagttagctttttggggggcaggtttttaagtaacctttgccaacttgggctatttggaagagtaaaagaccacactccacagtgggctataccacttagtatagttcgctactattttgtggcctacatgacaggtgtcaagtttttttgaatcaatttttaaaacatgccattgtgtttcaggctcgcgggattgatgtgcaacaagtgtctttggttataaattatgatctacctaccaatcgtgaaaactatattcacaggtgagaagccagcatcttggctgtattgaaaaaaattcatacgtttttctactgtgatttgtatgaaaggtaacatcaaatcaaggaatagattcagtaaagtcagtagtgttcagtaagatgatgtaattaaatttgtactagggaaggttgatgagaacaaagtgggaaaacttgtaaacattgcccagattgtggacatagggtttttttccacaattgttggtcttaccttatgcttgagcttttagtgatgttcttgtgtccatgtgtttttcttggtgattttttctatagttgggattttcttggtgtcgcctggtagcaatttgagtgaaccctggtttagttatagtggctttatccctaaataaattgaattgtactttgttatatgatgtaaaaaaagactttttaaaaaatacaggagtcgatagcagcagttggtgacgagatggcactcagaaacggcgttgacgtaatttaggacgtggaatcataagcgaaacagcacactgtttgaataaagagcgagtcggtatttatatttgtttttcttttgtcatgattatttgatttttaagttgctccagctaaggcatttttttgtattagtatttctattagggaacctttcttattaggtggtttgtattgtctggtttctaacatgcaggtagctgtttggcagttaaacacgtttagagtaatttgagttacaacgtgtgaaactgagcaaaaaagcagtgataagtttgggttaccataccaaatatttgttttcccactggaaaaaagtaagttttagaaaatagttaacctttgcagcatttgtttacagtttacagttccagaagtgcgtcgaaatggattacataactgctcttttattcctggtgttcacatctgtcccaggctgacacctgctcttggctggcccactttggtatgggctttaatttcactaccccaaacacgatactgtcatctgctttataataatgctcaagatgcctgataaaaatctcattttgcagccagacaagccttgaatccttttggcactaactgcaaaggaagatttttttctctagatatgcattagcagctagtgctccagttagaagcacgaactataaccttgataagtaaacagcagctggtggttaacaagtggatcgtcatgttcagtagtttatacattatgtgagaagtaacgttctgattctttttcttacacagaattggcagagggggtcgatttgggaggaaaggtgtggctataaactttgttactgaagaagacaagaggattcttcgtgacattgagactttctacaatactacagtggaggagatgcccatgaatgtggctgaccttatttaattcctgggatgagagttttggatgcagtgctcgctgttgctgaataggcgatcacaacgtgcattgtgcttctttctttgggaatatttgaatcttgtctcaatgctcataacggatcagaaatacagattttgatagcaaagcgacgttagtcgtgagctcttgtgaggaaagtcattggctttatcctctttagagttagactgttggggtgggtataaaagatggggtctgtaaaatctttctttcttagaaatttatttcctagttctgtagaaatggttgtattagatgttctctatcatttaataatatacttgtggactaaaagatataagtgctgtataaaatcagccaattatgttaaactagcatatctgcctttattgtgtttgtcattagcctgagtagaaaggcctttaaaatttttttagaaagcatttgaatgcattttgtttggtattgtatttattcaataaagtatttaattagtgctaagtgtgaactggaccctgttgctaagccccagcaagcaatcctaggtagggtttaatccccagtaaaattgccatattgcacatgtcttaatgaagtttgaatgttaaataaattgtatattcactttaaaggt

SEQ ID NO: 4323 - protein, 122 aa, Homo sapiens; identical to SEQ ID NO: 4321

SEQ ID NO: 4324 - DNA, 4624 bp, Homo sapiens
tgtcttttcagtcgggcgctgagtggtttttcggatcatgtctggtggctccgcggattataacagagaacatggcggcccagagggaatggaccccgatggtgtcatcgagagcaactggaatgagattgttgataactttgatgatatgaatttaaaggagtctctccttcgtggcatctatgcttacggttttgagaagccttccgctattcagcagagagctattattccctgtattaaagatccaaaaggtaattctggcacttggagactatatgggagccacttgtcatgcctgcattggtggaacaaatgttcgaaatgaaatgcaaaaactgcaggctgaagcaccacatattgttgttggtacacccgggagagtgtttgatatgttaaacagaagatacctttctccaaaatggatcaaaatgtttgttttggatgaagcagatgaaatgttgagccgtggttttaaggatcaaatctatgagattttccaaaaactaaacacaagtattcaggtaagcattacttcacccccctcttaaaggtagagatggggtttatttaatgcaggtactgttacaatacaactgatgtgttttgttgtcgttccccctgcttaaagcacttgatgcataactctgtctaccttcattccgtagtaagacagagacgcttggcttcagacattttcctttgggtattaatgtgtaagttgtgctacaacataattttctctttttaaggttgtgttgctttctgccacaatgccaactgatgtgttggaagtgaccaaaaaattcatgagagatccaattcgaattctggtgaaaaaggaagaattgacccttgaaggaatcaaacagttttatattaatgttgagagagaggtaactgtctgattgttagacattattttaccttcttgtataagcactgtgctaaaattgcagacactaggaccatgtcttggtttttgcaataatgctagcagagtacacacaagaagaaaagtaacagcactagattgtaaagactggggtggacctctttcttaatgtccaatgtcctttgtcttaagatttggtgcaatatctcattagacctaacagaatgaagttaatttttataatttctacgttttgagactgggttatgagactggctaagactggccaattttggtattttgggtagagacagtttcactttcttgaaaccctggtctggttggaactctgggctctaagtgctaggatcccaaagggctgggattacaggcattagcactgtggctggcccagaatgaatttttaactgaagagttggaaaaactaaatgactgttaactttaacttctaaacattacaggaatggaagttggatacactttgtgacttgtacgagacactgaccattacacaggctgttatttttctcaatacgaggcgcaaggtggactggctgactgagaagatgcatgccagagacttcacagtttctgctctggtaagaggtgttctaaaatgtctggatttccactaaagcaggattcagactacaatatagctgctaagtgctgtgttgtcgttccccctgcttaaaataaagttgtttcttaactatacctgtctgctattctcctgtagcagccagggacgcttggtctcatacatgttgattaaaattaaataccgacctgactggtgattcttgaattaaggtttattaatttgcagcatggtgacatggaccagaaggagagagatgttatcatgagggaattccggtcagggtcaagtcgtgttctgatcactactgacttgttggtaagtctcttaatgctttttaaaaatctaccaaaagttagctttttggggggcaggtttttaagtaacctttgccaacttgggctatttggaagagtaaaagaccacactccacagtgggctataccacttagtatagttcgctactattttgtggcctacatgacaggtgtcaagtttttttgaatcaatttttaaaacatgccattgtgtttcaggctcgcgggattgatgtgcaacaagtgtctttggttataaattatgatctacctaccaatcgtgaaaactatattcacaggtgagaagccagcatcttggctgtattgaaaaaaattcatacgtttttctactgtgatttgtatgaaaggtaacatcaaatcaaggaatagattcagtaaagtcagtagtgttcagtaagatgatgtaattaaatttgtactagggaaggttgatgagaacaaagtgggaaaacttgtaaacattgcccagattgtggacatagggtttttttccacaattgttggtcttaccttatgcttgagcttttagtgatgttcttgtgtccatgtgtttttcttggtgattttttctatagttgggattttcttggtgtcgcctggtagcaatttgagtgaaccctggtttagttatagtggctttatccctaaataaattgaattgtactttgttatatgatgtaaaaaaagactttttaaaaaatacaggagtcgatagcagcagttggtgacgagatggcactcagaaacggcgttgacgtaatttaggacgtggaatcataagcgaaacagcacactgtttgaataaagagcgagtcggtatttatatttgtttttcttttgtcatgattatttgatttttaagttgctccagctaaggcatttttttgtattagtatttctattagggaacctttcttattaggtggtttgtattgtctggtttctaacatgcaggtagctgtttggcagttaaacacgtttagagtaatttgagttacaacgtgtgaaactgagcaaaaaagcagtgataagtttgggttaccataccaaatatttgttttcccactggaaaaaagtaagttttagaaaatagttaacctttgcagcatttgtttacagtttacagttccagaagtgcgtcgaaatggattacataactgctcttttattcctggtgttcacatctgtcccaggctgacacctgctcttggctggcccactttggtatgggctttaatttcactaccccaaacacgatactgtcatctgctttataataatgctcaagatgcctgataaaaatctcattttgcagccagacaagccttgaatccttttggcactaactgcaaaggaagatttttttctctagatatgcattagcagctagtgctccagttagaagcacgaactataaccttgataagtaaacagcagctggtggttaacaagtggatcgtcatgttcagtagtttatacattatgtgagaagtaacgttctgattctttttcttacacagaattggcagagggggtcgatttgggaggaaaggtgtggctataaactttgttactgaagaagacaagaggattcttcgtgacattgagactttctacaatactacagtggaggagatgcccatgaatgtggctgaccttatttaattcctgggatgagagttttggatgcagtgctcgctgttgctgaataggcgatcacaacgtgcattgtgcttctttctttgggaatatttgaatcttgtctcaatgctcataacggatcagaaatacagattttgatagcaaagcgacgttagtcgtgagctcttgtgaggaaagtcattggctttatcctctttagagttagactgttggggtgggtataaaagatggggtctgtaaaatctttctttcttagaaatttatttcctagttctgtagaaatggttgtattagatgttctctatcatttaataatatacttgtggactaaaagatataagtgctgtataaaatcagccaattatgttaaactagcatatctgcctttattgtgtttgtcattagcctgagtagaaaggcctttaaaatttttttagaaagcatttgaatgcattttgtttggtattgtatttattcaataaagtatttaattagtgctaagtgtgaactggaccctgttgctaagccccagcaagcaatcctaggtagggtttaatccccagtaaaattgccatattgcacatgtcttaatgaagtttgaatgttaaataaattgtatattcactttaaaggtgcttttggtcattttatttttattacaacttcattatttacaaaaccccccatccagatatattcacgttaacaattctgagataactgctgcatcacagttgcacaaaggctgatgagttgcaaatgttcatcagcaccatctgctaggcatttgtcaacttcctacgagaaaaatttaagaaattagcatccttcaggtagttaaatgttccattgacatgtgcaaagtacctacttacggcaagtttttctgtgataatagacttctgtttatcagataagttattttctacaaccacatcatggagttgattgacgagctgagttgctgcatgaccctcatctattaaatcctataataaaaaaaacttttggtatgatgacttaatattcctttccccaaagttagtaagctgactttaccttgaccacagcttctagtttgtcaaaagagccactctgacaggcagc

SEQ ID NO: 4325 - protein, 122 aa, Homo sapiens; identical to SEQ ID NO: 4321

SEQ ID NO: 4326 - DNA, 3787 bp, Homo sapiens
gtcttttcagtcgggcgctgagtggtttttcggatcatgtctggtggctccgcggattataacagagaacatggcggcccagagggaatggaccccgatggtgtcatcgagagcaactggaatgagattgttgataactttgatgatatgaatttaaaggagtctctccttcgtggcatctatgcttacggttttgagaagccttccgctattcagcagagagctattattccctgtattaaagatccaaaaggtaattctggcacttggagactatatgggagccacttgtcatgcctgcattggtggaacaaatgttcgaaatgaaatgcaaaaactgcaggctgaagcaccacatattgttgttggtacacccgggagagtgtttgatatgttaaacagaagatacctttctccaaaatggatcaaaatgtttgttttggatgaagcagatgaaatgttgagccgtggttttaaggatcaaatctatgagattttccaaaaactaaacacaagtattcaggttgtgttgctttctgccacaatgccaactgatgtgttggaagtgaccaaaaaattcatgagagatccaattcgaattctggtgaaaaaggaagaattgacccttgaaggaatcaaacagttttatattaatgttgagagagaggtaactgtctgattgttagacattattttaccttcttgtataagcactgtgctaaaattgcagacactaggaccatgtcttggtttttgcaataatgctagcagagtacacacaagaagaaaagtaacagcactagattgtaaagactggggtggacctctttcttaatgtccaatgtcctttgtcttaagatttggtgcaatatctcattagacctaacagaatgaagttaatttttataatttctacgttttgagactgggttatgagactggctaagactggccaattttggtattttgggtagagacagtttcactttcttgaaaccctggtctggttggaactctgggctctaagtgctaggatcccaaagggctgggattacaggcattagcactgtggctggcccagaatgaatttttaactgaagagttggaaaaactaaatgactgttaactttaacttctaaacattacaggaatggaagttggatacactttgtgacttgtacgagacactgaccattacacaggctgttatttttctcaatacgaggcgcaaggtggactggctgactgagaagatgcatgccagagacttcacagtttctgctctggtaagaggtgttctaaaatgtctggatttccactaaagcaggattcagactacaatatagctgctaagtgctgtgttgtcgttccccctgcttaaaataaagttgtttcttaactatacctgtctgctattctcctgtagcagccagggacgcttggtctcatacatgttgattaaaattaaataccgacctgactggtgattcttgaattaaggtttattaatttgcagcatggtgacatggaccagaaggagagagatgttatcatgagggaattccggtcagggtcaagtcgtgttctgatcactactgacttgttggtaagtctcttaatgctttttaaaaatctaccaaaagttagctttttggggggcaggtttttaagtaacctttgccaacttgggctatttggaagagtaaaagaccacactccacagtgggctataccacttagtatagttcgctactattttgtggcctacatgacaggtgtcaagtttttttgaatcaatttttaaaacatgccattgtgtttcaggctcgcgggattgatgtgcaacaagtgtctttggttataaattatgatctacctaccaatcgtgaaaactatattcacaggtgagaagccagcatcttggctgtattgaaaaaaattcatacgtttttctactgtgatttgtatgaaaggtaacatcaaatcaaggaatagattcagtaaagtcagtagtgttcagtaagatgatgtaattaaatttgtactagggaaggttgatgagaacaaagtgggaaaacttgtaaacattgcccagattgtggacatagggtttttttccacaattgttggtcttaccttatgcttgagcttttagtgatgttcttgtgtccatgtgtttttcttggtgattttttctatagttgggattttcttggtgtcgcctggtagcaatttgagtgaaccctggtttagttatagtggctttatccctaaataaattgaattgtactttgttatatgatgtaaaaaaagactttttaaaaaatacaggagtcgatagcagcagttggtgacgagatggcactcagaaacggcgttgacgtaatttaggacgtggaatcataagcgaaacagcacactgtttgaataaagagcgagtcggtatttatatttgtttttcttttgtcatgattatttgatttttaagttgctccagctaaggcatttttttgtattagtatttctattagggaacctttcttattaggtggtttgtattgtctggtttctaacatgcaggtagctgtttggcagttaaacacgtttagagtaatttgagttacaacgtgtgaaactgagcaaaaaagcagtgataagtttgggttaccataccaaatatttgttttcccactggaaaaaagtaagttttagaaaatagttaacctttgcagcatttgtttacagtttacagttccagaagtgcgtcgaaatggattacataactgctcttttattcctggtgttcacatctgtcccaggctgacacctgctcttggctggcccactttggtatgggctttaatttcactaccccaaacacgatactgtcatctgctttataataatgctcaagatgcctgataaaaatctcattttgcagccagacaagccttgaatccttttggcactaactgcaaaggaagatttttttctctagatatgcattagcagctagtgctccagttagaagcacgaactataaccttgataagtaaacagcagctggtggttaacaagtggatcgtcatgttcagtagtttatacattatgtgagaagtaacgttctgattctttttcttacacagaattggcagagggggtcgatttgggaggaaaggtgtggctataaactttgttactgaagaagacaagaggattcttcgtgacattgagactttctacaatactacagtggaggagatgcccatgaatgtggctgaccttatttaattcctgggatgagagttttggatgcagtgctcgctgttgctgaataggcgatcacaacgtgcattgtgcttctttctttgggaatatttgaatcttgtctcaatgctcataacggatcagaaatacagattttgatagcaaagcgacgttagtcgtgagctcttgtgaggaaagtcattggctttatcctctttagagttagactgttggggtgggtataaaagatggggtctgtaaaatctttctttcttagaaatttatttcctagttctgtagaaatggttgtattagatgttctctatcatttaataatatacttgtggactaaaagatataagtgctgtataaaatcagccaattatgttaaactagcatatctgcctttattgtgtttgtcattagcctgagtagaaaggcctttaaaatttttttagaaagcatttgaatgcattttgtttggtattgtatttattcaataaagtatttaattagtgct

SEQ ID NO: 4327 - protein, 165 aa, Homo sapiens
MLTVLRSLPLFSRELLFPVLKIQKVILALGDYMGATCHACIGGTNVRNEMQKLQAEAPHIVVGTPGRVFDMLNRRYLSPKWIKMFVLDEADEMLSRGFKDQIYEIFQKLNTSIQVVLLSATMPTDVLEVTKKFMRDPIRILVKKEELTLEGIKQFYINVEREVTV

SEQ ID NO: 4328 - DNA, 3306 bp, Homo sapiens
gtcttttcagtcgggcgctgagtggtttttcggatcatgtctggtggctccgcggattataacagagaacatggcggcccagagggaatggaccccgatggtgtcatcgagagcaactggaatgagattgttgataactttgatgatatgaatttaaaggagtctctccttcgtggcatctatgcttacggttttgagaagccttccgctattcagcagagagctattattccctgtattaaagatccaaaaggtaattctggcacttggagactatatgggagccacttgtcatgcctgcattggtggaacaaatgttcgaaatgaaatgcaaaaactgcaggctgaagcaccacatattgttgttggtacacccgggagagtgtttgatatgttaaacagaagatacctttctccaaaatggatcaaaatgtttgttttggatgaagcagatgaaatgttgagccgtggttttaaggatcaaatctatgagattttccaaaaactaaacacaagtattcaggttgtgttgctttctgccacaatgccaactgatgtgttggaagtgaccaaaaaattcatgagagatccaattcgaattctggtgaaaaaggaagaattgacccttgaaggaatcaaacagttttatattaatgttgagagagaggaatggaagttggatacactttgtgacttgtacgagacactgaccattacacaggctgttatttttctcaatacgaggcgcaaggtggactggctgactgagaagatgcatgccagagacttcacagtttctgctctggtaagaggtgttctaaaatgtctggatttccactaaagcaggattcagactacaatatagctgctaagtgctgtgttgtcgttccccctgcttaaaataaagttgtttcttaactatacctgtctgctattctcctgtagcagccagggacgcttggtctcatacatgttgattaaaattaaataccgacctgactggtgattcttgaattaaggtttattaatttgcagcatggtgacatggaccagaaggagagagatgttatcatgagggaattccggtcagggtcaagtcgtgttctgatcactactgacttgttggtaagtctcttaatgctttttaaaaatctaccaaaagttagctttttggggggcaggtttttaagtaacctttgccaacttgggctatttggaagagtaaaagaccacactccacagtgggctataccacttagtatagttcgctactattttgtggcctacatgacaggtgtcaagtttttttgaatcaatttttaaaacatgccattgtgtttcaggctcgcgggattgatgtgcaacaagtgtctttggttataaattatgatctacctaccaatcgtgaaaactatattcacaggtgagaagccagcatcttggctgtattgaaaaaaattcatacgtttttctactgtgatttgtatgaaaggtaacatcaaatcaaggaatagattcagtaaagtcagtagtgttcagtaagatgatgtaattaaatttgtactagggaaggttgatgagaacaaagtgggaaaacttgtaaacattgcccagattgtggacatagggtttttttccacaattgttggtcttaccttatgcttgagcttttagtgatgttcttgtgtccatgtgtttttcttggtgattttttctatagttgggattttcttggtgtcgcctggtagcaatttgagtgaaccctggtttagttatagtggctttatccctaaataaattgaattgtactttgttatatgatgtaaaaaaagactttttaaaaaatacaggagtcgatagcagcagttggtgacgagatggcactcagaaacggcgttgacgtaatttaggacgtggaatcataagcgaaacagcacactgtttgaataaagagcgagtcggtatttatatttgtttttcttttgtcatgattatttgatttttaagttgctccagctaaggcatttttttgtattagtatttctattagggaacctttcttattaggtggtttgtattgtctggtttctaacatgcaggtagctgtttggcagttaaacacgtttagagtaatttgagttacaacgtgtgaaactgagcaaaaaagcagtgataagtttgggttaccataccaaatatttgttttcccactggaaaaaagtaagttttagaaaatagttaacctttgcagcatttgtttacagtttacagttccagaagtgcgtcgaaatggattacataactgctcttttattcctggtgttcacatctgtcccaggctgacacctgctcttggctggcccactttggtatgggctttaatttcactaccccaaacacgatactgtcatctgctttataataatgctcaagatgcctgataaaaatctcattttgcagccagacaagccttgaatccttttggcactaactgcaaaggaagatttttttctctagatatgcattagcagctagtgctccagttagaagcacgaactataaccttgataagtaaacagcagctggtggttaacaagtggatcgtcatgttcagtagtttatacattatgtgagaagtaacgttctgattctttttcttacacagaattggcagagggggtcgatttgggaggaaaggtgtggctataaactttgttactgaagaagacaagaggattcttcgtgacattgagactttctacaatactacagtggaggagatgcccatgaatgtggctgaccttatttaattcctgggatgagagttttggatgcagtgctcgctgttgctgaataggcgatcacaacgtgcattgtgcttctttctttgggaatatttgaatcttgtctcaatgctcataacggatcagaaatacagattttgatagcaaagcgacgttagtcgtgagctcttgtgaggaaagtcattggctttatcctctttagagttagactgttggggtgggtataaaagatggggtctgtaaaatctttctttcttagaaatttatttcctagttctgtagaaatggttgtattagatgttctctatcatttaataatatacttgtggactaaaagatataagtgctgtataaaatcagccaattatgttaaactagcatatctgcctttattgtgtttgtcattagcctgagtagaaaggcctttaaaatttttttagaaagcatttgaatgcattttgtttggtattgtatttattcaataaagtatttaattagtgct

SEQ ID NO: 4329 - protein, 219 aa, Homo sapiens
MLTVLRSLPLFSRELLFPVLKIQKVILALGDYMGATCHACIGGTNVRNEMQKLQAEAPHIVVGTPGRVFDMLNRRYLSPKWIKMFVLDEADEMLSRGFKDQIYEIFQKLNTSIQVVLLSATMPTDVLEVTKKFMRDPIRILVKKEELTLEGIKQFYINVEREEWKLDTLCDLYETLTITQAVIFLNTRRKVDWLTEKMHARDFTVSALVRGVLKCLDFH

SEQ ID NO: 4330 - DNA, 3922 bp, Homo sapiens
gtcttttcagtcgggcgctgagtggtttttcggatcatgtctggtggctccgcggattataacagagaacatggcggcccagagggaatggaccccgatggtgtcatcgagagcaactggaatgagattgttgataactttgatgatatgaatttaaaggagtctctccttcgtggcatctatgcttacggttttgagaagccttccgctattcagcagagagctattattccctgtattaaagatccaaaaggtaattctggcacttggagactatatgggagccacttgtcatgcctgcattggtggaacaaatgttcgaaatgaaatgcaaaaactgcaggctgaagcaccacatattgttgttggtacacccgggagagtgtttgatatgttaaacagaagatacctttctccaaaatggatcaaaatgtttgttttggatgaagcagatgaaatgttgagccgtggttttaaggatcaaatctatgagattttccaaaaactaaacacaagtattcaggttgtgttgctttctgccacaatgccaactgatgtgttggaagtgaccaaaaaattcatgagagatccaattcgaattctggtgaaaaaggaagaattgacccttgaaggaatcaaacagttttatattaatgttgagagagaggtaactgtctgattgttagacattattttaccttcttgtataagcactgtgctaaaattgcagacactaggaccatgtcttggtttttgcaataatgctagcagagtacacacaagaagaaaagtaacagcactagattgtaaagactggggtggacctctttcttaatgtccaatgtcctttgtcttaagatttggtgcaatatctcattagacctaacagaatgaagttaatttttataatttctacgttttgagactgggttatgagactggctaagactggccaattttggtattttgggtagagacagtttcactttcttgaaaccctggtctggttggaactctgggctctaagtgctaggatcccaaagggctgggattacaggcattagcactgtggctggcccagaatgaatttttaactgaagagttggaaaaactaaatgactgttaactttaacttctaaacattacaggaatggaagttggatacactttgtgacttgtacgagacactgaccattacacaggctgttatttttctcaatacgaggcgcaaggtggactggctgactgagaagatgcatgccagagacttcacagtttctgctctggtaagaggtgttctaaaatgtctggatttccactaaagcaggattcagactacaatatagctgctaagtgctgtgttgtcgttccccctgcttaaaataaagttgtttcttaactatacctgtctgctattctcctgtagcagccagggacgcttggtctcatacatgttgattaaaattaaataccgacctgactggtgattcttgaattaaggtttattaatttgcagcatggtgacatggaccagaaggagagagatgttatcatgagggaattccggtcagggtcaagtcgtgttctgatcactactgacttgttggtaagtctcttaatgctttttaaaaatctaccaaaagttagctttttggggggcaggtttttaagtaacctttgccaacttgggctatttggaagagtaaaagaccacactccacagtgggctataccacttagtatagttcgctactattttgtggcctacatgacaggtgtcaagtttttttgaatcaatttttaaaacatgccattgtgtttcaggctcgcgggattgatgtgcaacaagtgtctttggttataaattatgatctacctaccaatcgtgaaaactatattcacaggtgagaagccagcatcttggctgtattgaaaaaaattcatacgtttttctactgtgatttgtatgaaaggtaacatcaaatcaaggaatagattcagtaaagtcagtagtgttcagtaagatgatgtaattaaatttgtactagggaaggttgatgagaacaaagtgggaaaacttgtaaacattgcccagattgtggacatagggtttttttccacaattgttggtcttaccttatgcttgagcttttagtgatgttcttgtgtccatgtgtttttcttggtgattttttctatagttgggattttcttggtgtcgcctggtagcaatttgagtgaaccctggtttagttatagtggctttatccctaaataaattgaattgtactttgttatatgatgtaaaaaaagactttttaaaaaatacaggagtcgatagcagcagttggtgacgagatggcactcagaaacggcgttgacgtaatttaggacgtggaatcataagcgaaacagcacactgtttgaataaagagcgagtcggtatttatatttgtttttcttttgtcatgattatttgatttttaagttgctccagctaaggcatttttttgtattagtatttctattagggaacctttcttattaggtggtttgtattgtctggtttctaacatgcaggtagctgtttggcagttaaacacgtttagagtaatttgagttacaacgtgtgaaactgagcaaaaaagcagtgataagtttgggttaccataccaaatatttgttttcccactggaaaaaagtaagttttagaaaatagttaacctttgcagcatttgtttacagtttacagttccagaagtgcgtcgaaatggattacataactgctcttttattcctggtgttcacatctgtcccaggctgacacctgctcttggctggcccactttggtatgggctttaatttcactaccccaaacacgatactgtcatctgctttataataatgctcaagatgcctgataaaaatctcattttgcagccagacaagccttgaatccttttggcactaactgcaaaggaagatttttttctctagatatgcattagcagctagtgctccagttagaagcacgaactataaccttgataagtaaacagcagctggtggttaacaagtggatcgtcatgttcagtagtttatacattatgtgagaagtaacgttctgattctttttcttacacagaattggcagagggggtcgatttgggaggaaaggtgtggctataaactttgttactgaagaagacaagaggattcttcgtgacattgagactttctacaatactacagtggaggagatgcccatgaatgtggctgaccttatttaattcctgggatgagagttttggatgcagtgctcgctgttgctgaataggcgatcacaacgtgcattgtgcttctttctttgggaatatttgaatcttgtctcaatgctcataacggatcagaaatacagattttgatagcaaagcgacgttagtcgtgagctcttgtgaggaaagtcattggctttatcctctttagagttagactgttggggtgggtataaaagatggggtctgtaaaatctttctttcttagaaatttatttcctagttctgtagaaatggttgtattagatgttctctatcatttaataatatacttgtggactaaaagatataagtgctgtataaaatcagccaattatgttaaactagcatatctgcctttattgtgtttgtcattagcctgagtagaaaggcctttaaaatttttttagaaagcatttgaatgcattttgtttggtattgtatttattcaataaagtatttaattagtgctaagtgtgaactggaccctgttgctaagccccagcaagcaatcctaggtagggtttaatccccagtaaaattgccatattgcacatgtcttaatgaagtttgaatgttaaataaattgtatattcactttaaaggt

SEQ ID NO: 4331 - protein, 165 aa, Homo sapiens; identical to SEQ ID NO: 4327

SEQ ID NO: 4332 - DNA, 3441 bp, Homo sapiens
gtcttttcagtcgggcgctgagtggtttttcggatcatgtctggtggctccgcggattataacagagaacatggcggcccagagggaatggaccccgatggtgtcatcgagagcaactggaatgagattgttgataactttgatgatatgaatttaaaggagtctctccttcgtggcatctatgcttacggttttgagaagccttccgctattcagcagagagctattattccctgtattaaagatccaaaaggtaattctggcacttggagactatatgggagccacttgtcatgcctgcattggtggaacaaatgttcgaaatgaaatgcaaaaactgcaggctgaagcaccacatattgttgttggtacacccgggagagtgtttgatatgttaaacagaagatacctttctccaaaatggatcaaaatgtttgttttggatgaagcagatgaaatgttgagccgtggttttaaggatcaaatctatgagattttccaaaaactaaacacaagtattcaggttgtgttgctttctgccacaatgccaactgatgtgttggaagtgaccaaaaaattcatgagagatccaattcgaattctggtgaaaaaggaagaattgacccttgaaggaatcaaacagttttatattaatgttgagagagaggaatggaagttggatacactttgtgacttgtacgagacactgaccattacacaggctgttatttttctcaatacgaggcgcaaggtggactggctgactgagaagatgcatgccagagacttcacagtttctgctctggtaagaggtgttctaaaatgtctggatttccactaaagcaggattcagactacaatatagctgctaagtgctgtgttgtcgttccccctgcttaaaataaagttgtttcttaactatacctgtctgctattctcctgtagcagccagggacgcttggtctcatacatgttgattaaaattaaataccgacctgactggtgattcttgaattaaggtttattaatttgcagcatggtgacatggaccagaaggagagagatgttatcatgagggaattccggtcagggtcaagtcgtgttctgatcactactgacttgttggtaagtctcttaatgctttttaaaaatctaccaaaagttagctttttggggggcaggtttttaagtaacctttgccaacttgggctatttggaagagtaaaagaccacactccacagtgggctataccacttagtatagttcgctactattttgtggcctacatgacaggtgtcaagtttttttgaatcaatttttaaaacatgccattgtgtttcaggctcgcgggattgatgtgcaacaagtgtctttggttataaattatgatctacctaccaatcgtgaaaactatattcacaggtgagaagccagcatcttggctgtattgaaaaaaattcatacgtttttctactgtgatttgtatgaaaggtaacatcaaatcaaggaatagattcagtaaagtcagtagtgttcagtaagatgatgtaattaaatttgtactagggaaggttgatgagaacaaagtgggaaaacttgtaaacattgcccagattgtggacatagggtttttttccacaattgttggtcttaccttatgcttgagcttttagtgatgttcttgtgtccatgtgtttttcttggtgattttttctatagttgggattttcttggtgtcgcctggtagcaatttgagtgaaccctggtttagttatagtggctttatccctaaataaattgaattgtactttgttatatgatgtaaaaaaagactttttaaaaaatacaggagtcgatagcagcagttggtgacgagatggcactcagaaacggcgttgacgtaatttaggacgtggaatcataagcgaaacagcacactgtttgaataaagagcgagtcggtatttatatttgtttttcttttgtcatgattatttgatttttaagttgctccagctaaggcatttttttgtattagtatttctattagggaacctttcttattaggtggtttgtattgtctggtttctaacatgcaggtagctgtttggcagttaaacacgtttagagtaatttgagttacaacgtgtgaaactgagcaaaaaagcagtgataagtttgggttaccataccaaatatttgttttcccactggaaaaaagtaagttttagaaaatagttaacctttgcagcatttgtttacagtttacagttccagaagtgcgtcgaaatggattacataactgctcttttattcctggtgttcacatctgtcccaggctgacacctgctcttggctggcccactttggtatgggctttaatttcactaccccaaacacgatactgtcatctgctttataataatgctcaagatgcctgataaaaatctcattttgcagccagacaagccttgaatccttttggcactaactgcaaaggaagatttttttctctagatatgcattagcagctagtgctccagttagaagcacgaactataaccttgataagtaaacagcagctggtggttaacaagtggatcgtcatgttcagtagtttatacattatgtgagaagtaacgttctgattctttttcttacacagaattggcagagggggtcgatttgggaggaaaggtgtggctataaactttgttactgaagaagacaagaggattcttcgtgacattgagactttctacaatactacagtggaggagatgcccatgaatgtggctgaccttatttaattcctgggatgagagttttggatgcagtgctcgctgttgctgaataggcgatcacaacgtgcattgtgcttctttctttgggaatatttgaatcttgtctcaatgctcataacggatcagaaatacagattttgatagcaaagcgacgttagtcgtgagctcttgtgaggaaagtcattggctttatcctctttagagttagactgttggggtgggtataaaagatggggtctgtaaaatctttctttcttagaaatttatttcctagttctgtagaaatggttgtattagatgttctctatcatttaataatatacttgtggactaaaagatataagtgctgtataaaatcagccaattatgttaaactagcatatctgcctttattgtgtttgtcattagcctgagtagaaaggcctttaaaatttttttagaaagcatttgaatgcattttgtttggtattgtatttattcaataaagtatttaattagtgctaagtgtgaactggaccctgttgctaagccccagcaagcaatcctaggtagggtttaatccccagtaaaattgccatattgcacatgtcttaatgaagtttgaatgttaaataaattgtatattcactttaaaggt

SEQ ID NO: 4333 - protein, 219 aa, Homo sapiens; identical to SEQ ID NO: 4329

SEQ ID NO: 4334 - DNA, 3914 bp, Homo sapiens
gtcttttcagtcgggcgctgagtggtttttcggatcatgtctggtggctccgcggattataacagagaacatggcggcccagagggaatggaccccgatggtgtcatcgagagcaactggaatgagattgttgataactttgatgatatgaatttaaaggagtctctccttcgtggcatctatgcttacggttttgagaagccttccgctattcagcagagagctattattccctgtattaaagatccaaaaggtaattctggcacttggagactatatgggagccacttgtcatgcctgcattggtggaacaaatgttcgaaatgaaatgcaaaaactgcaggctgaagcaccacatattgttgttggtacacccgggagagtgtttgatatgttaaacagaagatacctttctccaaaatggatcaaaatgtttgttttggatgaagcagatgaaatgttgagccgtggttttaaggatcaaatctatgagattttccaaaaactaaacacaagtattcaggttgtgttgctttctgccacaatgccaactgatgtgttggaagtgaccaaaaaattcatgagagatccaattcgaattctggtgaaaaaggaagaattgacccttgaaggaatcaaacagttttatattaatgttgagagagaggaatggaagttggatacactttgtgacttgtacgagacactgaccattacacaggctgttatttttctcaatacgaggcgcaaggtggactggctgactgagaagatgcatgccagagacttcacagtttctgctctggtaagaggtgttctaaaatgtctggatttccactaaagcaggattcagactacaatatagctgctaagtgctgtgttgtcgttccccctgcttaaaataaagttgtttcttaactatacctgtctgctattctcctgtagcagccagggacgcttggtctcatacatgttgattaaaattaaataccgacctgactggtgattcttgaattaaggtttattaatttgcagcatggtgacatggaccagaaggagagagatgttatcatgagggaattccggtcagggtcaagtcgtgttctgatcactactgacttgttggtaagtctcttaatgctttttaaaaatctaccaaaagttagctttttggggggcaggtttttaagtaacctttgccaacttgggctatttggaagagtaaaagaccacactccacagtgggctataccacttagtatagttcgctactattttgtggcctacatgacaggtgtcaagtttttttgaatcaatttttaaaacatgccattgtgtttcaggctcgcgggattgatgtgcaacaagtgtctttggttataaattatgatctacctaccaatcgtgaaaactatattcacaggtgagaagccagcatcttggctgtattgaaaaaaattcatacgtttttctactgtgatttgtatgaaaggtaacatcaaatcaaggaatagattcagtaaagtcagtagtgttcagtaagatgatgtaattaaatttgtactagggaaggttgatgagaacaaagtgggaaaacttgtaaacattgcccagattgtggacatagggtttttttccacaattgttggtcttaccttatgcttgagcttttagtgatgttcttgtgtccatgtgtttttcttggtgattttttctatagttgggattttcttggtgtcgcctggtagcaatttgagtgaaccctggtttagttatagtggctttatccctaaataaattgaattgtactttgttatatgatgtaaaaaaagactttttaaaaaatacaggagtcgatagcagcagttggtgacgagatggcactcagaaacggcgttgacgtaatttaggacgtggaatcataagcgaaacagcacactgtttgaataaagagcgagtcggtatttatatttgtttttcttttgtcatgattatttgatttttaagttgctccagctaaggcatttttttgtattagtatttctattagggaacctttcttattaggtggtttgtattgtctggtttctaacatgcaggtagctgtttggcagttaaacacgtttagagtaatttgagttacaacgtgtgaaactgagcaaaaaagcagtgataagtttgggttaccataccaaatatttgttttcccactggaaaaaagtaagttttagaaaatagttaacctttgcagcatttgtttacagtttacagttccagaagtgcgtcgaaatggattacataactgctcttttattcctggtgttcacatctgtcccaggctgacacctgctcttggctggcccactttggtatgggctttaatttcactaccccaaacacgatactgtcatctgctttataataatgctcaagatgcctgataaaaatctcattttgcagccagacaagccttgaatccttttggcactaactgcaaaggaagatttttttctctagatatgcattagcagctagtgctccagttagaagcacgaactataaccttgataagtaaacagcagctggtggttaacaagtggatcgtcatgttcagtagtttatacattatgtgagaagtaacgttctgattctttttcttacacagaattggcagagggggtcgatttgggaggaaaggtgtggctataaactttgttactgaagaagacaagaggattcttcgtgacattgagactttctacaatactacagtggaggagatgcccatgaatgtggctgaccttatttaattcctgggatgagagttttggatgcagtgctcgctgttgctgaataggcgatcacaacgtgcattgtgcttctttctttgggaatatttgaatcttgtctcaatgctcataacggatcagaaatacagattttgatagcaaagcgacgttagtcgtgagctcttgtgaggaaagtcattggctttatcctctttagagttagactgttggggtgggtataaaagatggggtctgtaaaatctttctttcttagaaatttatttcctagttctgtagaaatggttgtattagatgttctctatcatttaataatatacttgtggactaaaagatataagtgctgtataaaatcagccaattatgttaaactagcatatctgcctttattgtgtttgtcattagcctgagtagaaaggcctttaaaatttttttagaaagcatttgaatgcattttgtttggtattgtatttattcaataaagtatttaattagtgctaagtgtgaactggaccctgttgctaagccccagcaagcaatcctaggtagggtttaatccccagtaaaattgccatattgcacatgtcttaatgaagtttgaatgttaaataaattgtatattcactttaaaggtgcttttggtcattttatttttattacaacttcattatttacaaaaccccccatccagatatattcacgttaacaattctgagataactgctgcatcacagttgcacaaaggctgatgagttgcaaatgttcatcagcaccatctgctaggcatttgtcaacttcctacgagaaaaatttaagaaattagcatccttcaggtagttaaatgttccattgacatgtgcaaagtacctacttacggcaagtttttctgtgataatagacttctgtttatcagataagttattttctacaaccacatcatggagttgattgacgagctgagttgctgcatgaccctcatctattaaatcctataataaaaaaaacttttggtatgatgacttaatattcctttccccaaagttagtaagctgactttaccttgaccacagcttctagtttgtcaaaagagccactctgacaggcagc

SEQ ID NO: 4335 - protein, 219 aa, Homo sapiens; identical to SEQ ID NO: 4329

SEQ ID NO: 4336 - DNA, 4395 bp, Homo sapiens
gtcttttcagtcgggcgctgagtggtttttcggatcatgtctggtggctccgcggattataacagagaacatggcggcccagagggaatggaccccgatggtgtcatcgagagcaactggaatgagattgttgataactttgatgatatgaatttaaaggagtctctccttcgtggcatctatgcttacggttttgagaagccttccgctattcagcagagagctattattccctgtattaaagatccaaaaggtaattctggcacttggagactatatgggagccacttgtcatgcctgcattggtggaacaaatgttcgaaatgaaatgcaaaaactgcaggctgaagcaccacatattgttgttggtacacccgggagagtgtttgatatgttaaacagaagatacctttctccaaaatggatcaaaatgtttgttttggatgaagcagatgaaatgttgagccgtggttttaaggatcaaatctatgagattttccaaaaactaaacacaagtattcaggttgtgttgctttctgccacaatgccaactgatgtgttggaagtgaccaaaaaattcatgagagatccaattcgaattctggtgaaaaaggaagaattgacccttgaaggaatcaaacagttttatattaatgttgagagagaggtaactgtctgattgttagacattattttaccttcttgtataagcactgtgctaaaattgcagacactaggaccatgtcttggtttttgcaataatgctagcagagtacacacaagaagaaaagtaacagcactagattgtaaagactggggtggacctctttcttaatgtccaatgtcctttgtcttaagatttggtgcaatatctcattagacctaacagaatgaagttaatttttataatttctacgttttgagactgggttatgagactggctaagactggccaattttggtattttgggtagagacagtttcactttcttgaaaccctggtctggttggaactctgggctctaagtgctaggatcccaaagggctgggattacaggcattagcactgtggctggcccagaatgaatttttaactgaagagttggaaaaactaaatgactgttaactttaacttctaaacattacaggaatggaagttggatacactttgtgacttgtacgagacactgaccattacacaggctgttatttttctcaatacgaggcgcaaggtggactggctgactgagaagatgcatgccagagacttcacagtttctgctctggtaagaggtgttctaaaatgtctggatttccactaaagcaggattcagactacaatatagctgctaagtgctgtgttgtcgttccccctgcttaaaataaagttgtttcttaactatacctgtctgctattctcctgtagcagccagggacgcttggtctcatacatgttgattaaaattaaataccgacctgactggtgattcttgaattaaggtttattaatttgcagcatggtgacatggaccagaaggagagagatgttatcatgagggaattccggtcagggtcaagtcgtgttctgatcactactgacttgttggtaagtctcttaatgctttttaaaaatctaccaaaagttagctttttggggggcaggtttttaagtaacctttgccaacttgggctatttggaagagtaaaagaccacactccacagtgggctataccacttagtatagttcgctactattttgtggcctacatgacaggtgtcaagtttttttgaatcaatttttaaaacatgccattgtgtttcaggctcgcgggattgatgtgcaacaagtgtctttggttataaattatgatctacctaccaatcgtgaaaactatattcacaggtgagaagccagcatcttggctgtattgaaaaaaattcatacgtttttctactgtgatttgtatgaaaggtaacatcaaatcaaggaatagattcagtaaagtcagtagtgttcagtaagatgatgtaattaaatttgtactagggaaggttgatgagaacaaagtgggaaaacttgtaaacattgcccagattgtggacatagggtttttttccacaattgttggtcttaccttatgcttgagcttttagtgatgttcttgtgtccatgtgtttttcttggtgattttttctatagttgggattttcttggtgtcgcctggtagcaatttgagtgaaccctggtttagttatagtggctttatccctaaataaattgaattgtactttgttatatgatgtaaaaaaagactttttaaaaaatacaggagtcgatagcagcagttggtgacgagatggcactcagaaacggcgttgacgtaatttaggacgtggaatcataagcgaaacagcacactgtttgaataaagagcgagtcggtatttatatttgtttttcttttgtcatgattatttgatttttaagttgctccagctaaggcatttttttgtattagtatttctattagggaacctttcttattaggtggtttgtattgtctggtttctaacatgcaggtagctgtttggcagttaaacacgtttagagtaatttgagttacaacgtgtgaaactgagcaaaaaagcagtgataagtttgggttaccataccaaatatttgttttcccactggaaaaaagtaagttttagaaaatagttaacctttgcagcatttgtttacagtttacagttccagaagtgcgtcgaaatggattacataactgctcttttattcctggtgttcacatctgtcccaggctgacacctgctcttggctggcccactttggtatgggctttaatttcactaccccaaacacgatactgtcatctgctttataataatgctcaagatgcctgataaaaatctcattttgcagccagacaagccttgaatccttttggcactaactgcaaaggaagatttttttctctagatatgcattagcagctagtgctccagttagaagcacgaactataaccttgataagtaaacagcagctggtggttaacaagtggatcgtcatgttcagtagtttatacattatgtgagaagtaacgttctgattctttttcttacacagaattggcagagggggtcgatttgggaggaaaggtgtggctataaactttgttactgaagaagacaagaggattcttcgtgacattgagactttctacaatactacagtggaggagatgcccatgaatgtggctgaccttatttaattcctgggatgagagttttggatgcagtgctcgctgttgctgaataggcgatcacaacgtgcattgtgcttctttctttgggaatatttgaatcttgtctcaatgctcataacggatcagaaatacagattttgatagcaaagcgacgttagtcgtgagctcttgtgaggaaagtcattggctttatcctctttagagttagactgttggggtgggtataaaagatggggtctgtaaaatctttctttcttagaaatttatttcctagttctgtagaaatggttgtattagatgttctctatcatttaataatatacttgtggactaaaagatataagtgctgtataaaatcagccaattatgttaaactagcatatctgcctttattgtgtttgtcattagcctgagtagaaaggcctttaaaatttttttagaaagcatttgaatgcattttgtttggtattgtatttattcaataaagtatttaattagtgctaagtgtgaactggaccctgttgctaagccccagcaagcaatcctaggtagggtttaatccccagtaaaattgccatattgcacatgtcttaatgaagtttgaatgttaaataaattgtatattcactttaaaggtgcttttggtcattttatttttattacaacttcattatttacaaaaccccccatccagatatattcacgttaacaattctgagataactgctgcatcacagttgcacaaaggctgatgagttgcaaatgttcatcagcaccatctgctaggcatttgtcaacttcctacgagaaaaatttaagaaattagcatccttcaggtagttaaatgttccattgacatgtgcaaagtacctacttacggcaagtttttctgtgataatagacttctgtttatcagataagttattttctacaaccacatcatggagttgattgacgagctgagttgctgcatgaccctcatctattaaatcctataataaaaaaaacttttggtatgatgacttaatattcctttccccaaagttagtaagctgactttaccttgaccacagcttctagtttgtcaaaagagccactctgacaggcagc

SEQ ID NO: 4337 - protein, 165 aa, Homo sapiens; identical to SEQ ID NO: 4327

SEQ ID NO: 4338 - DNA, 2189 bp, Homo sapiens
tcttttcagtcgggcgctgagtggtttttcggatcatgtctggtggctccgcggattataacagagaacatggcggcccagagggaatggaccccgatggtgtcatcgaggtaagaaacggttgtggatcttgaagctttggaaagatccaaaaggtaattctggcacttggagactatatgggagccacttgtcatgcctgcattggtggaacaaatgttcgaaatgaaatgcaaaaactgcaggctgaagcaccacatattgttgttggtacacccgggagagtgtttgatatgttaaacagaagatacctttctccaaaatggatcaaaatgtttgttttggatgaagcagatgaaatgttgagccgtggttgtaacatcaaatcaaggaatagattcagtaaagtcagtagtgttcagtaagatgatgtaattaaatttgtactagggaaggttgatgagaacaaagtgggaaaacttgtaaacattgcccagattgtggacatagggtttttttccacaattgttggtcttaccttatgcttgagcttttagtgatgttcttgtgtccatgtgtttttcttggtgattttttctatagttgggattttcttggtgtcgcctggtagcaatttgagtgaaccctggtttagttatagtggctttatccctaaataaattgaattgtactttgttatatgatgtaaaaaaagactttttaaaaaatacaggagtcgatagcagcagttggtgacgagatggcactcagaaacggcgttgacgtaatttaggacgtggaatcataagcgaaacagcacactgtttgaataaagagcgagtcggtatttatatttgtttttcttttgtcatgattatttgatttttaagttgctccagctaaggcatttttttgtattagtatttctattagggaacctttcttattaggtggtttgtattgtctggtttctaacatgcaggtagctgtttggcagttaaacacgtttagagtaatttgagttacaacgtgtgaaactgagcaaaaaagcagtgataagtttgggttaccataccaaatatttgttttcccactggaaaaaagtaagttttagaaaatagttaacctttgcagcatttgtttacagtttacagttccagaagtgcgtcgaaatggattacataactgctcttttattcctggtgttcacatctgtcccaggctgacacctgctcttggctggcccactttggtatgggctttaatttcactaccccaaacacgatactgtcatctgctttataataatgctcaagatgcctgataaaaatctcattttgcagccagacaagccttgaatccttttggcactaactgcaaaggaagatttttttctctagatatgcattagcagctagtgctccagttagaagcacgaactataaccttgataagtaaacagcagctggtggttaacaagtggatcgtcatgttcagtagtttatacattatgtgagaagtaacgttctgattctttttcttacacagaattggcagagggggtcgatttgggaggaaaggtgtggctataaactttgttactgaagaagacaagaggattcttcgtgacattgagactttctacaatactacagtggaggagatgcccatgaatgtggctgaccttatttaattcctgggatgagagttttggatgcagtgctcgctgttgctgaataggcgatcacaacgtgcattgtgcttctttctttgggaatatttgaatcttgtctcaatgctcataacggatcagaaatacagattttgatagcaaagcgacgttagtcgtgagctcttgtgaggaaagtcattggctttatcctctttagagttagactgttggggtgggtataaaagatggggtctgtaaaatctttctttcttagaaatttatttcctagttctgtagaaatggttgtattagatgttctctatcatttaataatatacttgtggactaaaagatataagtgctgtataaaatcagccaattatgttaaactagcatatctgcctttattgtgtttgtcattagcctgagtagaaaggcctttaaaatttttttagaaagcatttgaatgcattttgtttggtattgtatttattcaataaagtatttaattagtgct

SEQ ID NO: 4339 - protein, 81 aa, Homo sapiens
MGATCHACIGGTNVRNEMQKLQAEAPHIVVGTPGRVFDMLNRRYLSPKWIKMFVLDEADEMLSRGCNIKSRNRFSKVSSVQ

SEQ ID NO: 4340 - DNA, 2324 bp, Homo sapiens
tcttttcagtcgggcgctgagtggtttttcggatcatgtctggtggctccgcggattataacagagaacatggcggcccagagggaatggaccccgatggtgtcatcgaggtaagaaacggttgtggatcttgaagctttggaaagatccaaaaggtaattctggcacttggagactatatgggagccacttgtcatgcctgcattggtggaacaaatgttcgaaatgaaatgcaaaaactgcaggctgaagcaccacatattgttgttggtacacccgggagagtgtttgatatgttaaacagaagatacctttctccaaaatggatcaaaatgtttgttttggatgaagcagatgaaatgttgagccgtggttgtaacatcaaatcaaggaatagattcagtaaagtcagtagtgttcagtaagatgatgtaattaaatttgtactagggaaggttgatgagaacaaagtgggaaaacttgtaaacattgcccagattgtggacatagggtttttttccacaattgttggtcttaccttatgcttgagcttttagtgatgttcttgtgtccatgtgtttttcttggtgattttttctatagttgggattttcttggtgtcgcctggtagcaatttgagtgaaccctggtttagttatagtggctttatccctaaataaattgaattgtactttgttatatgatgtaaaaaaagactttttaaaaaatacaggagtcgatagcagcagttggtgacgagatggcactcagaaacggcgttgacgtaatttaggacgtggaatcataagcgaaacagcacactgtttgaataaagagcgagtcggtatttatatttgtttttcttttgtcatgattatttgatttttaagttgctccagctaaggcatttttttgtattagtatttctattagggaacctttcttattaggtggtttgtattgtctggtttctaacatgcaggtagctgtttggcagttaaacacgtttagagtaatttgagttacaacgtgtgaaactgagcaaaaaagcagtgataagtttgggttaccataccaaatatttgttttcccactggaaaaaagtaagttttagaaaatagttaacctttgcagcatttgtttacagtttacagttccagaagtgcgtcgaaatggattacataactgctcttttattcctggtgttcacatctgtcccaggctgacacctgctcttggctggcccactttggtatgggctttaatttcactaccccaaacacgatactgtcatctgctttataataatgctcaagatgcctgataaaaatctcattttgcagccagacaagccttgaatccttttggcactaactgcaaaggaagatttttttctctagatatgcattagcagctagtgctccagttagaagcacgaactataaccttgataagtaaacagcagctggtggttaacaagtggatcgtcatgttcagtagtttatacattatgtgagaagtaacgttctgattctttttcttacacagaattggcagagggggtcgatttgggaggaaaggtgtggctataaactttgttactgaagaagacaagaggattcttcgtgacattgagactttctacaatactacagtggaggagatgcccatgaatgtggctgaccttatttaattcctgggatgagagttttggatgcagtgctcgctgttgctgaataggcgatcacaacgtgcattgtgcttctttctttgggaatatttgaatcttgtctcaatgctcataacggatcagaaatacagattttgatagcaaagcgacgttagtcgtgagctcttgtgaggaaagtcattggctttatcctctttagagttagactgttggggtgggtataaaagatggggtctgtaaaatctttctttcttagaaatttatttcctagttctgtagaaatggttgtattagatgttctctatcatttaataatatacttgtggactaaaagatataagtgctgtataaaatcagccaattatgttaaactagcatatctgcctttattgtgtttgtcattagcctgagtagaaaggcctttaaaatttttttagaaagcatttgaatgcattttgtttggtattgtatttattcaataaagtatttaattagtgctaagtgtgaactggaccctgttgctaagccccagcaagcaatcctaggtagggtttaatccccagtaaaattgccatattgcacatgtcttaatgaagtttgaatgttaaataaattgtatattcactttaaaggt

SEQ ID NO: 4341 - protein, 81 aa, Homo sapiens; identical to SEQ ID NO: 4339

SEQ ID NO: 4342 - DNA, 2797 bp, Homo sapiens
tcttttcagtcgggcgctgagtggtttttcggatcatgtctggtggctccgcggattataacagagaacatggcggcccagagggaatggaccccgatggtgtcatcgaggtaagaaacggttgtggatcttgaagctttggaaagatccaaaaggtaattctggcacttggagactatatgggagccacttgtcatgcctgcattggtggaacaaatgttcgaaatgaaatgcaaaaactgcaggctgaagcaccacatattgttgttggtacacccgggagagtgtttgatatgttaaacagaagatacctttctccaaaatggatcaaaatgtttgttttggatgaagcagatgaaatgttgagccgtggttgtaacatcaaatcaaggaatagattcagtaaagtcagtagtgttcagtaagatgatgtaattaaatttgtactagggaaggttgatgagaacaaagtgggaaaacttgtaaacattgcccagattgtggacatagggtttttttccacaattgttggtcttaccttatgcttgagcttttagtgatgttcttgtgtccatgtgtttttcttggtgattttttctatagttgggattttcttggtgtcgcctggtagcaatttgagtgaaccctggtttagttatagtggctttatccctaaataaattgaattgtactttgttatatgatgtaaaaaaagactttttaaaaaatacaggagtcgatagcagcagttggtgacgagatggcactcagaaacggcgttgacgtaatttaggacgtggaatcataagcgaaacagcacactgtttgaataaagagcgagtcggtatttatatttgtttttcttttgtcatgattatttgatttttaagttgctccagctaaggcatttttttgtattagtatttctattagggaacctttcttattaggtggtttgtattgtctggtttctaacatgcaggtagctgtttggcagttaaacacgtttagagtaatttgagttacaacgtgtgaaactgagcaaaaaagcagtgataagtttgggttaccataccaaatatttgttttcccactggaaaaaagtaagttttagaaaatagttaacctttgcagcatttgtttacagtttacagttccagaagtgcgtcgaaatggattacataactgctcttttattcctggtgttcacatctgtcccaggctgacacctgctcttggctggcccactttggtatgggctttaatttcactaccccaaacacgatactgtcatctgctttataataatgctcaagatgcctgataaaaatctcattttgcagccagacaagccttgaatccttttggcactaactgcaaaggaagatttttttctctagatatgcattagcagctagtgctccagttagaagcacgaactataaccttgataagtaaacagcagctggtggttaacaagtggatcgtcatgttcagtagtttatacattatgtgagaagtaacgttctgattctttttcttacacagaattggcagagggggtcgatttgggaggaaaggtgtggctataaactttgttactgaagaagacaagaggattcttcgtgacattgagactttctacaatactacagtggaggagatgcccatgaatgtggctgaccttatttaattcctgggatgagagttttggatgcagtgctcgctgttgctgaataggcgatcacaacgtgcattgtgcttctttctttgggaatatttgaatcttgtctcaatgctcataacggatcagaaatacagattttgatagcaaagcgacgttagtcgtgagctcttgtgaggaaagtcattggctttatcctctttagagttagactgttggggtgggtataaaagatggggtctgtaaaatctttctttcttagaaatttatttcctagttctgtagaaatggttgtattagatgttctctatcatttaataatatacttgtggactaaaagatataagtgctgtataaaatcagccaattatgttaaactagcatatctgcctttattgtgtttgtcattagcctgagtagaaaggcctttaaaatttttttagaaagcatttgaatgcattttgtttggtattgtatttattcaataaagtatttaattagtgctaagtgtgaactggaccctgttgctaagccccagcaagcaatcctaggtagggtttaatccccagtaaaattgccatattgcacatgtcttaatgaagtttgaatgttaaataaattgtatattcactttaaaggtgcttttggtcattttatttttattacaacttcattatttacaaaaccccccatccagatatattcacgttaacaattctgagataactgctgcatcacagttgcacaaaggctgatgagttgcaaatgttcatcagcaccatctgctaggcatttgtcaacttcctacgagaaaaatttaagaaattagcatccttcaggtagttaaatgttccattgacatgtgcaaagtacctacttacggcaagtttttctgtgataatagacttctgtttatcagataagttattttctacaaccacatcatggagttgattgacgagctgagttgctgcatgaccctcatctattaaatcctataataaaaaaaacttttggtatgatgacttaatattcctttccccaaagttagtaagctgactttaccttgaccacagcttctagtttgtcaaaagagccactctgacaggcagc

SEQ ID NO: 4343 - protein, 81 aa, Homo sapiens; identical to SEQ ID NO: 4339

SEQ ID NO: 4344 - DNA, 5046 bp, Homo sapiens
cttttcagtcgggcgctgagtggtttttcggatcatgtctggtggctccgcggattataacagagaacatggcggcccagagggaatggaccccgatggtgtcatcgagagcaactggaatgagattgttgataactttgatgatatgaatttaaaggagtctctccttcgtggcatctatgcttacggttttgagaagccttccgctattcagcagagagctattattccctgtattaaagggtatgatgtgattgctcaagctcagtcaggtactggcaagacagccacatttgctatttccatcctgcaacagttggagattgagttcaaggagacccaagcactagtattggcccccaccagagaactggctcaacaggtattgatagtgtagttcaaaaaaactgcttgcgtgttgcataggtttcaggtttcacaactgtgaagaatttaaaacttagtataaattggtcctaccagatccctccttttaattgtccatgcatgcagggagtttttgttgaaagttttaaaagaactgggtatgcaggtatggtttgtagggttgtatactaatagattgagaatccgaagcgctctcttggatgtactagatctgtccccattttttaagtttgaatgcagttgtgcaacatgaaaactgcagtgacatgttaccatttgactgtctccgtagttcgtgatgcatctgttgcatgctatgttttcaaagctcactgctatattggctttgaagtaaaccttcctaataaagctgtaggctttattgaggtcaggattatataaggcacaataccctctgggggaaaaaaatcatttgccctagctgtaattacagaacataaatttcactacgtactccctacctacagtgaagaataatgtaggaaacgttattcttggattgtctagctgatgcgtggagcagcagcatcccaagtttgacaaggcataagaaagacattaagggaattttaccttgcagcagttaggtcgtctgcattttaagcttggaagtagttttgtgctgtgcatgcataaaagctgttggcagaccagattatatttgcctttatgctttaaaaattagtcattgatcctggagttctgcggaataataattaaggcttgggttttagatccaaaaggtaattctggcacttggagactatatgggagccacttgtcatgcctgcattggtggaacaaatgttcgaaatgaaatgcaaaaactgcaggctgaagcaccacatattgttgttggtacacccgggagagtgtttgatatgttaaacagaagatacctttgtaagtattgtctttaagagagtattttttttaaaactgttaacatagttgaaaagtcaaattgtatcactgagtagatctagaaatgacagtatgactttgtttctaacagctccaaaatggatcaaaatgtttgttttggatgaagcagatgaaatgttgagccgtggttttaaggatcaaatctatgagattttccaaaaactaaacacaagtattcaggtaagcattacttcacccccctcttaaaggtagagatggggtttatttaatgcaggtactgttacaatacaactgatgtgttttgttgtcgttccccctgcttaaagcacttgatgcataactctgtctaccttcattccgtagtaagacagagacgcttggcttcagacattttcctttgggtattaatgtgtaagttgtgctacaacataattttctctttttaaggttgtgttgctttctgccacaatgccaactgatgtgttggaagtgaccaaaaaattcatgagagatccaattcgaattctggtgaaaaaggaagaattgacccttgaaggaatcaaacagttttatattaatgttgagagagaggtaactgtctgattgttagacattattttaccttcttgtataagcactgtgctaaaattgcagacactaggaccatgtcttggtttttgcaataatgctagcagagtacacacaagaagaaaagtaacagcactagattgtaaagactggggtggacctctttcttaatgtccaatgtcctttgtcttaagatttggtgcaatatctcattagacctaacagaatgaagttaatttttataatttctacgttttgagactgggttatgagactggctaagactggccaattttggtattttgggtagagacagtttcactttcttgaaaccctggtctggttggaactctgggctctaagtgctaggatcccaaagggctgggattacaggcattagcactgtggctggcccagaatgaatttttaactgaagagttggaaaaactaaatgactgttaactttaacttctaaacattacaggaatggaagttggatacactttgtgacttgtacgagacactgaccattacacaggctgttatttttctcaatacgaggcgcaaggtggactggctgactgagaagatgcatgccagagacttcacagtttctgctctggtaagaggtgttctaaaatgtctggatttccactaaagcaggattcagactacaatatagctgctaagtgctgtgttgtcgttccccctgcttaaaataaagttgtttcttaactatacctgtctgctattctcctgtagcagccagggacgcttggtctcatacatgttgattaaaattaaataccgacctgactggtgattcttgaattaaggtttattaatttgcagcatggtgacatggaccagaaggagagagatgttatcatgagggaattccggtcagggtcaagtcgtgttctgatcactactgacttgttggtaagtctcttaatgctttttaaaaatctaccaaaagttagctttttggggggcaggtttttaagtaacctttgccaacttgggctatttggaagagtaaaagaccacactccacagtgggctataccacttagtatagttcgctactattttgtggcctacatgacaggtgtcaagtttttttgaatcaatttttaaaacatgccattgtgtttcaggctcgcgggattgatgtgcaacaagtgtctttggttataaattatgatctacctaccaatcgtgaaaactatattcacaggtgagaagccagcatcttggctgtattgaaaaaaattcatacgtttttctactgtgatttgtatgaaaggtaacatcaaatcaaggaatagattcagtaaagtcagtagtgttcagtaagatgatgtaattaaatttgtactagggaaggttgatgagaacaaagtgggaaaacttgtaaacattgcccagattgtggacatagggtttttttccacaattgttggtcttaccttatgcttgagcttttagtgatgttcttgtgtccatgtgtttttcttggtgattttttctatagttgggattttcttggtgtcgcctggtagcaatttgagtgaaccctggtttagttatagtggctttatccctaaataaattgaattgtactttgttatatgatgtaaaaaaagactttttaaaaaatacaggagtcgatagcagcagttggtgacgagatggcactcagaaacggcgttgacgtaatttaggacgtggaatcataagcgaaacagcacactgtttgaataaagagcgagtcggtatttatatttgtttttcttttgtcatgattatttgatttttaagttgctccagctaaggcatttttttgtattagtatttctattagggaacctttcttattaggtggtttgtattgtctggtttctaacatgcaggtagctgtttggcagttaaacacgtttagagtaatttgagttacaacgtgtgaaactgagcaaaaaagcagtgataagtttgggttaccataccaaatatttgttttcccactggaaaaaagtaagttttagaaaatagttaacctttgcagcatttgtttacagtttacagttccagaagtgcgtcgaaatggattacataactgctcttttattcctggtgttcacatctgtcccaggctgacacctgctcttggctggcccactttggtatgggctttaatttcactaccccaaacacgatactgtcatctgctttataataatgctcaagatgcctgataaaaatctcattttgcagccagacaagccttgaatccttttggcactaactgcaaaggaagatttttttctctagatatgcattagcagctagtgctccagttagaagcacgaactataaccttgataagtaaacagcagctggtggttaacaagtggatcgtcatgttcagtagtttatacattatgtgagaagtaacgttctgattctttttcttacacagaattggcagagggggtcgatttgggaggaaaggtgtggctataaactttgttactgaagaagacaagaggattcttcgtgacattgagactttctacaatactacagtggaggagatgcccatgaatgtggctgaccttatttaattcctgggatgagagttttggatgcagtgctcgctgttgctgaataggcgatcacaacgtgcattgtgcttctttctttgggaatatttgaatcttgtctcaatgctcataacggatcagaaatacagattttgatagcaaagcgacgttagtcgtgagctcttgtgaggaaagtcattggctttatcctctttagagttagactgttggggtgggtataaaagatggggtctgtaaaatctttctttcttagaaatttatttcctagttctgtagaaatggttgtattagatgttctctatcatttaataatatacttgtggactaaaagatataagtgctgtataaaatcagccaattatgttaaactagcatatctgcctttattgtgtttgtcattagcctgagtagaaaggcctttaaaatttttttagaaagcatttgaatgcattttgtttggtattgtatttattcaataaagtatttaattagtgct

SEQ ID NO: 4345 - protein, 120 aa, Homo sapiens
MSGGSADYNREHGGPEGMDPDGVIESNWNEIVDNFDDMNLKESLLRGIYAYGFEKPSAIQQRAIIPCIKGYDVIAQAQSGTGKTATFAISILQQLEIEFKETQALVLAPTRELAQQVLIV

SEQ ID NO: 4346 - DNA, 5397 bp, Homo sapiens
cttttcagtcgggcgctgagtggtttttcggatcatgtctggtggctccgcggattataacagagaacatggcggcccagagggaatggaccccgatggtgtcatcgaggtaagaaacggttgtggatcttgaagctttggaaaggtgagtgtgttcatctcatttatgcgtgcattattttttctaacttacagagcaactggaatgagattgttgataactttgatgatatgaatttaaaggagtctctccttcgtggcatctatgcttacggttttgagaagccttccgctattcagcagagagctattattccctgtattaaaggtaaaagaaactggcatttttaggaaattgttctacatagacatgaaccataaaagggaaagtaacctctgggggactagcacctgtttgtattccttaaagtgaaatgatggcaatcatctttcgggactgacctgaaatgaagagaatactcattgctgatcacttgattatttgggcataatgttccaaatggaatacatggtgtgaagtagaagtgacaatttgatgtgggatcggtaaatgtgtatcctactttttttagggtatgatgtgattgctcaagctcagtcaggtactggcaagacagccacatttgctatttccatcctgcaacagttggagattgagttcaaggagacccaagcactagtattggcccccaccagagaactggctcaacaggtattgatagtgtagttcaaaaaaactgcttgcgtgttgcataggtttcaggtttcacaactgtgaagaatttaaaacttagtataaattggtcctaccagatccctccttttaattgtccatgcatgcagggagtttttgttgaaagttttaaaagaactgggtatgcaggtatggtttgtagggttgtatactaatagattgagaatccgaagcgctctcttggatgtactagatctgtccccattttttaagtttgaatgcagttgtgcaacatgaaaactgcagtgacatgttaccatttgactgtctccgtagttcgtgatgcatctgttgcatgctatgttttcaaagctcactgctatattggctttgaagtaaaccttcctaataaagctgtaggctttattgaggtcaggattatataaggcacaataccctctgggggaaaaaaatcatttgccctagctgtaattacagaacataaatttcactacgtactccctacctacagtgaagaataatgtaggaaacgttattcttggattgtctagctgatgcgtggagcagcagcatcccaagtttgacaaggcataagaaagacattaagggaattttaccttgcagcagttaggtcgtctgcattttaagcttggaagtagttttgtgctgtgcatgcataaaagctgttggcagaccagattatatttgcctttatgctttaaaaattagtcattgatcctggagttctgcggaataataattaaggcttgggttttagatccaaaaggtaattctggcacttggagactatatgggagccacttgtcatgcctgcattggtggaacaaatgttcgaaatgaaatgcaaaaactgcaggctgaagcaccacatattgttgttggtacacccgggagagtgtttgatatgttaaacagaagatacctttgtaagtattgtctttaagagagtattttttttaaaactgttaacatagttgaaaagtcaaattgtatcactgagtagatctagaaatgacagtatgactttgtttctaacagctccaaaatggatcaaaatgtttgttttggatgaagcagatgaaatgttgagccgtggttttaaggatcaaatctatgagattttccaaaaactaaacacaagtattcaggtaagcattacttcacccccctcttaaaggtagagatggggtttatttaatgcaggtactgttacaatacaactgatgtgttttgttgtcgttccccctgcttaaagcacttgatgcataactctgtctaccttcattccgtagtaagacagagacgcttggcttcagacattttcctttgggtattaatgtgtaagttgtgctacaacataattttctctttttaaggttgtgttgctttctgccacaatgccaactgatgtgttggaagtgaccaaaaaattcatgagagatccaattcgaattctggtgaaaaaggaagaattgacccttgaaggaatcaaacagttttatattaatgttgagagagaggtaactgtctgattgttagacattattttaccttcttgtataagcactgtgctaaaattgcagacactaggaccatgtcttggtttttgcaataatgctagcagagtacacacaagaagaaaagtaacagcactagattgtaaagactggggtggacctctttcttaatgtccaatgtcctttgtcttaagatttggtgcaatatctcattagacctaacagaatgaagttaatttttataatttctacgttttgagactgggttatgagactggctaagactggccaattttggtattttgggtagagacagtttcactttcttgaaaccctggtctggttggaactctgggctctaagtgctaggatcccaaagggctgggattacaggcattagcactgtggctggcccagaatgaatttttaactgaagagttggaaaaactaaatgactgttaactttaacttctaaacattacaggaatggaagttggatacactttgtgacttgtacgagacactgaccattacacaggctgttatttttctcaatacgaggcgcaaggtggactggctgactgagaagatgcatgccagagacttcacagtttctgctctggtaagaggtgttctaaaatgtctggatttccactaaagcaggattcagactacaatatagctgctaagtgctgtgttgtcgttccccctgcttaaaataaagttgtttcttaactatacctgtctgctattctcctgtagcagccagggacgcttggtctcatacatgttgattaaaattaaataccgacctgactggtgattcttgaattaaggtttattaatttgcagcatggtgacatggaccagaaggagagagatgttatcatgagggaattccggtcagggtcaagtcgtgttctgatcactactgacttgttggtaagtctcttaatgctttttaaaaatctaccaaaagttagctttttggggggcaggtttttaagtaacctttgccaacttgggctatttggaagagtaaaagaccacactccacagtgggctataccacttagtatagttcgctactattttgtggcctacatgacaggtgtcaagtttttttgaatcaatttttaaaacatgccattgtgtttcaggctcgcgggattgatgtgcaacaagtgtctttggttataaattatgatctacctaccaatcgtgaaaactatattcacaggtgagaagccagcatcttggctgtattgaaaaaaattcatacgtttttctactgtgatttgtatgaaaggtaacatcaaatcaaggaatagattcagtaaagtcagtagtgttcagtaagatgatgtaattaaatttgtactagggaaggttgatgagaacaaagtgggaaaacttgtaaacattgcccagattgtggacatagggtttttttccacaattgttggtcttaccttatgcttgagcttttagtgatgttcttgtgtccatgtgtttttcttggtgattttttctatagttgggattttcttggtgtcgcctggtagcaatttgagtgaaccctggtttagttatagtggctttatccctaaataaattgaattgtactttgttatatgatgtaaaaaaagactttttaaaaaatacaggagtcgatagcagcagttggtgacgagatggcactcagaaacggcgttgacgtaatttaggacgtggaatcataagcgaaacagcacactgtttgaataaagagcgagtcggtatttatatttgtttttcttttgtcatgattatttgatttttaagttgctccagctaaggcatttttttgtattagtatttctattagggaacctttcttattaggtggtttgtattgtctggtttctaacatgcaggtagctgtttggcagttaaacacgtttagagtaatttgagttacaacgtgtgaaactgagcaaaaaagcagtgataagtttgggttaccataccaaatatttgttttcccactggaaaaaagtaagttttagaaaatagttaacctttgcagcatttgtttacagtttacagttccagaagtgcgtcgaaatggattacataactgctcttttattcctggtgttcacatctgtcccaggctgacacctgctcttggctggcccactttggtatgggctttaatttcactaccccaaacacgatactgtcatctgctttataataatgctcaagatgcctgataaaaatctcattttgcagccagacaagccttgaatccttttggcactaactgcaaaggaagatttttttctctagatatgcattagcagctagtgctccagttagaagcacgaactataaccttgataagtaaacagcagctggtggttaacaagtggatcgtcatgttcagtagtttatacattatgtgagaagtaacgttctgattctttttcttacacagaattggcagagggggtcgatttgggaggaaaggtgtggctataaactttgttactgaagaagacaagaggattcttcgtgacattgagactttctacaatactacagtggaggagatgcccatgaatgtggctgaccttatttaattcctgggatgagagttttggatgcagtgctcgctgttgctgaataggcgatcacaacgtgcattgtgcttctttctttgggaatatttgaatcttgtctcaatgctcataacggatcagaaatacagattttgatagcaaagcgacgttagtcgtgagctcttgtgaggaaagtcattggctttatcctctttagagttagactgttggggtgggtataaaagatggggtctgtaaaatctttctttcttagaaatttatttcctagttctgtagaaatggttgtattagatgttctctatcatttaataatatacttgtggactaaaagatataagtgctgtataaaatcagccaattatgttaaactagcatatctgcctttattgtgtttgtcattagcctgagtagaaaggcctttaaaatttttttagaaagcatttgaatgcattttgtttggtattgtatttattcaataaagtatttaattagtgct

SEQ ID NO: 4347 - protein, 32 aa, Homo sapiens
MSGGSADYNREHGGPEGMDPDGVIEVRNGCGS

SEQ ID NO: 4348 - DNA, 4125 bp, Homo sapiens
cttttcagtcgggcgctgagtggtttttcggatcatgtctggtggctccgcggattataacagagaacatggcggcccagagggaatggaccccgatggtgtcatcgagagcaactggaatgagattgttgataactttgatgatatgaatttaaaggagtctctccttcgtggcatctatgcttacggttttgagaagccttccgctattcagcagagagctattattccctgtattaaagatccaaaaggtaattctggcacttggagactatatgggagccacttgtcatgcctgcattggtggaacaaatgttcgaaatgaaatgcaaaaactgcaggctgaagcaccacatattgttgttggtacacccgggagagtgtttgatatgttaaacagaagatacctttgtaagtattgtctttaagagagtattttttttaaaactgttaacatagttgaaaagtcaaattgtatcactgagtagatctagaaatgacagtatgactttgtttctaacagctccaaaatggatcaaaatgtttgttttggatgaagcagatgaaatgttgagccgtggttttaaggatcaaatctatgagattttccaaaaactaaacacaagtattcaggtaagcattacttcacccccctcttaaaggtagagatggggtttatttaatgcaggtactgttacaatacaactgatgtgttttgttgtcgttccccctgcttaaagcacttgatgcataactctgtctaccttcattccgtagtaagacagagacgcttggcttcagacattttcctttgggtattaatgtgtaagttgtgctacaacataattttctctttttaaggttgtgttgctttctgccacaatgccaactgatgtgttggaagtgaccaaaaaattcatgagagatccaattcgaattctggtgaaaaaggaagaattgacccttgaaggaatcaaacagttttatattaatgttgagagagaggtaactgtctgattgttagacattattttaccttcttgtataagcactgtgctaaaattgcagacactaggaccatgtcttggtttttgcaataatgctagcagagtacacacaagaagaaaagtaacagcactagattgtaaagactggggtggacctctttcttaatgtccaatgtcctttgtcttaagatttggtgcaatatctcattagacctaacagaatgaagttaatttttataatttctacgttttgagactgggttatgagactggctaagactggccaattttggtattttgggtagagacagtttcactttcttgaaaccctggtctggttggaactctgggctctaagtgctaggatcccaaagggctgggattacaggcattagcactgtggctggcccagaatgaatttttaactgaagagttggaaaaactaaatgactgttaactttaacttctaaacattacaggaatggaagttggatacactttgtgacttgtacgagacactgaccattacacaggctgttatttttctcaatacgaggcgcaaggtggactggctgactgagaagatgcatgccagagacttcacagtttctgctctggtaagaggtgttctaaaatgtctggatttccactaaagcaggattcagactacaatatagctgctaagtgctgtgttgtcgttccccctgcttaaaataaagttgtttcttaactatacctgtctgctattctcctgtagcagccagggacgcttggtctcatacatgttgattaaaattaaataccgacctgactggtgattcttgaattaaggtttattaatttgcagcatggtgacatggaccagaaggagagagatgttatcatgagggaattccggtcagggtcaagtcgtgttctgatcactactgacttgttggtaagtctcttaatgctttttaaaaatctaccaaaagttagctttttggggggcaggtttttaagtaacctttgccaacttgggctatttggaagagtaaaagaccacactccacagtgggctataccacttagtatagttcgctactattttgtggcctacatgacaggtgtcaagtttttttgaatcaatttttaaaacatgccattgtgtttcaggctcgcgggattgatgtgcaacaagtgtctttggttataaattatgatctacctaccaatcgtgaaaactatattcacaggtgagaagccagcatcttggctgtattgaaaaaaattcatacgtttttctactgtgatttgtatgaaaggtaacatcaaatcaaggaatagattcagtaaagtcagtagtgttcagtaagatgatgtaattaaatttgtactagggaaggttgatgagaacaaagtgggaaaacttgtaaacattgcccagattgtggacatagggtttttttccacaattgttggtcttaccttatgcttgagcttttagtgatgttcttgtgtccatgtgtttttcttggtgattttttctatagttgggattttcttggtgtcgcctggtagcaatttgagtgaaccctggtttagttatagtggctttatccctaaataaattgaattgtactttgttatatgatgtaaaaaaagactttttaaaaaatacaggagtcgatagcagcagttggtgacgagatggcactcagaaacggcgttgacgtaatttaggacgtggaatcataagcgaaacagcacactgtttgaataaagagcgagtcggtatttatatttgtttttcttttgtcatgattatttgatttttaagttgctccagctaaggcatttttttgtattagtatttctattagggaacctttcttattaggtggtttgtattgtctggtttctaacatgcaggtagctgtttggcagttaaacacgtttagagtaatttgagttacaacgtgtgaaactgagcaaaaaagcagtgataagtttgggttaccataccaaatatttgttttcccactggaaaaaagtaagttttagaaaatagttaacctttgcagcatttgtttacagtttacagttccagaagtgcgtcgaaatggattacataactgctcttttattcctggtgttcacatctgtcccaggctgacacctgctcttggctggcccactttggtatgggctttaatttcactaccccaaacacgatactgtcatctgctttataataatgctcaagatgcctgataaaaatctcattttgcagccagacaagccttgaatccttttggcactaactgcaaaggaagatttttttctctagatatgcattagcagctagtgctccagttagaagcacgaactataaccttgataagtaaacagcagctggtggttaacaagtggatcgtcatgttcagtagtttatacattatgtgagaagtaacgttctgattctttttcttacacagaattggcagagggggtcgatttgggaggaaaggtgtggctataaactttgttactgaagaagacaagaggattcttcgtgacattgagactttctacaatactacagtggaggagatgcccatgaatgtggctgaccttatttaattcctgggatgagagttttggatgcagtgctcgctgttgctgaataggcgatcacaacgtgcattgtgcttctttctttgggaatatttgaatcttgtctcaatgctcataacggatcagaaatacagattttgatagcaaagcgacgttagtcgtgagctcttgtgaggaaagtcattggctttatcctctttagagttagactgttggggtgggtataaaagatggggtctgtaaaatctttctttcttagaaatttatttcctagttctgtagaaatggttgtattagatgttctctatcatttaataatatacttgtggactaaaagatataagtgctgtataaaatcagccaattatgttaaactagcatatctgcctttattgtgtttgtcattagcctgagtagaaaggcctttaaaatttttttagaaagcatttgaatgcattttgtttggtattgtatttattcaataaagtatttaattagtgct

SEQ ID NO: 4349 - protein, 96 aa, Homo sapiens
MSGGSADYNREHGGPEGMDPDGVIESNWNEIVDNFDDMNLKESLLRGIYAYGFEKPSAIQQRAIIPCIKDPKGNSGTWRLYGSHLSCLHWWNKCSK

SEQ ID NO: 4350 - DNA, 4260 bp, Homo sapiens
cttttcagtcgggcgctgagtggtttttcggatcatgtctggtggctccgcggattataacagagaacatggcggcccagagggaatggaccccgatggtgtcatcgagagcaactggaatgagattgttgataactttgatgatatgaatttaaaggagtctctccttcgtggcatctatgcttacggttttgagaagccttccgctattcagcagagagctattattccctgtattaaagatccaaaaggtaattctggcacttggagactatatgggagccacttgtcatgcctgcattggtggaacaaatgttcgaaatgaaatgcaaaaactgcaggctgaagcaccacatattgttgttggtacacccgggagagtgtttgatatgttaaacagaagatacctttgtaagtattgtctttaagagagtattttttttaaaactgttaacatagttgaaaagtcaaattgtatcactgagtagatctagaaatgacagtatgactttgtttctaacagctccaaaatggatcaaaatgtttgttttggatgaagcagatgaaatgttgagccgtggttttaaggatcaaatctatgagattttccaaaaactaaacacaagtattcaggtaagcattacttcacccccctcttaaaggtagagatggggtttatttaatgcaggtactgttacaatacaactgatgtgttttgttgtcgttccccctgcttaaagcacttgatgcataactctgtctaccttcattccgtagtaagacagagacgcttggcttcagacattttcctttgggtattaatgtgtaagttgtgctacaacataattttctctttttaaggttgtgttgctttctgccacaatgccaactgatgtgttggaagtgaccaaaaaattcatgagagatccaattcgaattctggtgaaaaaggaagaattgacccttgaaggaatcaaacagttttatattaatgttgagagagaggtaactgtctgattgttagacattattttaccttcttgtataagcactgtgctaaaattgcagacactaggaccatgtcttggtttttgcaataatgctagcagagtacacacaagaagaaaagtaacagcactagattgtaaagactggggtggacctctttcttaatgtccaatgtcctttgtcttaagatttggtgcaatatctcattagacctaacagaatgaagttaatttttataatttctacgttttgagactgggttatgagactggctaagactggccaattttggtattttgggtagagacagtttcactttcttgaaaccctggtctggttggaactctgggctctaagtgctaggatcccaaagggctgggattacaggcattagcactgtggctggcccagaatgaatttttaactgaagagttggaaaaactaaatgactgttaactttaacttctaaacattacaggaatggaagttggatacactttgtgacttgtacgagacactgaccattacacaggctgttatttttctcaatacgaggcgcaaggtggactggctgactgagaagatgcatgccagagacttcacagtttctgctctggtaagaggtgttctaaaatgtctggatttccactaaagcaggattcagactacaatatagctgctaagtgctgtgttgtcgttccccctgcttaaaataaagttgtttcttaactatacctgtctgctattctcctgtagcagccagggacgcttggtctcatacatgttgattaaaattaaataccgacctgactggtgattcttgaattaaggtttattaatttgcagcatggtgacatggaccagaaggagagagatgttatcatgagggaattccggtcagggtcaagtcgtgttctgatcactactgacttgttggtaagtctcttaatgctttttaaaaatctaccaaaagttagctttttggggggcaggtttttaagtaacctttgccaacttgggctatttggaagagtaaaagaccacactccacagtgggctataccacttagtatagttcgctactattttgtggcctacatgacaggtgtcaagtttttttgaatcaatttttaaaacatgccattgtgtttcaggctcgcgggattgatgtgcaacaagtgtctttggttataaattatgatctacctaccaatcgtgaaaactatattcacaggtgagaagccagcatcttggctgtattgaaaaaaattcatacgtttttctactgtgatttgtatgaaaggtaacatcaaatcaaggaatagattcagtaaagtcagtagtgttcagtaagatgatgtaattaaatttgtactagggaaggttgatgagaacaaagtgggaaaacttgtaaacattgcccagattgtggacatagggtttttttccacaattgttggtcttaccttatgcttgagcttttagtgatgttcttgtgtccatgtgtttttcttggtgattttttctatagttgggattttcttggtgtcgcctggtagcaatttgagtgaaccctggtttagttatagtggctttatccctaaataaattgaattgtactttgttatatgatgtaaaaaaagactttttaaaaaatacaggagtcgatagcagcagttggtgacgagatggcactcagaaacggcgttgacgtaatttaggacgtggaatcataagcgaaacagcacactgtttgaataaagagcgagtcggtatttatatttgtttttcttttgtcatgattatttgatttttaagttgctccagctaaggcatttttttgtattagtatttctattagggaacctttcttattaggtggtttgtattgtctggtttctaacatgcaggtagctgtttggcagttaaacacgtttagagtaatttgagttacaacgtgtgaaactgagcaaaaaagcagtgataagtttgggttaccataccaaatatttgttttcccactggaaaaaagtaagttttagaaaatagttaacctttgcagcatttgtttacagtttacagttccagaagtgcgtcgaaatggattacataactgctcttttattcctggtgttcacatctgtcccaggctgacacctgctcttggctggcccactttggtatgggctttaatttcactaccccaaacacgatactgtcatctgctttataataatgctcaagatgcctgataaaaatctcattttgcagccagacaagccttgaatccttttggcactaactgcaaaggaagatttttttctctagatatgcattagcagctagtgctccagttagaagcacgaactataaccttgataagtaaacagcagctggtggttaacaagtggatcgtcatgttcagtagtttatacattatgtgagaagtaacgttctgattctttttcttacacagaattggcagagggggtcgatttgggaggaaaggtgtggctataaactttgttactgaagaagacaagaggattcttcgtgacattgagactttctacaatactacagtggaggagatgcccatgaatgtggctgaccttatttaattcctgggatgagagttttggatgcagtgctcgctgttgctgaataggcgatcacaacgtgcattgtgcttctttctttgggaatatttgaatcttgtctcaatgctcataacggatcagaaatacagattttgatagcaaagcgacgttagtcgtgagctcttgtgaggaaagtcattggctttatcctctttagagttagactgttggggtgggtataaaagatggggtctgtaaaatctttctttcttagaaatttatttcctagttctgtagaaatggttgtattagatgttctctatcatttaataatatacttgtggactaaaagatataagtgctgtataaaatcagccaattatgttaaactagcatatctgcctttattgtgtttgtcattagcctgagtagaaaggcctttaaaatttttttagaaagcatttgaatgcattttgtttggtattgtatttattcaataaagtatttaattagtgctaagtgtgaactggaccctgttgctaagccccagcaagcaatcctaggtagggtttaatccccagtaaaattgccatattgcacatgtcttaatgaagtttgaatgttaaataaattgtatattcactttaaaggt

SEQ ID NO: 4351 - protein, 96 aa, Homo sapiens; identical to SEQ ID NO: 4349

SEQ ID NO: 4352 - DNA, 5181 bp, Homo sapiens
cttttcagtcgggcgctgagtggtttttcggatcatgtctggtggctccgcggattataacagagaacatggcggcccagagggaatggaccccgatggtgtcatcgagagcaactggaatgagattgttgataactttgatgatatgaatttaaaggagtctctccttcgtggcatctatgcttacggttttgagaagccttccgctattcagcagagagctattattccctgtattaaagggtatgatgtgattgctcaagctcagtcaggtactggcaagacagccacatttgctatttccatcctgcaacagttggagattgagttcaaggagacccaagcactagtattggcccccaccagagaactggctcaacaggtattgatagtgtagttcaaaaaaactgcttgcgtgttgcataggtttcaggtttcacaactgtgaagaatttaaaacttagtataaattggtcctaccagatccctccttttaattgtccatgcatgcagggagtttttgttgaaagttttaaaagaactgggtatgcaggtatggtttgtagggttgtatactaatagattgagaatccgaagcgctctcttggatgtactagatctgtccccattttttaagtttgaatgcagttgtgcaacatgaaaactgcagtgacatgttaccatttgactgtctccgtagttcgtgatgcatctgttgcatgctatgttttcaaagctcactgctatattggctttgaagtaaaccttcctaataaagctgtaggctttattgaggtcaggattatataaggcacaataccctctgggggaaaaaaatcatttgccctagctgtaattacagaacataaatttcactacgtactccctacctacagtgaagaataatgtaggaaacgttattcttggattgtctagctgatgcgtggagcagcagcatcccaagtttgacaaggcataagaaagacattaagggaattttaccttgcagcagttaggtcgtctgcattttaagcttggaagtagttttgtgctgtgcatgcataaaagctgttggcagaccagattatatttgcctttatgctttaaaaattagtcattgatcctggagttctgcggaataataattaaggcttgggttttagatccaaaaggtaattctggcacttggagactatatgggagccacttgtcatgcctgcattggtggaacaaatgttcgaaatgaaatgcaaaaactgcaggctgaagcaccacatattgttgttggtacacccgggagagtgtttgatatgttaaacagaagatacctttgtaagtattgtctttaagagagtattttttttaaaactgttaacatagttgaaaagtcaaattgtatcactgagtagatctagaaatgacagtatgactttgtttctaacagctccaaaatggatcaaaatgtttgttttggatgaagcagatgaaatgttgagccgtggttttaaggatcaaatctatgagattttccaaaaactaaacacaagtattcaggtaagcattacttcacccccctcttaaaggtagagatggggtttatttaatgcaggtactgttacaatacaactgatgtgttttgttgtcgttccccctgcttaaagcacttgatgcataactctgtctaccttcattccgtagtaagacagagacgcttggcttcagacattttcctttgggtattaatgtgtaagttgtgctacaacataattttctctttttaaggttgtgttgctttctgccacaatgccaactgatgtgttggaagtgaccaaaaaattcatgagagatccaattcgaattctggtgaaaaaggaagaattgacccttgaaggaatcaaacagttttatattaatgttgagagagaggtaactgtctgattgttagacattattttaccttcttgtataagcactgtgctaaaattgcagacactaggaccatgtcttggtttttgcaataatgctagcagagtacacacaagaagaaaagtaacagcactagattgtaaagactggggtggacctctttcttaatgtccaatgtcctttgtcttaagatttggtgcaatatctcattagacctaacagaatgaagttaatttttataatttctacgttttgagactgggttatgagactggctaagactggccaattttggtattttgggtagagacagtttcactttcttgaaaccctggtctggttggaactctgggctctaagtgctaggatcccaaagggctgggattacaggcattagcactgtggctggcccagaatgaatttttaactgaagagttggaaaaactaaatgactgttaactttaacttctaaacattacaggaatggaagttggatacactttgtgacttgtacgagacactgaccattacacaggctgttatttttctcaatacgaggcgcaaggtggactggctgactgagaagatgcatgccagagacttcacagtttctgctctggtaagaggtgttctaaaatgtctggatttccactaaagcaggattcagactacaatatagctgctaagtgctgtgttgtcgttccccctgcttaaaataaagttgtttcttaactatacctgtctgctattctcctgtagcagccagggacgcttggtctcatacatgttgattaaaattaaataccgacctgactggtgattcttgaattaaggtttattaatttgcagcatggtgacatggaccagaaggagagagatgttatcatgagggaattccggtcagggtcaagtcgtgttctgatcactactgacttgttggtaagtctcttaatgctttttaaaaatctaccaaaagttagctttttggggggcaggtttttaagtaacctttgccaacttgggctatttggaagagtaaaagaccacactccacagtgggctataccacttagtatagttcgctactattttgtggcctacatgacaggtgtcaagtttttttgaatcaatttttaaaacatgccattgtgtttcaggctcgcgggattgatgtgcaacaagtgtctttggttataaattatgatctacctaccaatcgtgaaaactatattcacaggtgagaagccagcatcttggctgtattgaaaaaaattcatacgtttttctactgtgatttgtatgaaaggtaacatcaaatcaaggaatagattcagtaaagtcagtagtgttcagtaagatgatgtaattaaatttgtactagggaaggttgatgagaacaaagtgggaaaacttgtaaacattgcccagattgtggacatagggtttttttccacaattgttggtcttaccttatgcttgagcttttagtgatgttcttgtgtccatgtgtttttcttggtgattttttctatagttgggattttcttggtgtcgcctggtagcaatttgagtgaaccctggtttagttatagtggctttatccctaaataaattgaattgtactttgttatatgatgtaaaaaaagactttttaaaaaatacaggagtcgatagcagcagttggtgacgagatggcactcagaaacggcgttgacgtaatttaggacgtggaatcataagcgaaacagcacactgtttgaataaagagcgagtcggtatttatatttgtttttcttttgtcatgattatttgatttttaagttgctccagctaaggcatttttttgtattagtatttctattagggaacctttcttattaggtggtttgtattgtctggtttctaacatgcaggtagctgtttggcagttaaacacgtttagagtaatttgagttacaacgtgtgaaactgagcaaaaaagcagtgataagtttgggttaccataccaaatatttgttttcccactggaaaaaagtaagttttagaaaatagttaacctttgcagcatttgtttacagtttacagttccagaagtgcgtcgaaatggattacataactgctcttttattcctggtgttcacatctgtcccaggctgacacctgctcttggctggcccactttggtatgggctttaatttcactaccccaaacacgatactgtcatctgctttataataatgctcaagatgcctgataaaaatctcattttgcagccagacaagccttgaatccttttggcactaactgcaaaggaagatttttttctctagatatgcattagcagctagtgctccagttagaagcacgaactataaccttgataagtaaacagcagctggtggttaacaagtggatcgtcatgttcagtagtttatacattatgtgagaagtaacgttctgattctttttcttacacagaattggcagagggggtcgatttgggaggaaaggtgtggctataaactttgttactgaagaagacaagaggattcttcgtgacattgagactttctacaatactacagtggaggagatgcccatgaatgtggctgaccttatttaattcctgggatgagagttttggatgcagtgctcgctgttgctgaataggcgatcacaacgtgcattgtgcttctttctttgggaatatttgaatcttgtctcaatgctcataacggatcagaaatacagattttgatagcaaagcgacgttagtcgtgagctcttgtgaggaaagtcattggctttatcctctttagagttagactgttggggtgggtataaaagatggggtctgtaaaatctttctttcttagaaatttatttcctagttctgtagaaatggttgtattagatgttctctatcatttaataatatacttgtggactaaaagatataagtgctgtataaaatcagccaattatgttaaactagcatatctgcctttattgtgtttgtcattagcctgagtagaaaggcctttaaaatttttttagaaagcatttgaatgcattttgtttggtattgtatttattcaataaagtatttaattagtgctaagtgtgaactggaccctgttgctaagccccagcaagcaatcctaggtagggtttaatccccagtaaaattgccatattgcacatgtcttaatgaagtttgaatgttaaataaattgtatattcactttaaaggt

SEQ ID NO: 4353 - protein, 120 aa, Homo sapiens; identical to SEQ ID NO: 4345

SEQ ID NO: 4354 - DNA, 5532 bp, Homo sapiens
cttttcagtcgggcgctgagtggtttttcggatcatgtctggtggctccgcggattataacagagaacatggcggcccagagggaatggaccccgatggtgtcatcgaggtaagaaacggttgtggatcttgaagctttggaaaggtgagtgtgttcatctcatttatgcgtgcattattttttctaacttacagagcaactggaatgagattgttgataactttgatgatatgaatttaaaggagtctctccttcgtggcatctatgcttacggttttgagaagccttccgctattcagcagagagctattattccctgtattaaaggtaaaagaaactggcatttttaggaaattgttctacatagacatgaaccataaaagggaaagtaacctctgggggactagcacctgtttgtattccttaaagtgaaatgatggcaatcatctttcgggactgacctgaaatgaagagaatactcattgctgatcacttgattatttgggcataatgttccaaatggaatacatggtgtgaagtagaagtgacaatttgatgtgggatcggtaaatgtgtatcctactttttttagggtatgatgtgattgctcaagctcagtcaggtactggcaagacagccacatttgctatttccatcctgcaacagttggagattgagttcaaggagacccaagcactagtattggcccccaccagagaactggctcaacaggtattgatagtgtagttcaaaaaaactgcttgcgtgttgcataggtttcaggtttcacaactgtgaagaatttaaaacttagtataaattggtcctaccagatccctccttttaattgtccatgcatgcagggagtttttgttgaaagttttaaaagaactgggtatgcaggtatggtttgtagggttgtatactaatagattgagaatccgaagcgctctcttggatgtactagatctgtccccattttttaagtttgaatgcagttgtgcaacatgaaaactgcagtgacatgttaccatttgactgtctccgtagttcgtgatgcatctgttgcatgctatgttttcaaagctcactgctatattggctttgaagtaaaccttcctaataaagctgtaggctttattgaggtcaggattatataaggcacaataccctctgggggaaaaaaatcatttgccctagctgtaattacagaacataaatttcactacgtactccctacctacagtgaagaataatgtaggaaacgttattcttggattgtctagctgatgcgtggagcagcagcatcccaagtttgacaaggcataagaaagacattaagggaattttaccttgcagcagttaggtcgtctgcattttaagcttggaagtagttttgtgctgtgcatgcataaaagctgttggcagaccagattatatttgcctttatgctttaaaaattagtcattgatcctggagttctgcggaataataattaaggcttgggttttagatccaaaaggtaattctggcacttggagactatatgggagccacttgtcatgcctgcattggtggaacaaatgttcgaaatgaaatgcaaaaactgcaggctgaagcaccacatattgttgttggtacacccgggagagtgtttgatatgttaaacagaagatacctttgtaagtattgtctttaagagagtattttttttaaaactgttaacatagttgaaaagtcaaattgtatcactgagtagatctagaaatgacagtatgactttgtttctaacagctccaaaatggatcaaaatgtttgttttggatgaagcagatgaaatgttgagccgtggttttaaggatcaaatctatgagattttccaaaaactaaacacaagtattcaggtaagcattacttcacccccctcttaaaggtagagatggggtttatttaatgcaggtactgttacaatacaactgatgtgttttgttgtcgttccccctgcttaaagcacttgatgcataactctgtctaccttcattccgtagtaagacagagacgcttggcttcagacattttcctttgggtattaatgtgtaagttgtgctacaacataattttctctttttaaggttgtgttgctttctgccacaatgccaactgatgtgttggaagtgaccaaaaaattcatgagagatccaattcgaattctggtgaaaaaggaagaattgacccttgaaggaatcaaacagttttatattaatgttgagagagaggtaactgtctgattgttagacattattttaccttcttgtataagcactgtgctaaaattgcagacactaggaccatgtcttggtttttgcaataatgctagcagagtacacacaagaagaaaagtaacagcactagattgtaaagactggggtggacctctttcttaatgtccaatgtcctttgtcttaagatttggtgcaatatctcattagacctaacagaatgaagttaatttttataatttctacgttttgagactgggttatgagactggctaagactggccaattttggtattttgggtagagacagtttcactttcttgaaaccctggtctggttggaactctgggctctaagtgctaggatcccaaagggctgggattacaggcattagcactgtggctggcccagaatgaatttttaactgaagagttggaaaaactaaatgactgttaactttaacttctaaacattacaggaatggaagttggatacactttgtgacttgtacgagacactgaccattacacaggctgttatttttctcaatacgaggcgcaaggtggactggctgactgagaagatgcatgccagagacttcacagtttctgctctggtaagaggtgttctaaaatgtctggatttccactaaagcaggattcagactacaatatagctgctaagtgctgtgttgtcgttccccctgcttaaaataaagttgtttcttaactatacctgtctgctattctcctgtagcagccagggacgcttggtctcatacatgttgattaaaattaaataccgacctgactggtgattcttgaattaaggtttattaatttgcagcatggtgacatggaccagaaggagagagatgttatcatgagggaattccggtcagggtcaagtcgtgttctgatcactactgacttgttggtaagtctcttaatgctttttaaaaatctaccaaaagttagctttttggggggcaggtttttaagtaacctttgccaacttgggctatttggaagagtaaaagaccacactccacagtgggctataccacttagtatagttcgctactattttgtggcctacatgacaggtgtcaagtttttttgaatcaatttttaaaacatgccattgtgtttcaggctcgcgggattgatgtgcaacaagtgtctttggttataaattatgatctacctaccaatcgtgaaaactatattcacaggtgagaagccagcatcttggctgtattgaaaaaaattcatacgtttttctactgtgatttgtatgaaaggtaacatcaaatcaaggaatagattcagtaaagtcagtagtgttcagtaagatgatgtaattaaatttgtactagggaaggttgatgagaacaaagtgggaaaacttgtaaacattgcccagattgtggacatagggtttttttccacaattgttggtcttaccttatgcttgagcttttagtgatgttcttgtgtccatgtgtttttcttggtgattttttctatagttgggattttcttggtgtcgcctggtagcaatttgagtgaaccctggtttagttatagtggctttatccctaaataaattgaattgtactttgttatatgatgtaaaaaaagactttttaaaaaatacaggagtcgatagcagcagttggtgacgagatggcactcagaaacggcgttgacgtaatttaggacgtggaatcataagcgaaacagcacactgtttgaataaagagcgagtcggtatttatatttgtttttcttttgtcatgattatttgatttttaagttgctccagctaaggcatttttttgtattagtatttctattagggaacctttcttattaggtggtttgtattgtctggtttctaacatgcaggtagctgtttggcagttaaacacgtttagagtaatttgagttacaacgtgtgaaactgagcaaaaaagcagtgataagtttgggttaccataccaaatatttgttttcccactggaaaaaagtaagttttagaaaatagttaacctttgcagcatttgtttacagtttacagttccagaagtgcgtcgaaatggattacataactgctcttttattcctggtgttcacatctgtcccaggctgacacctgctcttggctggcccactttggtatgggctttaatttcactaccccaaacacgatactgtcatctgctttataataatgctcaagatgcctgataaaaatctcattttgcagccagacaagccttgaatccttttggcactaactgcaaaggaagatttttttctctagatatgcattagcagctagtgctccagttagaagcacgaactataaccttgataagtaaacagcagctggtggttaacaagtggatcgtcatgttcagtagtttatacattatgtgagaagtaacgttctgattctttttcttacacagaattggcagagggggtcgatttgggaggaaaggtgtggctataaactttgttactgaagaagacaagaggattcttcgtgacattgagactttctacaatactacagtggaggagatgcccatgaatgtggctgaccttatttaattcctgggatgagagttttggatgcagtgctcgctgttgctgaataggcgatcacaacgtgcattgtgcttctttctttgggaatatttgaatcttgtctcaatgctcataacggatcagaaatacagattttgatagcaaagcgacgttagtcgtgagctcttgtgaggaaagtcattggctttatcctctttagagttagactgttggggtgggtataaaagatggggtctgtaaaatctttctttcttagaaatttatttcctagttctgtagaaatggttgtattagatgttctctatcatttaataatatacttgtggactaaaagatataagtgctgtataaaatcagccaattatgttaaactagcatatctgcctttattgtgtttgtcattagcctgagtagaaaggcctttaaaatttttttagaaagcatttgaatgcattttgtttggtattgtatttattcaataaagtatttaattagtgctaagtgtgaactggaccctgttgctaagccccagcaagcaatcctaggtagggtttaatccccagtaaaattgccatattgcacatgtcttaatgaagtttgaatgttaaataaattgtatattcactttaaaggt

SEQ ID NO: 4355 - protein, 32 aa, Homo sapiens; identical to SEQ ID NO: 4347

SEQ ID NO: 4356 - DNA, 6005 bp, Homo sapiens
cttttcagtcgggcgctgagtggtttttcggatcatgtctggtggctccgcggattataacagagaacatggcggcccagagggaatggaccccgatggtgtcatcgaggtaagaaacggttgtggatcttgaagctttggaaaggtgagtgtgttcatctcatttatgcgtgcattattttttctaacttacagagcaactggaatgagattgttgataactttgatgatatgaatttaaaggagtctctccttcgtggcatctatgcttacggttttgagaagccttccgctattcagcagagagctattattccctgtattaaaggtaaaagaaactggcatttttaggaaattgttctacatagacatgaaccataaaagggaaagtaacctctgggggactagcacctgtttgtattccttaaagtgaaatgatggcaatcatctttcgggactgacctgaaatgaagagaatactcattgctgatcacttgattatttgggcataatgttccaaatggaatacatggtgtgaagtagaagtgacaatttgatgtgggatcggtaaatgtgtatcctactttttttagggtatgatgtgattgctcaagctcagtcaggtactggcaagacagccacatttgctatttccatcctgcaacagttggagattgagttcaaggagacccaagcactagtattggcccccaccagagaactggctcaacaggtattgatagtgtagttcaaaaaaactgcttgcgtgttgcataggtttcaggtttcacaactgtgaagaatttaaaacttagtataaattggtcctaccagatccctccttttaattgtccatgcatgcagggagtttttgttgaaagttttaaaagaactgggtatgcaggtatggtttgtagggttgtatactaatagattgagaatccgaagcgctctcttggatgtactagatctgtccccattttttaagtttgaatgcagttgtgcaacatgaaaactgcagtgacatgttaccatttgactgtctccgtagttcgtgatgcatctgttgcatgctatgttttcaaagctcactgctatattggctttgaagtaaaccttcctaataaagctgtaggctttattgaggtcaggattatataaggcacaataccctctgggggaaaaaaatcatttgccctagctgtaattacagaacataaatttcactacgtactccctacctacagtgaagaataatgtaggaaacgttattcttggattgtctagctgatgcgtggagcagcagcatcccaagtttgacaaggcataagaaagacattaagggaattttaccttgcagcagttaggtcgtctgcattttaagcttggaagtagttttgtgctgtgcatgcataaaagctgttggcagaccagattatatttgcctttatgctttaaaaattagtcattgatcctggagttctgcggaataataattaaggcttgggttttagatccaaaaggtaattctggcacttggagactatatgggagccacttgtcatgcctgcattggtggaacaaatgttcgaaatgaaatgcaaaaactgcaggctgaagcaccacatattgttgttggtacacccgggagagtgtttgatatgttaaacagaagatacctttgtaagtattgtctttaagagagtattttttttaaaactgttaacatagttgaaaagtcaaattgtatcactgagtagatctagaaatgacagtatgactttgtttctaacagctccaaaatggatcaaaatgtttgttttggatgaagcagatgaaatgttgagccgtggttttaaggatcaaatctatgagattttccaaaaactaaacacaagtattcaggtaagcattacttcacccccctcttaaaggtagagatggggtttatttaatgcaggtactgttacaatacaactgatgtgttttgttgtcgttccccctgcttaaagcacttgatgcataactctgtctaccttcattccgtagtaagacagagacgcttggcttcagacattttcctttgggtattaatgtgtaagttgtgctacaacataattttctctttttaaggttgtgttgctttctgccacaatgccaactgatgtgttggaagtgaccaaaaaattcatgagagatccaattcgaattctggtgaaaaaggaagaattgacccttgaaggaatcaaacagttttatattaatgttgagagagaggtaactgtctgattgttagacattattttaccttcttgtataagcactgtgctaaaattgcagacactaggaccatgtcttggtttttgcaataatgctagcagagtacacacaagaagaaaagtaacagcactagattgtaaagactggggtggacctctttcttaatgtccaatgtcctttgtcttaagatttggtgcaatatctcattagacctaacagaatgaagttaatttttataatttctacgttttgagactgggttatgagactggctaagactggccaattttggtattttgggtagagacagtttcactttcttgaaaccctggtctggttggaactctgggctctaagtgctaggatcccaaagggctgggattacaggcattagcactgtggctggcccagaatgaatttttaactgaagagttggaaaaactaaatgactgttaactttaacttctaaacattacaggaatggaagttggatacactttgtgacttgtacgagacactgaccattacacaggctgttatttttctcaatacgaggcgcaaggtggactggctgactgagaagatgcatgccagagacttcacagtttctgctctggtaagaggtgttctaaaatgtctggatttccactaaagcaggattcagactacaatatagctgctaagtgctgtgttgtcgttccccctgcttaaaataaagttgtttcttaactatacctgtctgctattctcctgtagcagccagggacgcttggtctcatacatgttgattaaaattaaataccgacctgactggtgattcttgaattaaggtttattaatttgcagcatggtgacatggaccagaaggagagagatgttatcatgagggaattccggtcagggtcaagtcgtgttctgatcactactgacttgttggtaagtctcttaatgctttttaaaaatctaccaaaagttagctttttggggggcaggtttttaagtaacctttgccaacttgggctatttggaagagtaaaagaccacactccacagtgggctataccacttagtatagttcgctactattttgtggcctacatgacaggtgtcaagtttttttgaatcaatttttaaaacatgccattgtgtttcaggctcgcgggattgatgtgcaacaagtgtctttggttataaattatgatctacctaccaatcgtgaaaactatattcacaggtgagaagccagcatcttggctgtattgaaaaaaattcatacgtttttctactgtgatttgtatgaaaggtaacatcaaatcaaggaatagattcagtaaagtcagtagtgttcagtaagatgatgtaattaaatttgtactagggaaggttgatgagaacaaagtgggaaaacttgtaaacattgcccagattgtggacatagggtttttttccacaattgttggtcttaccttatgcttgagcttttagtgatgttcttgtgtccatgtgtttttcttggtgattttttctatagttgggattttcttggtgtcgcctggtagcaatttgagtgaaccctggtttagttatagtggctttatccctaaataaattgaattgtactttgttatatgatgtaaaaaaagactttttaaaaaatacaggagtcgatagcagcagttggtgacgagatggcactcagaaacggcgttgacgtaatttaggacgtggaatcataagcgaaacagcacactgtttgaataaagagcgagtcggtatttatatttgtttttcttttgtcatgattatttgatttttaagttgctccagctaaggcatttttttgtattagtatttctattagggaacctttcttattaggtggtttgtattgtctggtttctaacatgcaggtagctgtttggcagttaaacacgtttagagtaatttgagttacaacgtgtgaaactgagcaaaaaagcagtgataagtttgggttaccataccaaatatttgttttcccactggaaaaaagtaagttttagaaaatagttaacctttgcagcatttgtttacagtttacagttccagaagtgcgtcgaaatggattacataactgctcttttattcctggtgttcacatctgtcccaggctgacacctgctcttggctggcccactttggtatgggctttaatttcactaccccaaacacgatactgtcatctgctttataataatgctcaagatgcctgataaaaatctcattttgcagccagacaagccttgaatccttttggcactaactgcaaaggaagatttttttctctagatatgcattagcagctagtgctccagttagaagcacgaactataaccttgataagtaaacagcagctggtggttaacaagtggatcgtcatgttcagtagtttatacattatgtgagaagtaacgttctgattctttttcttacacagaattggcagagggggtcgatttgggaggaaaggtgtggctataaactttgttactgaagaagacaagaggattcttcgtgacattgagactttctacaatactacagtggaggagatgcccatgaatgtggctgaccttatttaattcctgggatgagagttttggatgcagtgctcgctgttgctgaataggcgatcacaacgtgcattgtgcttctttctttgggaatatttgaatcttgtctcaatgctcataacggatcagaaatacagattttgatagcaaagcgacgttagtcgtgagctcttgtgaggaaagtcattggctttatcctctttagagttagactgttggggtgggtataaaagatggggtctgtaaaatctttctttcttagaaatttatttcctagttctgtagaaatggttgtattagatgttctctatcatttaataatatacttgtggactaaaagatataagtgctgtataaaatcagccaattatgttaaactagcatatctgcctttattgtgtttgtcattagcctgagtagaaaggcctttaaaatttttttagaaagcatttgaatgcattttgtttggtattgtatttattcaataaagtatttaattagtgctaagtgtgaactggaccctgttgctaagccccagcaagcaatcctaggtagggtttaatccccagtaaaattgccatattgcacatgtcttaatgaagtttgaatgttaaataaattgtatattcactttaaaggtgcttttggtcattttatttttattacaacttcattatttacaaaaccccccatccagatatattcacgttaacaattctgagataactgctgcatcacagttgcacaaaggctgatgagttgcaaatgttcatcagcaccatctgctaggcatttgtcaacttcctacgagaaaaatttaagaaattagcatccttcaggtagttaaatgttccattgacatgtgcaaagtacctacttacggcaagtttttctgtgataatagacttctgtttatcagataagttattttctacaaccacatcatggagttgattgacgagctgagttgctgcatgaccctcatctattaaatcctataataaaaaaaacttttggtatgatgacttaatattcctttccccaaagttagtaagctgactttaccttgaccacagcttctagtttgtcaaaagagccactctgacaggcagc

SEQ ID NO: 4357 - protein, 32 aa, Homo sapiens; identical to SEQ ID NO: 4347

SEQ ID NO: 4358 - DNA, 4733 bp, Homo sapiens
cttttcagtcgggcgctgagtggtttttcggatcatgtctggtggctccgcggattataacagagaacatggcggcccagagggaatggaccccgatggtgtcatcgagagcaactggaatgagattgttgataactttgatgatatgaatttaaaggagtctctccttcgtggcatctatgcttacggttttgagaagccttccgctattcagcagagagctattattccctgtattaaagatccaaaaggtaattctggcacttggagactatatgggagccacttgtcatgcctgcattggtggaacaaatgttcgaaatgaaatgcaaaaactgcaggctgaagcaccacatattgttgttggtacacccgggagagtgtttgatatgttaaacagaagatacctttgtaagtattgtctttaagagagtattttttttaaaactgttaacatagttgaaaagtcaaattgtatcactgagtagatctagaaatgacagtatgactttgtttctaacagctccaaaatggatcaaaatgtttgttttggatgaagcagatgaaatgttgagccgtggttttaaggatcaaatctatgagattttccaaaaactaaacacaagtattcaggtaagcattacttcacccccctcttaaaggtagagatggggtttatttaatgcaggtactgttacaatacaactgatgtgttttgttgtcgttccccctgcttaaagcacttgatgcataactctgtctaccttcattccgtagtaagacagagacgcttggcttcagacattttcctttgggtattaatgtgtaagttgtgctacaacataattttctctttttaaggttgtgttgctttctgccacaatgccaactgatgtgttggaagtgaccaaaaaattcatgagagatccaattcgaattctggtgaaaaaggaagaattgacccttgaaggaatcaaacagttttatattaatgttgagagagaggtaactgtctgattgttagacattattttaccttcttgtataagcactgtgctaaaattgcagacactaggaccatgtcttggtttttgcaataatgctagcagagtacacacaagaagaaaagtaacagcactagattgtaaagactggggtggacctctttcttaatgtccaatgtcctttgtcttaagatttggtgcaatatctcattagacctaacagaatgaagttaatttttataatttctacgttttgagactgggttatgagactggctaagactggccaattttggtattttgggtagagacagtttcactttcttgaaaccctggtctggttggaactctgggctctaagtgctaggatcccaaagggctgggattacaggcattagcactgtggctggcccagaatgaatttttaactgaagagttggaaaaactaaatgactgttaactttaacttctaaacattacaggaatggaagttggatacactttgtgacttgtacgagacactgaccattacacaggctgttatttttctcaatacgaggcgcaaggtggactggctgactgagaagatgcatgccagagacttcacagtttctgctctggtaagaggtgttctaaaatgtctggatttccactaaagcaggattcagactacaatatagctgctaagtgctgtgttgtcgttccccctgcttaaaataaagttgtttcttaactatacctgtctgctattctcctgtagcagccagggacgcttggtctcatacatgttgattaaaattaaataccgacctgactggtgattcttgaattaaggtttattaatttgcagcatggtgacatggaccagaaggagagagatgttatcatgagggaattccggtcagggtcaagtcgtgttctgatcactactgacttgttggtaagtctcttaatgctttttaaaaatctaccaaaagttagctttttggggggcaggtttttaagtaacctttgccaacttgggctatttggaagagtaaaagaccacactccacagtgggctataccacttagtatagttcgctactattttgtggcctacatgacaggtgtcaagtttttttgaatcaatttttaaaacatgccattgtgtttcaggctcgcgggattgatgtgcaacaagtgtctttggttataaattatgatctacctaccaatcgtgaaaactatattcacaggtgagaagccagcatcttggctgtattgaaaaaaattcatacgtttttctactgtgatttgtatgaaaggtaacatcaaatcaaggaatagattcagtaaagtcagtagtgttcagtaagatgatgtaattaaatttgtactagggaaggttgatgagaacaaagtgggaaaacttgtaaacattgcccagattgtggacatagggtttttttccacaattgttggtcttaccttatgcttgagcttttagtgatgttcttgtgtccatgtgtttttcttggtgattttttctatagttgggattttcttggtgtcgcctggtagcaatttgagtgaaccctggtttagttatagtggctttatccctaaataaattgaattgtactttgttatatgatgtaaaaaaagactttttaaaaaatacaggagtcgatagcagcagttggtgacgagatggcactcagaaacggcgttgacgtaatttaggacgtggaatcataagcgaaacagcacactgtttgaataaagagcgagtcggtatttatatttgtttttcttttgtcatgattatttgatttttaagttgctccagctaaggcatttttttgtattagtatttctattagggaacctttcttattaggtggtttgtattgtctggtttctaacatgcaggtagctgtttggcagttaaacacgtttagagtaatttgagttacaacgtgtgaaactgagcaaaaaagcagtgataagtttgggttaccataccaaatatttgttttcccactggaaaaaagtaagttttagaaaatagttaacctttgcagcatttgtttacagtttacagttccagaagtgcgtcgaaatggattacataactgctcttttattcctggtgttcacatctgtcccaggctgacacctgctcttggctggcccactttggtatgggctttaatttcactaccccaaacacgatactgtcatctgctttataataatgctcaagatgcctgataaaaatctcattttgcagccagacaagccttgaatccttttggcactaactgcaaaggaagatttttttctctagatatgcattagcagctagtgctccagttagaagcacgaactataaccttgataagtaaacagcagctggtggttaacaagtggatcgtcatgttcagtagtttatacattatgtgagaagtaacgttctgattctttttcttacacagaattggcagagggggtcgatttgggaggaaaggtgtggctataaactttgttactgaagaagacaagaggattcttcgtgacattgagactttctacaatactacagtggaggagatgcccatgaatgtggctgaccttatttaattcctgggatgagagttttggatgcagtgctcgctgttgctgaataggcgatcacaacgtgcattgtgcttctttctttgggaatatttgaatcttgtctcaatgctcataacggatcagaaatacagattttgatagcaaagcgacgttagtcgtgagctcttgtgaggaaagtcattggctttatcctctttagagttagactgttggggtgggtataaaagatggggtctgtaaaatctttctttcttagaaatttatttcctagttctgtagaaatggttgtattagatgttctctatcatttaataatatacttgtggactaaaagatataagtgctgtataaaatcagccaattatgttaaactagcatatctgcctttattgtgtttgtcattagcctgagtagaaaggcctttaaaatttttttagaaagcatttgaatgcattttgtttggtattgtatttattcaataaagtatttaattagtgctaagtgtgaactggaccctgttgctaagccccagcaagcaatcctaggtagggtttaatccccagtaaaattgccatattgcacatgtcttaatgaagtttgaatgttaaataaattgtatattcactttaaaggtgcttttggtcattttatttttattacaacttcattatttacaaaaccccccatccagatatattcacgttaacaattctgagataactgctgcatcacagttgcacaaaggctgatgagttgcaaatgttcatcagcaccatctgctaggcatttgtcaacttcctacgagaaaaatttaagaaattagcatccttcaggtagttaaatgttccattgacatgtgcaaagtacctacttacggcaagtttttctgtgataatagacttctgtttatcagataagttattttctacaaccacatcatggagttgattgacgagctgagttgctgcatgaccctcatctattaaatcctataataaaaaaaacttttggtatgatgacttaatattcctttccccaaagttagtaagctgactttaccttgaccacagcttctagtttgtcaaaagagccactctgacaggcagc

SEQ ID NO: 4359 - protein, 96 aa, Homo sapiens; identical to SEQ ID NO: 4349

SEQ ID NO: 4360 - DNA, 5654 bp, Homo sapiens
cttttcagtcgggcgctgagtggtttttcggatcatgtctggtggctccgcggattataacagagaacatggcggcccagagggaatggaccccgatggtgtcatcgagagcaactggaatgagattgttgataactttgatgatatgaatttaaaggagtctctccttcgtggcatctatgcttacggttttgagaagccttccgctattcagcagagagctattattccctgtattaaagggtatgatgtgattgctcaagctcagtcaggtactggcaagacagccacatttgctatttccatcctgcaacagttggagattgagttcaaggagacccaagcactagtattggcccccaccagagaactggctcaacaggtattgatagtgtagttcaaaaaaactgcttgcgtgttgcataggtttcaggtttcacaactgtgaagaatttaaaacttagtataaattggtcctaccagatccctccttttaattgtccatgcatgcagggagtttttgttgaaagttttaaaagaactgggtatgcaggtatggtttgtagggttgtatactaatagattgagaatccgaagcgctctcttggatgtactagatctgtccccattttttaagtttgaatgcagttgtgcaacatgaaaactgcagtgacatgttaccatttgactgtctccgtagttcgtgatgcatctgttgcatgctatgttttcaaagctcactgctatattggctttgaagtaaaccttcctaataaagctgtaggctttattgaggtcaggattatataaggcacaataccctctgggggaaaaaaatcatttgccctagctgtaattacagaacataaatttcactacgtactccctacctacagtgaagaataatgtaggaaacgttattcttggattgtctagctgatgcgtggagcagcagcatcccaagtttgacaaggcataagaaagacattaagggaattttaccttgcagcagttaggtcgtctgcattttaagcttggaagtagttttgtgctgtgcatgcataaaagctgttggcagaccagattatatttgcctttatgctttaaaaattagtcattgatcctggagttctgcggaataataattaaggcttgggttttagatccaaaaggtaattctggcacttggagactatatgggagccacttgtcatgcctgcattggtggaacaaatgttcgaaatgaaatgcaaaaactgcaggctgaagcaccacatattgttgttggtacacccgggagagtgtttgatatgttaaacagaagatacctttgtaagtattgtctttaagagagtattttttttaaaactgttaacatagttgaaaagtcaaattgtatcactgagtagatctagaaatgacagtatgactttgtttctaacagctccaaaatggatcaaaatgtttgttttggatgaagcagatgaaatgttgagccgtggttttaaggatcaaatctatgagattttccaaaaactaaacacaagtattcaggtaagcattacttcacccccctcttaaaggtagagatggggtttatttaatgcaggtactgttacaatacaactgatgtgttttgttgtcgttccccctgcttaaagcacttgatgcataactctgtctaccttcattccgtagtaagacagagacgcttggcttcagacattttcctttgggtattaatgtgtaagttgtgctacaacataattttctctttttaaggttgtgttgctttctgccacaatgccaactgatgtgttggaagtgaccaaaaaattcatgagagatccaattcgaattctggtgaaaaaggaagaattgacccttgaaggaatcaaacagttttatattaatgttgagagagaggtaactgtctgattgttagacattattttaccttcttgtataagcactgtgctaaaattgcagacactaggaccatgtcttggtttttgcaataatgctagcagagtacacacaagaagaaaagtaacagcactagattgtaaagactggggtggacctctttcttaatgtccaatgtcctttgtcttaagatttggtgcaatatctcattagacctaacagaatgaagttaatttttataatttctacgttttgagactgggttatgagactggctaagactggccaattttggtattttgggtagagacagtttcactttcttgaaaccctggtctggttggaactctgggctctaagtgctaggatcccaaagggctgggattacaggcattagcactgtggctggcccagaatgaatttttaactgaagagttggaaaaactaaatgactgttaactttaacttctaaacattacaggaatggaagttggatacactttgtgacttgtacgagacactgaccattacacaggctgttatttttctcaatacgaggcgcaaggtggactggctgactgagaagatgcatgccagagacttcacagtttctgctctggtaagaggtgttctaaaatgtctggatttccactaaagcaggattcagactacaatatagctgctaagtgctgtgttgtcgttccccctgcttaaaataaagttgtttcttaactatacctgtctgctattctcctgtagcagccagggacgcttggtctcatacatgttgattaaaattaaataccgacctgactggtgattcttgaattaaggtttattaatttgcagcatggtgacatggaccagaaggagagagatgttatcatgagggaattccggtcagggtcaagtcgtgttctgatcactactgacttgttggtaagtctcttaatgctttttaaaaatctaccaaaagttagctttttggggggcaggtttttaagtaacctttgccaacttgggctatttggaagagtaaaagaccacactccacagtgggctataccacttagtatagttcgctactattttgtggcctacatgacaggtgtcaagtttttttgaatcaatttttaaaacatgccattgtgtttcaggctcgcgggattgatgtgcaacaagtgtctttggttataaattatgatctacctaccaatcgtgaaaactatattcacaggtgagaagccagcatcttggctgtattgaaaaaaattcatacgtttttctactgtgatttgtatgaaaggtaacatcaaatcaaggaatagattcagtaaagtcagtagtgttcagtaagatgatgtaattaaatttgtactagggaaggttgatgagaacaaagtgggaaaacttgtaaacattgcccagattgtggacatagggtttttttccacaattgttggtcttaccttatgcttgagcttttagtgatgttcttgtgtccatgtgtttttcttggtgattttttctatagttgggattttcttggtgtcgcctggtagcaatttgagtgaaccctggtttagttatagtggctttatccctaaataaattgaattgtactttgttatatgatgtaaaaaaagactttttaaaaaatacaggagtcgatagcagcagttggtgacgagatggcactcagaaacggcgttgacgtaatttaggacgtggaatcataagcgaaacagcacactgtttgaataaagagcgagtcggtatttatatttgtttttcttttgtcatgattatttgatttttaagttgctccagctaaggcatttttttgtattagtatttctattagggaacctttcttattaggtggtttgtattgtctggtttctaacatgcaggtagctgtttggcagttaaacacgtttagagtaatttgagttacaacgtgtgaaactgagcaaaaaagcagtgataagtttgggttaccataccaaatatttgttttcccactggaaaaaagtaagttttagaaaatagttaacctttgcagcatttgtttacagtttacagttccagaagtgcgtcgaaatggattacataactgctcttttattcctggtgttcacatctgtcccaggctgacacctgctcttggctggcccactttggtatgggctttaatttcactaccccaaacacgatactgtcatctgctttataataatgctcaagatgcctgataaaaatctcattttgcagccagacaagccttgaatccttttggcactaactgcaaaggaagatttttttctctagatatgcattagcagctagtgctccagttagaagcacgaactataaccttgataagtaaacagcagctggtggttaacaagtggatcgtcatgttcagtagtttatacattatgtgagaagtaacgttctgattctttttcttacacagaattggcagagggggtcgatttgggaggaaaggtgtggctataaactttgttactgaagaagacaagaggattcttcgtgacattgagactttctacaatactacagtggaggagatgcccatgaatgtggctgaccttatttaattcctgggatgagagttttggatgcagtgctcgctgttgctgaataggcgatcacaacgtgcattgtgcttctttctttgggaatatttgaatcttgtctcaatgctcataacggatcagaaatacagattttgatagcaaagcgacgttagtcgtgagctcttgtgaggaaagtcattggctttatcctctttagagttagactgttggggtgggtataaaagatggggtctgtaaaatctttctttcttagaaatttatttcctagttctgtagaaatggttgtattagatgttctctatcatttaataatatacttgtggactaaaagatataagtgctgtataaaatcagccaattatgttaaactagcatatctgcctttattgtgtttgtcattagcctgagtagaaaggcctttaaaatttttttagaaagcatttgaatgcattttgtttggtattgtatttattcaataaagtatttaattagtgctaagtgtgaactggaccctgttgctaagccccagcaagcaatcctaggtagggtttaatccccagtaaaattgccatattgcacatgtcttaatgaagtttgaatgttaaataaattgtatattcactttaaaggtgcttttggtcattttatttttattacaacttcattatttacaaaaccccccatccagatatattcacgttaacaattctgagataactgctgcatcacagttgcacaaaggctgatgagttgcaaatgttcatcagcaccatctgctaggcatttgtcaacttcctacgagaaaaatttaagaaattagcatccttcaggtagttaaatgttccattgacatgtgcaaagtacctacttacggcaagtttttctgtgataatagacttctgtttatcagataagttattttctacaaccacatcatggagttgattgacgagctgagttgctgcatgaccctcatctattaaatcctataataaaaaaaacttttggtatgatgacttaatattcctttccccaaagttagtaagctgactttaccttgaccacagcttctagtttgtcaaaagagccactctgacaggcagc

SEQ ID NO: 4361 - protein, 120 aa, Homo sapiens; identical to SEQ ID NO: 4345

SEQ ID NO: 4362 - DNA, 1458 bp, Homo sapiens
tttcagtcgggcgctgagtggtttttcggatcatgtctggtggctccgcggattataacagagaacatggcggcccagagggaatggaccccgatggtgtcatcgaggtaagaaacggttgtggatcttgaagctttggaaagatccaaaaggtaattctggcacttggagactatatgggagccacttgtcatgcctgcattggtggaacaaatgttcgaaatgaaatgcaaaaactgcaggctgaagcaccacatattgttgttggtacacccgggagagtgtttgatatgttaaacagaagatacctttctccaaaatggatcaaaatgtttgttttggatgaagcagatgaaatgttgagccgtggttttaaggatcaaatctatgagattttccaaaaactaaacacaagtattcaggttgtgttgctttctgccacaatgccaactgatgtgttggaagtgaccaaaaaattcatgagagatccaattcgaattctggtgaaaaaggaagaattgacccttgaaggaatcaaacagttttatattaatgttgagagagaggaatggaagttggatacactttgtgacttgtacgagacactgaccattacacaggctgttatttttctcaatacgaggcgcaaggtggactggctgactgagaagatgcatgccagagacttcacagtttctgctctgcatggtgacatggaccagaaggagagagatgttatcatgagggaattccggtcagggtcaagtcgtgttctgatcactactgacttgttggctcgcgggattgatgtgcaacaagtgtctttggttataaattatgatctacctaccaatcgtgaaaactatattcacagaattggcagagggggtcgatttgggaggaaaggtgtggctataaactttgttactgaagaagacaagaggattcttcgtgacattgagactttctacaatactacagtggaggagatgcccatgaatgtggctgaccttatttaattcctgggatgagagttttggatgcagtgctcgctgttgctgaataggcgatcacaacgtgcattgtgcttctttctttgggaatatttgaatcttgtctcaatgctcataacggatcagaaatacagattttgatagcaaagcgacgttagtcgtgagctcttgtgaggaaagtcattggctttatcctctttagagttagactgttggggtgggtataaaagatggggtctgtaaaatctttctttcttagaaatttatttcctagttctgtagaaatggttgtattagatgttctctatcatttaataatatacttgtggactaaaagatataagtgctgtataaaatcagccaattatgttaaactagcatatctgcctttattgtgtttgtcattagcctgagtagaaaggcctttaaaatttttttagaaagc

SEQ ID NO: 4363 - protein, 280 aa, Homo sapiens
MGATCHACIGGTNVRNEMQKLQAEAPHIVVGTPGRVFDMLNRRYLSPKWIKMFVLDEADEMLSRGFKDQIYEIFQKLNTSIQVVLLSATMPTDVLEVTKKFMRDPIRILVKKEELTLEGIKQFYINVEREEWKLDTLCDLYETLTITQAVIFLNTRRKVDWLTEKMHARDFTVSALHGDMDQKERDVIMREFRSGSSRVLITTDLLARGIDVQQVSLVINYDLPTNRENYIHRIGRGGRFGRKGVAINFVTEEDKRILRDIETFYNTTVEEMPMNVADLI

SEQ ID NO: 4364 - DNA, 1515 bp, Homo sapiens
tttcagtcgggcgctgagtggtttttcggatcatgtctggtggctccgcggattataacagagaacatggcggcccagagggaatggaccccgatggtgtcatcgaggtaagaaacggttgtggatcttgaagctttggaaagatccaaaaggtaattctggcacttggagactatatgggagccacttgtcatgcctgcattggtggaacaaatgttcgaaatgaaatgcaaaaactgcaggctgaagcaccacatattgttgttggtacacccgggagagtgtttgatatgttaaacagaagatacctttctccaaaatggatcaaaatgtttgttttggatgaagcagatgaaatgttgagccgtggttttaaggatcaaatctatgagattttccaaaaactaaacacaagtattcaggttgtgttgctttctgccacaatgccaactgatgtgttggaagtgaccaaaaaattcatgagagatccaattcgaattctggtgaaaaaggaagaattgacccttgaaggaatcaaacagttttatattaatgttgagagagaggaatggaagttggatacactttgtgacttgtacgagacactgaccattacacaggctgttatttttctcaatacgaggcgcaaggtggactggctgactgagaagatgcatgccagagacttcacagtttctgctctgcatggtgacatggaccagaaggagagagatgttatcatgagggaattccggtcagggtcaagtcgtgttctgatcactactgacttgttggctcgcgggattgatgtgcaacaagtgtctttggttataaattatgatctacctaccaatcgtgaaaactatattcacagaattggcagagggggtcgatttgggaggaaaggtgtggctataaactttgttactgaagaagacaagaggattcttcgtgacattgagactttctacaatactacagtggaggagatgcccatgaatgtggctgaccttatttaattcctgggatgagagttttggatgcagtgctcgctgttgctgaataggcgatcacaacgtgcattgtgcttctttctttgggaatatttgaatcttgtctcaatgctcataacggatcagaaatacagattttgatagcaaagcgacgttagtcgtgagctcttgtgaggaaagtcattggctttatcctctttagagttagactgttggggtgggtataaaagatggggtctgtaaaatctttctttcttagaaatttatttcctagttctgtagaaatggttgtattagatgttctctatcatttaataatatacttgtggactaaaagatataagtgctgtataaaatcagccaattatgttaaactagcatatctgcctttattgtgtttgtcattagcctgagtagaaaggcctttaaaatttttttagaaagcatttgaatgcattttgtttggtattgtatttattcaataaagtatttaattagtgct

SEQ ID NO: 4365 - protein, 280 aa, Homo sapiens; identical to SEQ ID NO: 4363

SEQ ID NO: 4366 - DNA, 1650 bp, Homo sapiens
tttcagtcgggcgctgagtggtttttcggatcatgtctggtggctccgcggattataacagagaacatggcggcccagagggaatggaccccgatggtgtcatcgaggtaagaaacggttgtggatcttgaagctttggaaagatccaaaaggtaattctggcacttggagactatatgggagccacttgtcatgcctgcattggtggaacaaatgttcgaaatgaaatgcaaaaactgcaggctgaagcaccacatattgttgttggtacacccgggagagtgtttgatatgttaaacagaagatacctttctccaaaatggatcaaaatgtttgttttggatgaagcagatgaaatgttgagccgtggttttaaggatcaaatctatgagattttccaaaaactaaacacaagtattcaggttgtgttgctttctgccacaatgccaactgatgtgttggaagtgaccaaaaaattcatgagagatccaattcgaattctggtgaaaaaggaagaattgacccttgaaggaatcaaacagttttatattaatgttgagagagaggaatggaagttggatacactttgtgacttgtacgagacactgaccattacacaggctgttatttttctcaatacgaggcgcaaggtggactggctgactgagaagatgcatgccagagacttcacagtttctgctctgcatggtgacatggaccagaaggagagagatgttatcatgagggaattccggtcagggtcaagtcgtgttctgatcactactgacttgttggctcgcgggattgatgtgcaacaagtgtctttggttataaattatgatctacctaccaatcgtgaaaactatattcacagaattggcagagggggtcgatttgggaggaaaggtgtggctataaactttgttactgaagaagacaagaggattcttcgtgacattgagactttctacaatactacagtggaggagatgcccatgaatgtggctgaccttatttaattcctgggatgagagttttggatgcagtgctcgctgttgctgaataggcgatcacaacgtgcattgtgcttctttctttgggaatatttgaatcttgtctcaatgctcataacggatcagaaatacagattttgatagcaaagcgacgttagtcgtgagctcttgtgaggaaagtcattggctttatcctctttagagttagactgttggggtgggtataaaagatggggtctgtaaaatctttctttcttagaaatttatttcctagttctgtagaaatggttgtattagatgttctctatcatttaataatatacttgtggactaaaagatataagtgctgtataaaatcagccaattatgttaaactagcatatctgcctttattgtgtttgtcattagcctgagtagaaaggcctttaaaatttttttagaaagcatttgaatgcattttgtttggtattgtatttattcaataaagtatttaattagtgctaagtgtgaactggaccctgttgctaagccccagcaagcaatcctaggtagggtttaatccccagtaaaattgccatattgcacatgtcttaatgaagtttgaatgttaaataaattgtatattcactttaaaggt

SEQ ID NO: 4367 - protein, 280 aa, Homo sapiens; identical to SEQ ID NO: 4363

SEQ ID NO: 4368 - DNA, 2123 bp, Homo sapiens
tttcagtcgggcgctgagtggtttttcggatcatgtctggtggctccgcggattataacagagaacatggcggcccagagggaatggaccccgatggtgtcatcgaggtaagaaacggttgtggatcttgaagctttggaaagatccaaaaggtaattctggcacttggagactatatgggagccacttgtcatgcctgcattggtggaacaaatgttcgaaatgaaatgcaaaaactgcaggctgaagcaccacatattgttgttggtacacccgggagagtgtttgatatgttaaacagaagatacctttctccaaaatggatcaaaatgtttgttttggatgaagcagatgaaatgttgagccgtggttttaaggatcaaatctatgagattttccaaaaactaaacacaagtattcaggttgtgttgctttctgccacaatgccaactgatgtgttggaagtgaccaaaaaattcatgagagatccaattcgaattctggtgaaaaaggaagaattgacccttgaaggaatcaaacagttttatattaatgttgagagagaggaatggaagttggatacactttgtgacttgtacgagacactgaccattacacaggctgttatttttctcaatacgaggcgcaaggtggactggctgactgagaagatgcatgccagagacttcacagtttctgctctgcatggtgacatggaccagaaggagagagatgttatcatgagggaattccggtcagggtcaagtcgtgttctgatcactactgacttgttggctcgcgggattgatgtgcaacaagtgtctttggttataaattatgatctacctaccaatcgtgaaaactatattcacagaattggcagagggggtcgatttgggaggaaaggtgtggctataaactttgttactgaagaagacaagaggattcttcgtgacattgagactttctacaatactacagtggaggagatgcccatgaatgtggctgaccttatttaattcctgggatgagagttttggatgcagtgctcgctgttgctgaataggcgatcacaacgtgcattgtgcttctttctttgggaatatttgaatcttgtctcaatgctcataacggatcagaaatacagattttgatagcaaagcgacgttagtcgtgagctcttgtgaggaaagtcattggctttatcctctttagagttagactgttggggtgggtataaaagatggggtctgtaaaatctttctttcttagaaatttatttcctagttctgtagaaatggttgtattagatgttctctatcatttaataatatacttgtggactaaaagatataagtgctgtataaaatcagccaattatgttaaactagcatatctgcctttattgtgtttgtcattagcctgagtagaaaggcctttaaaatttttttagaaagcatttgaatgcattttgtttggtattgtatttattcaataaagtatttaattagtgctaagtgtgaactggaccctgttgctaagccccagcaagcaatcctaggtagggtttaatccccagtaaaattgccatattgcacatgtcttaatgaagtttgaatgttaaataaattgtatattcactttaaaggtgcttttggtcattttatttttattacaacttcattatttacaaaaccccccatccagatatattcacgttaacaattctgagataactgctgcatcacagttgcacaaaggctgatgagttgcaaatgttcatcagcaccatctgctaggcatttgtcaacttcctacgagaaaaatttaagaaattagcatccttcaggtagttaaatgttccattgacatgtgcaaagtacctacttacggcaagtttttctgtgataatagacttctgtttatcagataagttattttctacaaccacatcatggagttgattgacgagctgagttgctgcatgaccctcatctattaaatcctataataaaaaaaacttttggtatgatgacttaatattcctttccccaaagttagtaagctgactttaccttgaccacagcttctagtttgtcaaaagagccactctgacaggcagc

SEQ ID NO: 4369 - protein, 280 aa, Homo sapiens; identical to SEQ ID NO: 4363

SEQ ID NO: 4370 - DNA, 3818 bp, Homo sapiens
agagcaactggaatgagattgttgataactttgatgatatgaatttaaaggagtctctccttcgtggcatctatgcttacggttttgagaagccttccgctattcagcagagagctattattccctgtattaaagggtatgatgtgattgctcaagctcagtcaggtactggcaagacagccacatttgctatttccatcctgcaacagttggagattgagttcaaggagacccaagcactagtattggcccccaccagagaactggctcaacagatccaaaaggtaattctggcacttggagactatatgggagccacttgtcatgcctgcattggtggaacaaatgttcgaaatgaaatgcaaaaactgcaggctgaagcaccacatattgttgttggtacacccgggagagtgtttgatatgttaaacagaagatacctttctccaaaatggatcaaaatgtttgttttggatgaagcagatgaaatgttgagccgtggttttaaggatcaaatctatgagattttccaaaaactaaacacaagtattcaggttgtgttgctttctgccacaatgccaactgatgtgttggaagtgaccaaaaaattcatgagagatccaattcgaattctggtgaaaaaggaagaattgacccttgaaggaatcaaacagttttatattaatgttgagagagaggtaactgtctgattgttagacattattttaccttcttgtataagcactgtgctaaaattgcagacactaggaccatgtcttggtttttgcaataatgctagcagagtacacacaagaagaaaagtaacagcactagattgtaaagactggggtggacctctttcttaatgtccaatgtcctttgtcttaagatttggtgcaatatctcattagacctaacagaatgaagttaatttttataatttctacgttttgagactgggttatgagactggctaagactggccaattttggtattttgggtagagacagtttcactttcttgaaaccctggtctggttggaactctgggctctaagtgctaggatcccaaagggctgggattacaggcattagcactgtggctggcccagaatgaatttttaactgaagagttggaaaaactaaatgactgttaactttaacttctaaacattacaggaatggaagttggatacactttgtgacttgtacgagacactgaccattacacaggctgttatttttctcaatacgaggcgcaaggtggactggctgactgagaagatgcatgccagagacttcacagtttctgctctggtaagaggtgttctaaaatgtctggatttccactaaagcaggattcagactacaatatagctgctaagtgctgtgttgtcgttccccctgcttaaaataaagttgtttcttaactatacctgtctgctattctcctgtagcagccagggacgcttggtctcatacatgttgattaaaattaaataccgacctgactggtgattcttgaattaaggtttattaatttgcagcatggtgacatggaccagaaggagagagatgttatcatgagggaattccggtcagggtcaagtcgtgttctgatcactactgacttgttggtaagtctcttaatgctttttaaaaatctaccaaaagttagctttttggggggcaggtttttaagtaacctttgccaacttgggctatttggaagagtaaaagaccacactccacagtgggctataccacttagtatagttcgctactattttgtggcctacatgacaggtgtcaagtttttttgaatcaatttttaaaacatgccattgtgtttcaggctcgcgggattgatgtgcaacaagtgtctttggttataaattatgatctacctaccaatcgtgaaaactatattcacaggtgagaagccagcatcttggctgtattgaaaaaaattcatacgtttttctactgtgatttgtatgaaaggtaacatcaaatcaaggaatagattcagtaaagtcagtagtgttcagtaagatgatgtaattaaatttgtactagggaaggttgatgagaacaaagtgggaaaacttgtaaacattgcccagattgtggacatagggtttttttccacaattgttggtcttaccttatgcttgagcttttagtgatgttcttgtgtccatgtgtttttcttggtgattttttctatagttgggattttcttggtgtcgcctggtagcaatttgagtgaaccctggtttagttatagtggctttatccctaaataaattgaattgtactttgttatatgatgtaaaaaaagactttttaaaaaatacaggagtcgatagcagcagttggtgacgagatggcactcagaaacggcgttgacgtaatttaggacgtggaatcataagcgaaacagcacactgtttgaataaagagcgagtcggtatttatatttgtttttcttttgtcatgattatttgatttttaagttgctccagctaaggcatttttttgtattagtatttctattagggaacctttcttattaggtggtttgtattgtctggtttctaacatgcaggtagctgtttggcagttaaacacgtttagagtaatttgagttacaacgtgtgaaactgagcaaaaaagcagtgataagtttgggttaccataccaaatatttgttttcccactggaaaaaagtaagttttagaaaatagttaacctttgcagcatttgtttacagtttacagttccagaagtgcgtcgaaatggattacataactgctcttttattcctggtgttcacatctgtcccaggctgacacctgctcttggctggcccactttggtatgggctttaatttcactaccccaaacacgatactgtcatctgctttataataatgctcaagatgcctgataaaaatctcattttgcagccagacaagccttgaatccttttggcactaactgcaaaggaagatttttttctctagatatgcattagcagctagtgctccagttagaagcacgaactataaccttgataagtaaacagcagctggtggttaacaagtggatcgtcatgttcagtagtttatacattatgtgagaagtaacgttctgattctttttcttacacagaattggcagagggggtcgatttgggaggaaaggtgtggctataaactttgttactgaagaagacaagaggattcttcgtgacattgagactttctacaatactacagtggaggagatgcccatgaatgtggctgaccttatttaattcctgggatgagagttttggatgcagtgctcgctgttgctgaataggcgatcacaacgtgcattgtgcttctttctttgggaatatttgaatcttgtctcaatgctcataacggatcagaaatacagattttgatagcaaagcgacgttagtcgtgagctcttgtgaggaaagtcattggctttatcctctttagagttagactgttggggtgggtataaaagatggggtctgtaaaatctttctttcttagaaatttatttcctagttctgtagaaatggttgtattagatgttctctatcatttaataatatacttgtggactaaaagatataagtgctgtataaaatcagccaattatgttaaactagcatatctgcctttattgtgtttgtcattagcctgagtagaaaggcctttaaaatttttttagaaagcatttgaatgcattttgtttggtattgtatttattcaataaagtatttaattagtgct

SEQ ID NO: 4371 - protein, 223 aa, Homo sapiens
MNLKESLLRGIYAYGFEKPSAIQQRAIIPCIKGYDVIAQAQSGTGKTATFAISILQQLEIEFKETQALVLAPTRELAQQIQKVILALGDYMGATCHACIGGTNVRNEMQKLQAEAPHIVVGTPGRVFDMLNRRYLSPKWIKMFVLDEADEMLSRGFKDQIYEIFQKLNTSIQVVLLSATMPTDVLEVTKKFMRDPIRILVKKEELTLEGIKQFYINVEREVTV

SEQ ID NO: 4372 - DNA, 4046 bp, Homo sapiens
agagcaactggaatgagattgttgataactttgatgatatgaatttaaaggagtctctccttcgtggcatctatgcttacggttttgagaagccttccgctattcagcagagagctattattccctgtattaaagggtatgatgtgattgctcaagctcagtcaggtactggcaagacagccacatttgctatttccatcctgcaacagttggagattgagttcaaggagacccaagcactagtattggcccccaccagagaactggctcaacagatccaaaaggtaattctggcacttggagactatatgggagccacttgtcatgcctgcattggtggaacaaatgttcgaaatgaaatgcaaaaactgcaggctgaagcaccacatattgttgttggtacacccgggagagtgtttgatatgttaaacagaagatacctttctccaaaatggatcaaaatgtttgttttggatgaagcagatgaaatgttgagccgtggttttaaggatcaaatctatgagattttccaaaaactaaacacaagtattcaggtaagcattacttcacccccctcttaaaggtagagatggggtttatttaatgcaggtactgttacaatacaactgatgtgttttgttgtcgttccccctgcttaaagcacttgatgcataactctgtctaccttcattccgtagtaagacagagacgcttggcttcagacattttcctttgggtattaatgtgtaagttgtgctacaacataattttctctttttaaggttgtgttgctttctgccacaatgccaactgatgtgttggaagtgaccaaaaaattcatgagagatccaattcgaattctggtgaaaaaggaagaattgacccttgaaggaatcaaacagttttatattaatgttgagagagaggtaactgtctgattgttagacattattttaccttcttgtataagcactgtgctaaaattgcagacactaggaccatgtcttggtttttgcaataatgctagcagagtacacacaagaagaaaagtaacagcactagattgtaaagactggggtggacctctttcttaatgtccaatgtcctttgtcttaagatttggtgcaatatctcattagacctaacagaatgaagttaatttttataatttctacgttttgagactgggttatgagactggctaagactggccaattttggtattttgggtagagacagtttcactttcttgaaaccctggtctggttggaactctgggctctaagtgctaggatcccaaagggctgggattacaggcattagcactgtggctggcccagaatgaatttttaactgaagagttggaaaaactaaatgactgttaactttaacttctaaacattacaggaatggaagttggatacactttgtgacttgtacgagacactgaccattacacaggctgttatttttctcaatacgaggcgcaaggtggactggctgactgagaagatgcatgccagagacttcacagtttctgctctggtaagaggtgttctaaaatgtctggatttccactaaagcaggattcagactacaatatagctgctaagtgctgtgttgtcgttccccctgcttaaaataaagttgtttcttaactatacctgtctgctattctcctgtagcagccagggacgcttggtctcatacatgttgattaaaattaaataccgacctgactggtgattcttgaattaaggtttattaatttgcagcatggtgacatggaccagaaggagagagatgttatcatgagggaattccggtcagggtcaagtcgtgttctgatcactactgacttgttggtaagtctcttaatgctttttaaaaatctaccaaaagttagctttttggggggcaggtttttaagtaacctttgccaacttgggctatttggaagagtaaaagaccacactccacagtgggctataccacttagtatagttcgctactattttgtggcctacatgacaggtgtcaagtttttttgaatcaatttttaaaacatgccattgtgtttcaggctcgcgggattgatgtgcaacaagtgtctttggttataaattatgatctacctaccaatcgtgaaaactatattcacaggtgagaagccagcatcttggctgtattgaaaaaaattcatacgtttttctactgtgatttgtatgaaaggtaacatcaaatcaaggaatagattcagtaaagtcagtagtgttcagtaagatgatgtaattaaatttgtactagggaaggttgatgagaacaaagtgggaaaacttgtaaacattgcccagattgtggacatagggtttttttccacaattgttggtcttaccttatgcttgagcttttagtgatgttcttgtgtccatgtgtttttcttggtgattttttctatagttgggattttcttggtgtcgcctggtagcaatttgagtgaaccctggtttagttatagtggctttatccctaaataaattgaattgtactttgttatatgatgtaaaaaaagactttttaaaaaatacaggagtcgatagcagcagttggtgacgagatggcactcagaaacggcgttgacgtaatttaggacgtggaatcataagcgaaacagcacactgtttgaataaagagcgagtcggtatttatatttgtttttcttttgtcatgattatttgatttttaagttgctccagctaaggcatttttttgtattagtatttctattagggaacctttcttattaggtggtttgtattgtctggtttctaacatgcaggtagctgtttggcagttaaacacgtttagagtaatttgagttacaacgtgtgaaactgagcaaaaaagcagtgataagtttgggttaccataccaaatatttgttttcccactggaaaaaagtaagttttagaaaatagttaacctttgcagcatttgtttacagtttacagttccagaagtgcgtcgaaatggattacataactgctcttttattcctggtgttcacatctgtcccaggctgacacctgctcttggctggcccactttggtatgggctttaatttcactaccccaaacacgatactgtcatctgctttataataatgctcaagatgcctgataaaaatctcattttgcagccagacaagccttgaatccttttggcactaactgcaaaggaagatttttttctctagatatgcattagcagctagtgctccagttagaagcacgaactataaccttgataagtaaacagcagctggtggttaacaagtggatcgtcatgttcagtagtttatacattatgtgagaagtaacgttctgattctttttcttacacagaattggcagagggggtcgatttgggaggaaaggtgtggctataaactttgttactgaagaagacaagaggattcttcgtgacattgagactttctacaatactacagtggaggagatgcccatgaatgtggctgaccttatttaattcctgggatgagagttttggatgcagtgctcgctgttgctgaataggcgatcacaacgtgcattgtgcttctttctttgggaatatttgaatcttgtctcaatgctcataacggatcagaaatacagattttgatagcaaagcgacgttagtcgtgagctcttgtgaggaaagtcattggctttatcctctttagagttagactgttggggtgggtataaaagatggggtctgtaaaatctttctttcttagaaatttatttcctagttctgtagaaatggttgtattagatgttctctatcatttaataatatacttgtggactaaaagatataagtgctgtataaaatcagccaattatgttaaactagcatatctgcctttattgtgtttgtcattagcctgagtagaaaggcctttaaaatttttttagaaagcatttgaatgcattttgtttggtattgtatttattcaataaagtatttaattagtgct

SEQ ID NO: 4373 - protein, 180 aa, Homo sapiens
MNLKESLLRGIYAYGFEKPSAIQQRAIIPCIKGYDVIAQAQSGTGKTATFAISILQQLEIEFKETQALVLAPTRELAQQIQKVILALGDYMGATCHACIGGTNVRNEMQKLQAEAPHIVVGTPGRVFDMLNRRYLSPKWIKMFVLDEADEMLSRGFKDQIYEIFQKLNTSIQVSITSPPS

SEQ ID NO: 4374 - DNA, 3953 bp, Homo sapiens
agagcaactggaatgagattgttgataactttgatgatatgaatttaaaggagtctctccttcgtggcatctatgcttacggttttgagaagccttccgctattcagcagagagctattattccctgtattaaagggtatgatgtgattgctcaagctcagtcaggtactggcaagacagccacatttgctatttccatcctgcaacagttggagattgagttcaaggagacccaagcactagtattggcccccaccagagaactggctcaacagatccaaaaggtaattctggcacttggagactatatgggagccacttgtcatgcctgcattggtggaacaaatgttcgaaatgaaatgcaaaaactgcaggctgaagcaccacatattgttgttggtacacccgggagagtgtttgatatgttaaacagaagatacctttctccaaaatggatcaaaatgtttgttttggatgaagcagatgaaatgttgagccgtggttttaaggatcaaatctatgagattttccaaaaactaaacacaagtattcaggttgtgttgctttctgccacaatgccaactgatgtgttggaagtgaccaaaaaattcatgagagatccaattcgaattctggtgaaaaaggaagaattgacccttgaaggaatcaaacagttttatattaatgttgagagagaggtaactgtctgattgttagacattattttaccttcttgtataagcactgtgctaaaattgcagacactaggaccatgtcttggtttttgcaataatgctagcagagtacacacaagaagaaaagtaacagcactagattgtaaagactggggtggacctctttcttaatgtccaatgtcctttgtcttaagatttggtgcaatatctcattagacctaacagaatgaagttaatttttataatttctacgttttgagactgggttatgagactggctaagactggccaattttggtattttgggtagagacagtttcactttcttgaaaccctggtctggttggaactctgggctctaagtgctaggatcccaaagggctgggattacaggcattagcactgtggctggcccagaatgaatttttaactgaagagttggaaaaactaaatgactgttaactttaacttctaaacattacaggaatggaagttggatacactttgtgacttgtacgagacactgaccattacacaggctgttatttttctcaatacgaggcgcaaggtggactggctgactgagaagatgcatgccagagacttcacagtttctgctctggtaagaggtgttctaaaatgtctggatttccactaaagcaggattcagactacaatatagctgctaagtgctgtgttgtcgttccccctgcttaaaataaagttgtttcttaactatacctgtctgctattctcctgtagcagccagggacgcttggtctcatacatgttgattaaaattaaataccgacctgactggtgattcttgaattaaggtttattaatttgcagcatggtgacatggaccagaaggagagagatgttatcatgagggaattccggtcagggtcaagtcgtgttctgatcactactgacttgttggtaagtctcttaatgctttttaaaaatctaccaaaagttagctttttggggggcaggtttttaagtaacctttgccaacttgggctatttggaagagtaaaagaccacactccacagtgggctataccacttagtatagttcgctactattttgtggcctacatgacaggtgtcaagtttttttgaatcaatttttaaaacatgccattgtgtttcaggctcgcgggattgatgtgcaacaagtgtctttggttataaattatgatctacctaccaatcgtgaaaactatattcacaggtgagaagccagcatcttggctgtattgaaaaaaattcatacgtttttctactgtgatttgtatgaaaggtaacatcaaatcaaggaatagattcagtaaagtcagtagtgttcagtaagatgatgtaattaaatttgtactagggaaggttgatgagaacaaagtgggaaaacttgtaaacattgcccagattgtggacatagggtttttttccacaattgttggtcttaccttatgcttgagcttttagtgatgttcttgtgtccatgtgtttttcttggtgattttttctatagttgggattttcttggtgtcgcctggtagcaatttgagtgaaccctggtttagttatagtggctttatccctaaataaattgaattgtactttgttatatgatgtaaaaaaagactttttaaaaaatacaggagtcgatagcagcagttggtgacgagatggcactcagaaacggcgttgacgtaatttaggacgtggaatcataagcgaaacagcacactgtttgaataaagagcgagtcggtatttatatttgtttttcttttgtcatgattatttgatttttaagttgctccagctaaggcatttttttgtattagtatttctattagggaacctttcttattaggtggtttgtattgtctggtttctaacatgcaggtagctgtttggcagttaaacacgtttagagtaatttgagttacaacgtgtgaaactgagcaaaaaagcagtgataagtttgggttaccataccaaatatttgttttcccactggaaaaaagtaagttttagaaaatagttaacctttgcagcatttgtttacagtttacagttccagaagtgcgtcgaaatggattacataactgctcttttattcctggtgttcacatctgtcccaggctgacacctgctcttggctggcccactttggtatgggctttaatttcactaccccaaacacgatactgtcatctgctttataataatgctcaagatgcctgataaaaatctcattttgcagccagacaagccttgaatccttttggcactaactgcaaaggaagatttttttctctagatatgcattagcagctagtgctccagttagaagcacgaactataaccttgataagtaaacagcagctggtggttaacaagtggatcgtcatgttcagtagtttatacattatgtgagaagtaacgttctgattctttttcttacacagaattggcagagggggtcgatttgggaggaaaggtgtggctataaactttgttactgaagaagacaagaggattcttcgtgacattgagactttctacaatactacagtggaggagatgcccatgaatgtggctgaccttatttaattcctgggatgagagttttggatgcagtgctcgctgttgctgaataggcgatcacaacgtgcattgtgcttctttctttgggaatatttgaatcttgtctcaatgctcataacggatcagaaatacagattttgatagcaaagcgacgttagtcgtgagctcttgtgaggaaagtcattggctttatcctctttagagttagactgttggggtgggtataaaagatggggtctgtaaaatctttctttcttagaaatttatttcctagttctgtagaaatggttgtattagatgttctctatcatttaataatatacttgtggactaaaagatataagtgctgtataaaatcagccaattatgttaaactagcatatctgcctttattgtgtttgtcattagcctgagtagaaaggcctttaaaatttttttagaaagcatttgaatgcattttgtttggtattgtatttattcaataaagtatttaattagtgctaagtgtgaactggaccctgttgctaagccccagcaagcaatcctaggtagggtttaatccccagtaaaattgccatattgcacatgtcttaatgaagtttgaatgttaaataaattgtatattcactttaaaggt

SEQ ID NO: 4375 - protein, 223 aa, Homo sapiens; identical to SEQ ID NO: 4371

SEQ ID NO: 4376 - DNA, 4181 bp, Homo sapiens
agagcaactggaatgagattgttgataactttgatgatatgaatttaaaggagtctctccttcgtggcatctatgcttacggttttgagaagccttccgctattcagcagagagctattattccctgtattaaagggtatgatgtgattgctcaagctcagtcaggtactggcaagacagccacatttgctatttccatcctgcaacagttggagattgagttcaaggagacccaagcactagtattggcccccaccagagaactggctcaacagatccaaaaggtaattctggcacttggagactatatgggagccacttgtcatgcctgcattggtggaacaaatgttcgaaatgaaatgcaaaaactgcaggctgaagcaccacatattgttgttggtacacccgggagagtgtttgatatgttaaacagaagatacctttctccaaaatggatcaaaatgtttgttttggatgaagcagatgaaatgttgagccgtggttttaaggatcaaatctatgagattttccaaaaactaaacacaagtattcaggtaagcattacttcacccccctcttaaaggtagagatggggtttatttaatgcaggtactgttacaatacaactgatgtgttttgttgtcgttccccctgcttaaagcacttgatgcataactctgtctaccttcattccgtagtaagacagagacgcttggcttcagacattttcctttgggtattaatgtgtaagttgtgctacaacataattttctctttttaaggttgtgttgctttctgccacaatgccaactgatgtgttggaagtgaccaaaaaattcatgagagatccaattcgaattctggtgaaaaaggaagaattgacccttgaaggaatcaaacagttttatattaatgttgagagagaggtaactgtctgattgttagacattattttaccttcttgtataagcactgtgctaaaattgcagacactaggaccatgtcttggtttttgcaataatgctagcagagtacacacaagaagaaaagtaacagcactagattgtaaagactggggtggacctctttcttaatgtccaatgtcctttgtcttaagatttggtgcaatatctcattagacctaacagaatgaagttaatttttataatttctacgttttgagactgggttatgagactggctaagactggccaattttggtattttgggtagagacagtttcactttcttgaaaccctggtctggttggaactctgggctctaagtgctaggatcccaaagggctgggattacaggcattagcactgtggctggcccagaatgaatttttaactgaagagttggaaaaactaaatgactgttaactttaacttctaaacattacaggaatggaagttggatacactttgtgacttgtacgagacactgaccattacacaggctgttatttttctcaatacgaggcgcaaggtggactggctgactgagaagatgcatgccagagacttcacagtttctgctctggtaagaggtgttctaaaatgtctggatttccactaaagcaggattcagactacaatatagctgctaagtgctgtgttgtcgttccccctgcttaaaataaagttgtttcttaactatacctgtctgctattctcctgtagcagccagggacgcttggtctcatacatgttgattaaaattaaataccgacctgactggtgattcttgaattaaggtttattaatttgcagcatggtgacatggaccagaaggagagagatgttatcatgagggaattccggtcagggtcaagtcgtgttctgatcactactgacttgttggtaagtctcttaatgctttttaaaaatctaccaaaagttagctttttggggggcaggtttttaagtaacctttgccaacttgggctatttggaagagtaaaagaccacactccacagtgggctataccacttagtatagttcgctactattttgtggcctacatgacaggtgtcaagtttttttgaatcaatttttaaaacatgccattgtgtttcaggctcgcgggattgatgtgcaacaagtgtctttggttataaattatgatctacctaccaatcgtgaaaactatattcacaggtgagaagccagcatcttggctgtattgaaaaaaattcatacgtttttctactgtgatttgtatgaaaggtaacatcaaatcaaggaatagattcagtaaagtcagtagtgttcagtaagatgatgtaattaaatttgtactagggaaggttgatgagaacaaagtgggaaaacttgtaaacattgcccagattgtggacatagggtttttttccacaattgttggtcttaccttatgcttgagcttttagtgatgttcttgtgtccatgtgtttttcttggtgattttttctatagttgggattttcttggtgtcgcctggtagcaatttgagtgaaccctggtttagttatagtggctttatccctaaataaattgaattgtactttgttatatgatgtaaaaaaagactttttaaaaaatacaggagtcgatagcagcagttggtgacgagatggcactcagaaacggcgttgacgtaatttaggacgtggaatcataagcgaaacagcacactgtttgaataaagagcgagtcggtatttatatttgtttttcttttgtcatgattatttgatttttaagttgctccagctaaggcatttttttgtattagtatttctattagggaacctttcttattaggtggtttgtattgtctggtttctaacatgcaggtagctgtttggcagttaaacacgtttagagtaatttgagttacaacgtgtgaaactgagcaaaaaagcagtgataagtttgggttaccataccaaatatttgttttcccactggaaaaaagtaagttttagaaaatagttaacctttgcagcatttgtttacagtttacagttccagaagtgcgtcgaaatggattacataactgctcttttattcctggtgttcacatctgtcccaggctgacacctgctcttggctggcccactttggtatgggctttaatttcactaccccaaacacgatactgtcatctgctttataataatgctcaagatgcctgataaaaatctcattttgcagccagacaagccttgaatccttttggcactaactgcaaaggaagatttttttctctagatatgcattagcagctagtgctccagttagaagcacgaactataaccttgataagtaaacagcagctggtggttaacaagtggatcgtcatgttcagtagtttatacattatgtgagaagtaacgttctgattctttttcttacacagaattggcagagggggtcgatttgggaggaaaggtgtggctataaactttgttactgaagaagacaagaggattcttcgtgacattgagactttctacaatactacagtggaggagatgcccatgaatgtggctgaccttatttaattcctgggatgagagttttggatgcagtgctcgctgttgctgaataggcgatcacaacgtgcattgtgcttctttctttgggaatatttgaatcttgtctcaatgctcataacggatcagaaatacagattttgatagcaaagcgacgttagtcgtgagctcttgtgaggaaagtcattggctttatcctctttagagttagactgttggggtgggtataaaagatggggtctgtaaaatctttctttcttagaaatttatttcctagttctgtagaaatggttgtattagatgttctctatcatttaataatatacttgtggactaaaagatataagtgctgtataaaatcagccaattatgttaaactagcatatctgcctttattgtgtttgtcattagcctgagtagaaaggcctttaaaatttttttagaaagcatttgaatgcattttgtttggtattgtatttattcaataaagtatttaattagtgctaagtgtgaactggaccctgttgctaagccccagcaagcaatcctaggtagggtttaatccccagtaaaattgccatattgcacatgtcttaatgaagtttgaatgttaaataaattgtatattcactttaaaggt

SEQ ID NO: 4377 - protein, 180 aa, Homo sapiens; identical to SEQ ID NO: 4373

SEQ ID NO: 4378 - DNA, 4426 bp, Homo sapiens
agagcaactggaatgagattgttgataactttgatgatatgaatttaaaggagtctctccttcgtggcatctatgcttacggttttgagaagccttccgctattcagcagagagctattattccctgtattaaagggtatgatgtgattgctcaagctcagtcaggtactggcaagacagccacatttgctatttccatcctgcaacagttggagattgagttcaaggagacccaagcactagtattggcccccaccagagaactggctcaacagatccaaaaggtaattctggcacttggagactatatgggagccacttgtcatgcctgcattggtggaacaaatgttcgaaatgaaatgcaaaaactgcaggctgaagcaccacatattgttgttggtacacccgggagagtgtttgatatgttaaacagaagatacctttctccaaaatggatcaaaatgtttgttttggatgaagcagatgaaatgttgagccgtggttttaaggatcaaatctatgagattttccaaaaactaaacacaagtattcaggttgtgttgctttctgccacaatgccaactgatgtgttggaagtgaccaaaaaattcatgagagatccaattcgaattctggtgaaaaaggaagaattgacccttgaaggaatcaaacagttttatattaatgttgagagagaggtaactgtctgattgttagacattattttaccttcttgtataagcactgtgctaaaattgcagacactaggaccatgtcttggtttttgcaataatgctagcagagtacacacaagaagaaaagtaacagcactagattgtaaagactggggtggacctctttcttaatgtccaatgtcctttgtcttaagatttggtgcaatatctcattagacctaacagaatgaagttaatttttataatttctacgttttgagactgggttatgagactggctaagactggccaattttggtattttgggtagagacagtttcactttcttgaaaccctggtctggttggaactctgggctctaagtgctaggatcccaaagggctgggattacaggcattagcactgtggctggcccagaatgaatttttaactgaagagttggaaaaactaaatgactgttaactttaacttctaaacattacaggaatggaagttggatacactttgtgacttgtacgagacactgaccattacacaggctgttatttttctcaatacgaggcgcaaggtggactggctgactgagaagatgcatgccagagacttcacagtttctgctctggtaagaggtgttctaaaatgtctggatttccactaaagcaggattcagactacaatatagctgctaagtgctgtgttgtcgttccccctgcttaaaataaagttgtttcttaactatacctgtctgctattctcctgtagcagccagggacgcttggtctcatacatgttgattaaaattaaataccgacctgactggtgattcttgaattaaggtttattaatttgcagcatggtgacatggaccagaaggagagagatgttatcatgagggaattccggtcagggtcaagtcgtgttctgatcactactgacttgttggtaagtctcttaatgctttttaaaaatctaccaaaagttagctttttggggggcaggtttttaagtaacctttgccaacttgggctatttggaagagtaaaagaccacactccacagtgggctataccacttagtatagttcgctactattttgtggcctacatgacaggtgtcaagtttttttgaatcaatttttaaaacatgccattgtgtttcaggctcgcgggattgatgtgcaacaagtgtctttggttataaattatgatctacctaccaatcgtgaaaactatattcacaggtgagaagccagcatcttggctgtattgaaaaaaattcatacgtttttctactgtgatttgtatgaaaggtaacatcaaatcaaggaatagattcagtaaagtcagtagtgttcagtaagatgatgtaattaaatttgtactagggaaggttgatgagaacaaagtgggaaaacttgtaaacattgcccagattgtggacatagggtttttttccacaattgttggtcttaccttatgcttgagcttttagtgatgttcttgtgtccatgtgtttttcttggtgattttttctatagttgggattttcttggtgtcgcctggtagcaatttgagtgaaccctggtttagttatagtggctttatccctaaataaattgaattgtactttgttatatgatgtaaaaaaagactttttaaaaaatacaggagtcgatagcagcagttggtgacgagatggcactcagaaacggcgttgacgtaatttaggacgtggaatcataagcgaaacagcacactgtttgaataaagagcgagtcggtatttatatttgtttttcttttgtcatgattatttgatttttaagttgctccagctaaggcatttttttgtattagtatttctattagggaacctttcttattaggtggtttgtattgtctggtttctaacatgcaggtagctgtttggcagttaaacacgtttagagtaatttgagttacaacgtgtgaaactgagcaaaaaagcagtgataagtttgggttaccataccaaatatttgttttcccactggaaaaaagtaagttttagaaaatagttaacctttgcagcatttgtttacagtttacagttccagaagtgcgtcgaaatggattacataactgctcttttattcctggtgttcacatctgtcccaggctgacacctgctcttggctggcccactttggtatgggctttaatttcactaccccaaacacgatactgtcatctgctttataataatgctcaagatgcctgataaaaatctcattttgcagccagacaagccttgaatccttttggcactaactgcaaaggaagatttttttctctagatatgcattagcagctagtgctccagttagaagcacgaactataaccttgataagtaaacagcagctggtggttaacaagtggatcgtcatgttcagtagtttatacattatgtgagaagtaacgttctgattctttttcttacacagaattggcagagggggtcgatttgggaggaaaggtgtggctataaactttgttactgaagaagacaagaggattcttcgtgacattgagactttctacaatactacagtggaggagatgcccatgaatgtggctgaccttatttaattcctgggatgagagttttggatgcagtgctcgctgttgctgaataggcgatcacaacgtgcattgtgcttctttctttgggaatatttgaatcttgtctcaatgctcataacggatcagaaatacagattttgatagcaaagcgacgttagtcgtgagctcttgtgaggaaagtcattggctttatcctctttagagttagactgttggggtgggtataaaagatggggtctgtaaaatctttctttcttagaaatttatttcctagttctgtagaaatggttgtattagatgttctctatcatttaataatatacttgtggactaaaagatataagtgctgtataaaatcagccaattatgttaaactagcatatctgcctttattgtgtttgtcattagcctgagtagaaaggcctttaaaatttttttagaaagcatttgaatgcattttgtttggtattgtatttattcaataaagtatttaattagtgctaagtgtgaactggaccctgttgctaagccccagcaagcaatcctaggtagggtttaatccccagtaaaattgccatattgcacatgtcttaatgaagtttgaatgttaaataaattgtatattcactttaaaggtgcttttggtcattttatttttattacaacttcattatttacaaaaccccccatccagatatattcacgttaacaattctgagataactgctgcatcacagttgcacaaaggctgatgagttgcaaatgttcatcagcaccatctgctaggcatttgtcaacttcctacgagaaaaatttaagaaattagcatccttcaggtagttaaatgttccattgacatgtgcaaagtacctacttacggcaagtttttctgtgataatagacttctgtttatcagataagttattttctacaaccacatcatggagttgattgacgagctgagttgctgcatgaccctcatctattaaatcctataataaaaaaaacttttggtatgatgacttaatattcctttccccaaagttagtaagctgactttaccttgaccacagcttctagtttgtcaaaagagccactctgacaggcagc

SEQ ID NO: 4379 - protein, 223 aa, Homo sapiens; identical to SEQ ID NO: 4371

SEQ ID NO: 4380 - DNA, 4654 bp, Homo sapiens
agagcaactggaatgagattgttgataactttgatgatatgaatttaaaggagtctctccttcgtggcatctatgcttacggttttgagaagccttccgctattcagcagagagctattattccctgtattaaagggtatgatgtgattgctcaagctcagtcaggtactggcaagacagccacatttgctatttccatcctgcaacagttggagattgagttcaaggagacccaagcactagtattggcccccaccagagaactggctcaacagatccaaaaggtaattctggcacttggagactatatgggagccacttgtcatgcctgcattggtggaacaaatgttcgaaatgaaatgcaaaaactgcaggctgaagcaccacatattgttgttggtacacccgggagagtgtttgatatgttaaacagaagatacctttctccaaaatggatcaaaatgtttgttttggatgaagcagatgaaatgttgagccgtggttttaaggatcaaatctatgagattttccaaaaactaaacacaagtattcaggtaagcattacttcacccccctcttaaaggtagagatggggtttatttaatgcaggtactgttacaatacaactgatgtgttttgttgtcgttccccctgcttaaagcacttgatgcataactctgtctaccttcattccgtagtaagacagagacgcttggcttcagacattttcctttgggtattaatgtgtaagttgtgctacaacataattttctctttttaaggttgtgttgctttctgccacaatgccaactgatgtgttggaagtgaccaaaaaattcatgagagatccaattcgaattctggtgaaaaaggaagaattgacccttgaaggaatcaaacagttttatattaatgttgagagagaggtaactgtctgattgttagacattattttaccttcttgtataagcactgtgctaaaattgcagacactaggaccatgtcttggtttttgcaataatgctagcagagtacacacaagaagaaaagtaacagcactagattgtaaagactggggtggacctctttcttaatgtccaatgtcctttgtcttaagatttggtgcaatatctcattagacctaacagaatgaagttaatttttataatttctacgttttgagactgggttatgagactggctaagactggccaattttggtattttgggtagagacagtttcactttcttgaaaccctggtctggttggaactctgggctctaagtgctaggatcccaaagggctgggattacaggcattagcactgtggctggcccagaatgaatttttaactgaagagttggaaaaactaaatgactgttaactttaacttctaaacattacaggaatggaagttggatacactttgtgacttgtacgagacactgaccattacacaggctgttatttttctcaatacgaggcgcaaggtggactggctgactgagaagatgcatgccagagacttcacagtttctgctctggtaagaggtgttctaaaatgtctggatttccactaaagcaggattcagactacaatatagctgctaagtgctgtgttgtcgttccccctgcttaaaataaagttgtttcttaactatacctgtctgctattctcctgtagcagccagggacgcttggtctcatacatgttgattaaaattaaataccgacctgactggtgattcttgaattaaggtttattaatttgcagcatggtgacatggaccagaaggagagagatgttatcatgagggaattccggtcagggtcaagtcgtgttctgatcactactgacttgttggtaagtctcttaatgctttttaaaaatctaccaaaagttagctttttggggggcaggtttttaagtaacctttgccaacttgggctatttggaagagtaaaagaccacactccacagtgggctataccacttagtatagttcgctactattttgtggcctacatgacaggtgtcaagtttttttgaatcaatttttaaaacatgccattgtgtttcaggctcgcgggattgatgtgcaacaagtgtctttggttataaattatgatctacctaccaatcgtgaaaactatattcacaggtgagaagccagcatcttggctgtattgaaaaaaattcatacgtttttctactgtgatttgtatgaaaggtaacatcaaatcaaggaatagattcagtaaagtcagtagtgttcagtaagatgatgtaattaaatttgtactagggaaggttgatgagaacaaagtgggaaaacttgtaaacattgcccagattgtggacatagggtttttttccacaattgttggtcttaccttatgcttgagcttttagtgatgttcttgtgtccatgtgtttttcttggtgattttttctatagttgggattttcttggtgtcgcctggtagcaatttgagtgaaccctggtttagttatagtggctttatccctaaataaattgaattgtactttgttatatgatgtaaaaaaagactttttaaaaaatacaggagtcgatagcagcagttggtgacgagatggcactcagaaacggcgttgacgtaatttaggacgtggaatcataagcgaaacagcacactgtttgaataaagagcgagtcggtatttatatttgtttttcttttgtcatgattatttgatttttaagttgctccagctaaggcatttttttgtattagtatttctattagggaacctttcttattaggtggtttgtattgtctggtttctaacatgcaggtagctgtttggcagttaaacacgtttagagtaatttgagttacaacgtgtgaaactgagcaaaaaagcagtgataagtttgggttaccataccaaatatttgttttcccactggaaaaaagtaagttttagaaaatagttaacctttgcagcatttgtttacagtttacagttccagaagtgcgtcgaaatggattacataactgctcttttattcctggtgttcacatctgtcccaggctgacacctgctcttggctggcccactttggtatgggctttaatttcactaccccaaacacgatactgtcatctgctttataataatgctcaagatgcctgataaaaatctcattttgcagccagacaagccttgaatccttttggcactaactgcaaaggaagatttttttctctagatatgcattagcagctagtgctccagttagaagcacgaactataaccttgataagtaaacagcagctggtggttaacaagtggatcgtcatgttcagtagtttatacattatgtgagaagtaacgttctgattctttttcttacacagaattggcagagggggtcgatttgggaggaaaggtgtggctataaactttgttactgaagaagacaagaggattcttcgtgacattgagactttctacaatactacagtggaggagatgcccatgaatgtggctgaccttatttaattcctgggatgagagttttggatgcagtgctcgctgttgctgaataggcgatcacaacgtgcattgtgcttctttctttgggaatatttgaatcttgtctcaatgctcataacggatcagaaatacagattttgatagcaaagcgacgttagtcgtgagctcttgtgaggaaagtcattggctttatcctctttagagttagactgttggggtgggtataaaagatggggtctgtaaaatctttctttcttagaaatttatttcctagttctgtagaaatggttgtattagatgttctctatcatttaataatatacttgtggactaaaagatataagtgctgtataaaatcagccaattatgttaaactagcatatctgcctttattgtgtttgtcattagcctgagtagaaaggcctttaaaatttttttagaaagcatttgaatgcattttgtttggtattgtatttattcaataaagtatttaattagtgctaagtgtgaactggaccctgttgctaagccccagcaagcaatcctaggtagggtttaatccccagtaaaattgccatattgcacatgtcttaatgaagtttgaatgttaaataaattgtatattcactttaaaggtgcttttggtcattttatttttattacaacttcattatttacaaaaccccccatccagatatattcacgttaacaattctgagataactgctgcatcacagttgcacaaaggctgatgagttgcaaatgttcatcagcaccatctgctaggcatttgtcaacttcctacgagaaaaatttaagaaattagcatccttcaggtagttaaatgttccattgacatgtgcaaagtacctacttacggcaagtttttctgtgataatagacttctgtttatcagataagttattttctacaaccacatcatggagttgattgacgagctgagttgctgcatgaccctcatctattaaatcctataataaaaaaaacttttggtatgatgacttaatattcctttccccaaagttagtaagctgactttaccttgaccacagcttctagtttgtcaaaagagccactctgacaggcagc

SEQ ID NO: 4381 - protein, 180 aa, Homo sapiens; identical to SEQ ID NO: 4373

SEQ ID NO: 4382 - DNA, 4484 bp, Homo sapiens
gatgatatgaatttaaaggagtctctccttcgtggcatctatgcttacggttttgagaagccttccgctattcagcagagagctattattccctgtattaaaggtaaaagaaactggcatttttaggaaattgttctacatagacatgaaccataaaagggaaagtaacctctgggggactagcacctgtttgtattccttaaagtgaaatgatggcaatcatctttcgggactgacctgaaatgaagagaatactcattgctgatcacttgattatttgggcataatgttccaaatggaatacatggtgtgaagtagaagtgacaatttgatgtgggatcggtaaatgtgtatcctactttttttagggtatgatgtgattgctcaagctcagtcaggtactggcaagacagccacatttgctatttccatcctgcaacagttggagattgagttcaaggagacccaagcactagtattggcccccaccagagaactggctcaacaggtattgatagtgtagttcaaaaaaactgcttgcgtgttgcataggtttcaggtttcacaactgtgaagaatttaaaacttagtataaattggtcctaccagatccctccttttaattgtccatgcatgcagggagtttttgttgaaagttttaaaagaactgggtatgcaggtatggtttgtagggttgtatactaatagattgagaatccgaagcgctctcttggatgtactagatctgtccccattttttaagtttgaatgcagttgtgcaacatgaaaactgcagtgacatgttaccatttgactgtctccgtagttcgtgatgcatctgttgcatgctatgttttcaaagctcactgctatattggctttgaagtaaaccttcctaataaagctgtaggctttattgaggtcaggattatataaggcacaataccctctgggggaaaaaaatcatttgccctagctgtaattacagaacataaatttcactacgtactccctacctacagtgaagaataatgtaggaaacgttattcttggattgtctagctgatgcgtggagcagcagcatcccaagtttgacaaggcataagaaagacattaagggaattttaccttgcagcagttaggtcgtctgcattttaagcttggaagtagttttgtgctgtgcatgcataaaagctgttggcagaccagattatatttgcctttatgctttaaaaattagtcattgatcctggagttctgcggaataataattaaggcttgggttttagatccaaaaggtaattctggcacttggagactatatgggagccacttgtcatgcctgcattggtggaacaaatgttcgaaatgaaatgcaaaaactgcaggctgaagcaccacatattgttgttggtacacccgggagagtgtttgatatgttaaacagaagatacctttctccaaaatggatcaaaatgtttgttttggatgaagcagatgaaatgttgagccgtggttttaaggatcaaatctatgagattttccaaaaactaaacacaagtattcaggtaagcattacttcacccccctcttaaaggtagagatggggtttatttaatgcaggtactgttacaatacaactgatgtgttttgttgtcgttccccctgcttaaagcacttgatgcataactctgtctaccttcattccgtagtaagacagagacgcttggcttcagacattttcctttgggtattaatgtgtaagttgtgctacaacataattttctctttttaaggttgtgttgctttctgccacaatgccaactgatgtgttggaagtgaccaaaaaattcatgagagatccaattcgaattctggtgaaaaaggaagaattgacccttgaaggaatcaaacagttttatattaatgttgagagagaggaatggaagttggatacactttgtgacttgtacgagacactgaccattacacaggctgttatttttctcaatacgaggcgcaaggtggactggctgactgagaagatgcatgccagagacttcacagtttctgctctgcatggtgacatggaccagaaggagagagatgttatcatgagggaattccggtcagggtcaagtcgtgttctgatcactactgacttgttggtaagtctcttaatgctttttaaaaatctaccaaaagttagctttttggggggcaggtttttaagtaacctttgccaacttgggctatttggaagagtaaaagaccacactccacagtgggctataccacttagtatagttcgctactattttgtggcctacatgacaggtgtcaagtttttttgaatcaatttttaaaacatgccattgtgtttcaggctcgcgggattgatgtgcaacaagtgtctttggttataaattatgatctacctaccaatcgtgaaaactatattcacaggtgagaagccagcatcttggctgtattgaaaaaaattcatacgtttttctactgtgatttgtatgaaaggtaacatcaaatcaaggaatagattcagtaaagtcagtagtgttcagtaagatgatgtaattaaatttgtactagggaaggttgatgagaacaaagtgggaaaacttgtaaacattgcccagattgtggacatagggtttttttccacaattgttggtcttaccttatgcttgagcttttagtgatgttcttgtgtccatgtgtttttcttggtgattttttctatagttgggattttcttggtgtcgcctggtagcaatttgagtgaaccctggtttagttatagtggctttatccctaaataaattgaattgtactttgttatatgatgtaaaaaaagactttttaaaaaatacaggagtcgatagcagcagttggtgacgagatggcactcagaaacggcgttgacgtaatttaggacgtggaatcataagcgaaacagcacactgtttgaataaagagcgagtcggtatttatatttgtttttcttttgtcatgattatttgatttttaagttgctccagctaaggcatttttttgtattagtatttctattagggaacctttcttattaggtggtttgtattgtctggtttctaacatgcaggtagctgtttggcagttaaacacgtttagagtaatttgagttacaacgtgtgaaactgagcaaaaaagcagtgataagtttgggttaccataccaaatatttgttttcccactggaaaaaagtaagttttagaaaatagttaacctttgcagcatttgtttacagtttacagttccagaagtgcgtcgaaatggattacataactgctcttttattcctggtgttcacatctgtcccaggctgacacctgctcttggctggcccactttggtatgggctttaatttcactaccccaaacacgatactgtcatctgctttataataatgctcaagatgcctgataaaaatctcattttgcagccagacaagccttgaatccttttggcactaactgcaaaggaagatttttttctctagatatgcattagcagctagtgctccagttagaagcacgaactataaccttgataagtaaacagcagctggtggttaacaagtggatcgtcatgttcagtagtttatacattatgtgagaagtaacgttctgattctttttcttacacagaattggcagagggggtcgatttgggaggaaaggtgtggctataaactttgttactgaagaagacaagaggattcttcgtgacattgagactttctacaatactacagtggaggagatgcccatgaatgtggctgaccttatttaattcctgggatgagagttttggatgcagtgctcgctgttgctgaataggcgatcacaacgtgcattgtgcttctttctttgggaatatttgaatcttgtctcaatgctcataacggatcagaaatacagattttgatagcaaagcgacgttagtcgtgagctcttgtgaggaaagtcattggctttatcctctttagagttagactgttggggtgggtataaaagatggggtctgtaaaatctttctttcttagaaatttatttcctagttctgtagaaatggttgtattagatgttctctatcatttaataatatacttgtggactaaaagatataagtgctgtataaaatcagccaattatgttaaactagcatatctgcctttattgtgtttgtcattagcctgagtagaaaggcctttaaaatttttttagaaagcatttgaatgcattttgtttggtattgtatttattcaataaagtatttaattagtgctaagtgtgaactggaccctgttgctaagccccagcaagcaatcctaggtagggtttaatccccagtaaaattgccatattgcacatgtcttaatgaagtttgaatgttaaataaattgtatattcactttaaaggt

SEQ ID NO: 4383 - protein, 178 aa, Homo sapiens
MPTDVLEVTKKFMRDPIRILVKKEELTLEGIKQFYINVEREEWKLDTLCDLYETLTITQAVIFLNTRRKVDWLTEKMHARDFTVSALHGDMDQKERDVIMREFRSGSSRVLITTDLLVSLLMLFKNLPKVSFLGGRFLSNLCQLGLFGRVKDHTPQWAIPLSIVRYYFVAYMTGVKFF

SEQ ID NO: 4384 - DNA, 1999 bp, Homo sapiens
ccagatccctccttttaattgtccatgcatgcagggagtttttgttgaaagttttaaaagaactgggtatgcaggtatggtttgtagggttgtatactaatagattgagaatccgaagcgctctcttggatgtactagatctgtccccattttttaagtttgaatgcagttgtgcaacatgaaaactgcagtgacatgttaccatttgactgtctccgtagttcgtgatgcatctgttgcatgctatgttttcaaagctcactgctatattggctttgaagtaaaccttcctaataaagctgtaggctttattgaggtcaggattatataaggcacaataccctctgggggaaaaaaatcatttgccctagctgtaattacagaacataaatttcactacgtactccctacctacagtgaagaataatgtaggaaacgttattcttggattgtctagctgatgcgtggagcagcagcatcccaagtttgacaaggcataagaaagacattaagggaattttaccttgcagcagttaggtcgtctgcattttaagcttggaagtagttttgtgctgtgcatgcataaaagctgttggcagaccagattatatttgcctttatgctttaaaaattagtcattgatcctggagttctgcggaataataattaaggcttgggttttagatccaaaaggtaattctggcacttggagactatatgggagccacttgtcatgcctgcattggtggaacaaatgttcgaaatgaaatgcaaaaactgcaggctgaagcaccacatattgttgttggtacacccgggagagtgtttgatatgttaaacagaagatacctttctccaaaatggatcaaaatgtttgttttggatgaagcagatgaaatgttgagccgtggttttaaggatcaaatctatgagattttccaaaaactaaacacaagtattcaggttgtgttgctttctgccacaatgccaactgatgtgttggaagtgaccaaaaaattcatgagagatccaattcgaattctggtgaaaaaggaagaattgacccttgaaggaatcaaacagttttatattaatgttgagagagaggaatggaagttggatacactttgtgacttgtacgagacactgaccattacacaggctgttatttttctcaatacgaggcgcaaggtggactggctgactgagaagatgcatgccagagacttcacagtttctgctctgcatggtgacatggaccagaaggagagagatgttatcatgagggaattccggtcagggtcaagtcgtgttctgatcactactgacttgttggctcgcgggattgatgtgcaacaagtgtctttggttataaattatgatctacctaccaatcgtgaaaactatattcacagaattggcagagggggtcgatttgggaggaaaggtgtggctataaactttgttactgaagaagacaagaggattcttcgtgacattgagactttctacaatactacagtggaggagatgcccatgaatgtggctgaccttatttaattcctgggatgagagttttggatgcagtgctcgctgttgctgaataggcgatcacaacgtgcattgtgcttctttctttgggaatatttgaatcttgtctcaatgctcataacggatcagaaatacagattttgatagcaaagcgacgttagtcgtgagctcttgtgaggaaagtcattggctttatcctctttagagttagactgttggggtgggtataaaagatggggtctgtaaaatctttctttcttagaaatttatttcctagttctgtagaaatggttgtattagatgttctctatcatttaataatatacttgtggactaaaagatataagtgctgtataaaatcagccaattatgttaaactagcatatctgcctttattgtgtttgtcattagcctgagtagaaaggcctttaaaatttttttagaaagc

SEQ ID NO: 4385 - protein, 280 aa, Homo sapiens; identical to SEQ ID NO: 4363

SEQ ID NO: 4386 - DNA, 2056 bp, Homo sapiens
ccagatccctccttttaattgtccatgcatgcagggagtttttgttgaaagttttaaaagaactgggtatgcaggtatggtttgtagggttgtatactaatagattgagaatccgaagcgctctcttggatgtactagatctgtccccattttttaagtttgaatgcagttgtgcaacatgaaaactgcagtgacatgttaccatttgactgtctccgtagttcgtgatgcatctgttgcatgctatgttttcaaagctcactgctatattggctttgaagtaaaccttcctaataaagctgtaggctttattgaggtcaggattatataaggcacaataccctctgggggaaaaaaatcatttgccctagctgtaattacagaacataaatttcactacgtactccctacctacagtgaagaataatgtaggaaacgttattcttggattgtctagctgatgcgtggagcagcagcatcccaagtttgacaaggcataagaaagacattaagggaattttaccttgcagcagttaggtcgtctgcattttaagcttggaagtagttttgtgctgtgcatgcataaaagctgttggcagaccagattatatttgcctttatgctttaaaaattagtcattgatcctggagttctgcggaataataattaaggcttgggttttagatccaaaaggtaattctggcacttggagactatatgggagccacttgtcatgcctgcattggtggaacaaatgttcgaaatgaaatgcaaaaactgcaggctgaagcaccacatattgttgttggtacacccgggagagtgtttgatatgttaaacagaagatacctttctccaaaatggatcaaaatgtttgttttggatgaagcagatgaaatgttgagccgtggttttaaggatcaaatctatgagattttccaaaaactaaacacaagtattcaggttgtgttgctttctgccacaatgccaactgatgtgttggaagtgaccaaaaaattcatgagagatccaattcgaattctggtgaaaaaggaagaattgacccttgaaggaatcaaacagttttatattaatgttgagagagaggaatggaagttggatacactttgtgacttgtacgagacactgaccattacacaggctgttatttttctcaatacgaggcgcaaggtggactggctgactgagaagatgcatgccagagacttcacagtttctgctctgcatggtgacatggaccagaaggagagagatgttatcatgagggaattccggtcagggtcaagtcgtgttctgatcactactgacttgttggctcgcgggattgatgtgcaacaagtgtctttggttataaattatgatctacctaccaatcgtgaaaactatattcacagaattggcagagggggtcgatttgggaggaaaggtgtggctataaactttgttactgaagaagacaagaggattcttcgtgacattgagactttctacaatactacagtggaggagatgcccatgaatgtggctgaccttatttaattcctgggatgagagttttggatgcagtgctcgctgttgctgaataggcgatcacaacgtgcattgtgcttctttctttgggaatatttgaatcttgtctcaatgctcataacggatcagaaatacagattttgatagcaaagcgacgttagtcgtgagctcttgtgaggaaagtcattggctttatcctctttagagttagactgttggggtgggtataaaagatggggtctgtaaaatctttctttcttagaaatttatttcctagttctgtagaaatggttgtattagatgttctctatcatttaataatatacttgtggactaaaagatataagtgctgtataaaatcagccaattatgttaaactagcatatctgcctttattgtgtttgtcattagcctgagtagaaaggcctttaaaatttttttagaaagcatttgaatgcattttgtttggtattgtatttattcaataaagtatttaattagtgct

SEQ ID NO: 4387 - protein, 280 aa, Homo sapiens; identical to SEQ ID NO: 4363

SEQ ID NO: 4388 - DNA, 4455 bp, Homo sapiens
ccagatccctccttttaattgtccatgcatgcagggagtttttgttgaaagttttaaaagaactgggtatgcaggtatggtttgtagggttgtatactaatagattgagaatccgaagcgctctcttggatgtactagatctgtccccattttttaagtttgaatgcagttgtgcaacatgaaaactgcagtgacatgttaccatttgactgtctccgtagttcgtgatgcatctgttgcatgctatgttttcaaagctcactgctatattggctttgaagtaaaccttcctaataaagctgtaggctttattgaggtcaggattatataaggcacaataccctctgggggaaaaaaatcatttgccctagctgtaattacagaacataaatttcactacgtactccctacctacagtgaagaataatgtaggaaacgttattcttggattgtctagctgatgcgtggagcagcagcatcccaagtttgacaaggcataagaaagacattaagggaattttaccttgcagcagttaggtcgtctgcattttaagcttggaagtagttttgtgctgtgcatgcataaaagctgttggcagaccagattatatttgcctttatgctttaaaaattagtcattgatcctggagttctgcggaataataattaaggcttgggttttagatccaaaaggtaattctggcacttggagactatatgggagccacttgtcatgcctgcattggtggaacaaatgttcgaaatgaaatgcaaaaactgcaggctgaagcaccacatattgttgttggtacacccgggagagtgtttgatatgttaaacagaagatacctttctccaaaatggatcaaaatgtttgttttggatgaagcagatgaaatgttgagccgtggttttaaggatcaaatctatgagattttccaaaaactaaacacaagtattcaggtaagcattacttcacccccctcttaaaggtagagatggggtttatttaatgcaggtactgttacaatacaactgatgtgttttgttgtcgttccccctgcttaaagcacttgatgcataactctgtctaccttcattccgtagtaagacagagacgcttggcttcagacattttcctttgggtattaatgtgtaagttgtgctacaacataattttctctttttaaggttgtgttgctttctgccacaatgccaactgatgtgttggaagtgaccaaaaaattcatgagagatccaattcgaattctggtgaaaaaggaagaattgacccttgaaggaatcaaacagttttatattaatgttgagagagaggtaactgtctgattgttagacattattttaccttcttgtataagcactgtgctaaaattgcagacactaggaccatgtcttggtttttgcaataatgctagcagagtacacacaagaagaaaagtaacagcactagattgtaaagactggggtggacctctttcttaatgtccaatgtcctttgtcttaagatttggtgcaatatctcattagacctaacagaatgaagttaatttttataatttctacgttttgagactgggttatgagactggctaagactggccaattttggtattttgggtagagacagtttcactttcttgaaaccctggtctggttggaactctgggctctaagtgctaggatcccaaagggctgggattacaggcattagcactgtggctggcccagaatgaatttttaactgaagagttggaaaaactaaatgactgttaactttaacttctaaacattacaggaatggaagttggatacactttgtgacttgtacgagacactgaccattacacaggctgttatttttctcaatacgaggcgcaaggtggactggctgactgagaagatgcatgccagagacttcacagtttctgctctggtaagaggtgttctaaaatgtctggatttccactaaagcaggattcagactacaatatagctgctaagtgctgtgttgtcgttccccctgcttaaaataaagttgtttcttaactatacctgtctgctattctcctgtagcagccagggacgcttggtctcatacatgttgattaaaattaaataccgacctgactggtgattcttgaattaaggtttattaatttgcagcatggtgacatggaccagaaggagagagatgttatcatgagggaattccggtcagggtcaagtcgtgttctgatcactactgacttgttggtaagtctcttaatgctttttaaaaatctaccaaaagttagctttttggggggcaggtttttaagtaacctttgccaacttgggctatttggaagagtaaaagaccacactccacagtgggctataccacttagtatagttcgctactattttgtggcctacatgacaggtgtcaagtttttttgaatcaatttttaaaacatgccattgtgtttcaggctcgcgggattgatgtgcaacaagtgtctttggttataaattatgatctacctaccaatcgtgaaaactatattcacaggtgagaagccagcatcttggctgtattgaaaaaaattcatacgtttttctactgtgatttgtatgaaaggtaacatcaaatcaaggaatagattcagtaaagtcagtagtgttcagtaagatgatgtaattaaatttgtactagggaaggttgatgagaacaaagtgggaaaacttgtaaacattgcccagattgtggacatagggtttttttccacaattgttggtcttaccttatgcttgagcttttagtgatgttcttgtgtccatgtgtttttcttggtgattttttctatagttgggattttcttggtgtcgcctggtagcaatttgagtgaaccctggtttagttatagtggctttatccctaaataaattgaattgtactttgttatatgatgtaaaaaaagactttttaaaaaatacaggagtcgatagcagcagttggtgacgagatggcactcagaaacggcgttgacgtaatttaggacgtggaatcataagcgaaacagcacactgtttgaataaagagcgagtcggtatttatatttgtttttcttttgtcatgattatttgatttttaagttgctccagctaaggcatttttttgtattagtatttctattagggaacctttcttattaggtggtttgtattgtctggtttctaacatgcaggtagctgtttggcagttaaacacgtttagagtaatttgagttacaacgtgtgaaactgagcaaaaaagcagtgataagtttgggttaccataccaaatatttgttttcccactggaaaaaagtaagttttagaaaatagttaacctttgcagcatttgtttacagtttacagttccagaagtgcgtcgaaatggattacataactgctcttttattcctggtgttcacatctgtcccaggctgacacctgctcttggctggcccactttggtatgggctttaatttcactaccccaaacacgatactgtcatctgctttataataatgctcaagatgcctgataaaaatctcattttgcagccagacaagccttgaatccttttggcactaactgcaaaggaagatttttttctctagatatgcattagcagctagtgctccagttagaagcacgaactataaccttgataagtaaacagcagctggtggttaacaagtggatcgtcatgttcagtagtttatacattatgtgagaagtaacgttctgattctttttcttacacagaattggcagagggggtcgatttgggaggaaaggtgtggctataaactttgttactgaagaagacaagaggattcttcgtgacattgagactttctacaatactacagtggaggagatgcccatgaatgtggctgaccttatttaattcctgggatgagagttttggatgcagtgctcgctgttgctgaataggcgatcacaacgtgcattgtgcttctttctttgggaatatttgaatcttgtctcaatgctcataacggatcagaaatacagattttgatagcaaagcgacgttagtcgtgagctcttgtgaggaaagtcattggctttatcctctttagagttagactgttggggtgggtataaaagatggggtctgtaaaatctttctttcttagaaatttatttcctagttctgtagaaatggttgtattagatgttctctatcatttaataatatacttgtggactaaaagatataagtgctgtataaaatcagccaattatgttaaactagcatatctgcctttattgtgtttgtcattagcctgagtagaaaggcctttaaaatttttttagaaagcatttgaatgcattttgtttggtattgtatttattcaataaagtatttaattagtgct

SEQ ID NO: 4389 - protein, 90 aa, Homo sapiens [sequence omitted]

SEQ ID NO: 4390 - DNA, 4590 bp, Homo sapiens
ccagatccctccttttaattgtccatgcatgcagggagtttttgttgaaagttttaaaagaactgggtatgcaggtatggtttgtagggttgtatactaatagattgagaatccgaagcgctctcttggatgtactagatctgtccccattttttaagtttgaatgcagttgtgcaacatgaaaactgcagtgacatgttaccatttgactgtctccgtagttcgtgatgcatctgttgcatgctatgttttcaaagctcactgctatattggctttgaagtaaaccttcctaataaagctgtaggctttattgaggtcaggattatataaggcacaataccctctgggggaaaaaaatcatttgccctagctgtaattacagaacataaatttcactacgtactccctacctacagtgaagaataatgtaggaaacgttattcttggattgtctagctgatgcgtggagcagcagcatcccaagtttgacaaggcataagaaagacattaagggaattttaccttgcagcagttaggtcgtctgcattttaagcttggaagtagttttgtgctgtgcatgcataaaagctgttggcagaccagattatatttgcctttatgctttaaaaattagtcattgatcctggagttctgcggaataataattaaggcttgggttttagatccaaaaggtaattctggcacttggagactatatgggagccacttgtcatgcctgcattggtggaacaaatgttcgaaatgaaatgcaaaaactgcaggctgaagcaccacatattgttgttggtacacccgggagagtgtttgatatgttaaacagaagatacctttctccaaaatggatcaaaatgtttgttttggatgaagcagatgaaatgttgagccgtggttttaaggatcaaatctatgagattttccaaaaactaaacacaagtattcaggtaagcattacttcacccccctcttaaaggtagagatggggtttatttaatgcaggtactgttacaatacaactgatgtgttttgttgtcgttccccctgcttaaagcacttgatgcataactctgtctaccttcattccgtagtaagacagagacgcttggcttcagacattttcctttgggtattaatgtgtaagttgtgctacaacataattttctctttttaaggttgtgttgctttctgccacaatgccaactgatgtgttggaagtgaccaaaaaattcatgagagatccaattcgaattctggtgaaaaaggaagaattgacccttgaaggaatcaaacagttttatattaatgttgagagagaggtaactgtctgattgttagacattattttaccttcttgtataagcactgtgctaaaattgcagacactaggaccatgtcttggtttttgcaataatgctagcagagtacacacaagaagaaaagtaacagcactagattgtaaagactggggtggacctctttcttaatgtccaatgtcctttgtcttaagatttggtgcaatatctcattagacctaacagaatgaagttaatttttataatttctacgttttgagactgggttatgagactggctaagactggccaattttggtattttgggtagagacagtttcactttcttgaaaccctggtctggttggaactctgggctctaagtgctaggatcccaaagggctgggattacaggcattagcactgtggctggcccagaatgaatttttaactgaagagttggaaaaactaaatgactgttaactttaacttctaaacattacaggaatggaagttggatacactttgtgacttgtacgagacactgaccattacacaggctgttatttttctcaatacgaggcgcaaggtggactggctgactgagaagatgcatgccagagacttcacagtttctgctctggtaagaggtgttctaaaatgtctggatttccactaaagcaggattcagactacaatatagctgctaagtgctgtgttgtcgttccccctgcttaaaataaagttgtttcttaactatacctgtctgctattctcctgtagcagccagggacgcttggtctcatacatgttgattaaaattaaataccgacctgactggtgattcttgaattaaggtttattaatttgcagcatggtgacatggaccagaaggagagagatgttatcatgagggaattccggtcagggtcaagtcgtgttctgatcactactgacttgttggtaagtctcttaatgctttttaaaaatctaccaaaagttagctttttggggggcaggtttttaagtaacctttgccaacttgggctatttggaagagtaaaagaccacactccacagtgggctataccacttagtatagttcgctactattttgtggcctacatgacaggtgtcaagtttttttgaatcaatttttaaaacatgccattgtgtttcaggctcgcgggattgatgtgcaacaagtgtctttggttataaattatgatctacctaccaatcgtgaaaactatattcacaggtgagaagccagcatcttggctgtattgaaaaaaattcatacgtttttctactgtgatttgtatgaaaggtaacatcaaatcaaggaatagattcagtaaagtcagtagtgttcagtaagatgatgtaattaaatttgtactagggaaggttgatgagaacaaagtgggaaaacttgtaaacattgcccagattgtggacatagggtttttttccacaattgttggtcttaccttatgcttgagcttttagtgatgttcttgtgtccatgtgtttttcttggtgattttttctatagttgggattttcttggtgtcgcctggtagcaatttgagtgaaccctggtttagttatagtggctttatccctaaataaattgaattgtactttgttatatgatgtaaaaaaagactttttaaaaaatacaggagtcgatagcagcagttggtgacgagatggcactcagaaacggcgttgacgtaatttaggacgtggaatcataagcgaaacagcacactgtttgaataaagagcgagtcggtatttatatttgtttttcttttgtcatgattatttgatttttaagttgctccagctaaggcatttttttgtattagtatttctattagggaacctttcttattaggtggtttgtattgtctggtttctaacatgcaggtagctgtttggcagttaaacacgtttagagtaatttgagttacaacgtgtgaaactgagcaaaaaagcagtgataagtttgggttaccataccaaatatttgttttcccactggaaaaaagtaagttttagaaaatagttaacctttgcagcatttgtttacagtttacagttccagaagtgcgtcgaaatggattacataactgctcttttattcctggtgttcacatctgtcccaggctgacacctgctcttggctggcccactttggtatgggctttaatttcactaccccaaacacgatactgtcatctgctttataataatgctcaagatgcctgataaaaatctcattttgcagccagacaagccttgaatccttttggcactaactgcaaaggaagatttttttctctagatatgcattagcagctagtgctccagttagaagcacgaactataaccttgataagtaaacagcagctggtggttaacaagtggatcgtcatgttcagtagtttatacattatgtgagaagtaacgttctgattctttttcttacacagaattggcagagggggtcgatttgggaggaaaggtgtggctataaactttgttactgaagaagacaagaggattcttcgtgacattgagactttctacaatactacagtggaggagatgcccatgaatgtggctgaccttatttaattcctgggatgagagttttggatgcagtgctcgctgttgctgaataggcgatcacaacgtgcattgtgcttctttctttgggaatatttgaatcttgtctcaatgctcataacggatcagaaatacagattttgatagcaaagcgacgttagtcgtgagctcttgtgaggaaagtcattggctttatcctctttagagttagactgttggggtgggtataaaagatggggtctgtaaaatctttctttcttagaaatttatttcctagttctgtagaaatggttgtattagatgttctctatcatttaataatatacttgtggactaaaagatataagtgctgtataaaatcagccaattatgttaaactagcatatctgcctttattgtgtttgtcattagcctgagtagaaaggcctttaaaatttttttagaaagcatttgaatgcattttgtttggtattgtatttattcaataaagtatttaattagtgctaagtgtgaactggaccctgttgctaagccccagcaagcaatcctaggtagggtttaatccccagtaaaattgccatattgcacatgtcttaatgaagtttgaatgttaaataaattgtatattcactttaaaggt

SEQ ID NO: 4391 - protein, 90 aa, Homo sapiens [sequence omitted]

SEQ ID NO: 4392 - DNA, 2191 bp, Homo sapiens
ccagatccctccttttaattgtccatgcatgcagggagtttttgttgaaagttttaaaagaactgggtatgcaggtatggtttgtagggttgtatactaatagattgagaatccgaagcgctctcttggatgtactagatctgtccccattttttaagtttgaatgcagttgtgcaacatgaaaactgcagtgacatgttaccatttgactgtctccgtagttcgtgatgcatctgttgcatgctatgttttcaaagctcactgctatattggctttgaagtaaaccttcctaataaagctgtaggctttattgaggtcaggattatataaggcacaataccctctgggggaaaaaaatcatttgccctagctgtaattacagaacataaatttcactacgtactccctacctacagtgaagaataatgtaggaaacgttattcttggattgtctagctgatgcgtggagcagcagcatcccaagtttgacaaggcataagaaagacattaagggaattttaccttgcagcagttaggtcgtctgcattttaagcttggaagtagttttgtgctgtgcatgcataaaagctgttggcagaccagattatatttgcctttatgctttaaaaattagtcattgatcctggagttctgcggaataataattaaggcttgggttttagatccaaaaggtaattctggcacttggagactatatgggagccacttgtcatgcctgcattggtggaacaaatgttcgaaatgaaatgcaaaaactgcaggctgaagcaccacatattgttgttggtacacccgggagagtgtttgatatgttaaacagaagatacctttctccaaaatggatcaaaatgtttgttttggatgaagcagatgaaatgttgagccgtggttttaaggatcaaatctatgagattttccaaaaactaaacacaagtattcaggttgtgttgctttctgccacaatgccaactgatgtgttggaagtgaccaaaaaattcatgagagatccaattcgaattctggtgaaaaaggaagaattgacccttgaaggaatcaaacagttttatattaatgttgagagagaggaatggaagttggatacactttgtgacttgtacgagacactgaccattacacaggctgttatttttctcaatacgaggcgcaaggtggactggctgactgagaagatgcatgccagagacttcacagtttctgctctgcatggtgacatggaccagaaggagagagatgttatcatgagggaattccggtcagggtcaagtcgtgttctgatcactactgacttgttggctcgcgggattgatgtgcaacaagtgtctttggttataaattatgatctacctaccaatcgtgaaaactatattcacagaattggcagagggggtcgatttgggaggaaaggtgtggctataaactttgttactgaagaagacaagaggattcttcgtgacattgagactttctacaatactacagtggaggagatgcccatgaatgtggctgaccttatttaattcctgggatgagagttttggatgcagtgctcgctgttgctgaataggcgatcacaacgtgcattgtgcttctttctttgggaatatttgaatcttgtctcaatgctcataacggatcagaaatacagattttgatagcaaagcgacgttagtcgtgagctcttgtgaggaaagtcattggctttatcctctttagagttagactgttggggtgggtataaaagatggggtctgtaaaatctttctttcttagaaatttatttcctagttctgtagaaatggttgtattagatgttctctatcatttaataatatacttgtggactaaaagatataagtgctgtataaaatcagccaattatgttaaactagcatatctgcctttattgtgtttgtcattagcctgagtagaaaggcctttaaaatttttttagaaagcatttgaatgcattttgtttggtattgtatttattcaataaagtatttaattagtgctaagtgtgaactggaccctgttgctaagccccagcaagcaatcctaggtagggtttaatccccagtaaaattgccatattgcacatgtcttaatgaagtttgaatgttaaataaattgtatattcactttaaaggt

SEQ ID NO: 4393 - protein, 280 aa, Homo sapiens; identical to SEQ ID NO: 4363

SEQ ID NO: 4394 - DNA, 5063 bp, Homo sapiens
ccagatccctccttttaattgtccatgcatgcagggagtttttgttgaaagttttaaaagaactgggtatgcaggtatggtttgtagggttgtatactaatagattgagaatccgaagcgctctcttggatgtactagatctgtccccattttttaagtttgaatgcagttgtgcaacatgaaaactgcagtgacatgttaccatttgactgtctccgtagttcgtgatgcatctgttgcatgctatgttttcaaagctcactgctatattggctttgaagtaaaccttcctaataaagctgtaggctttattgaggtcaggattatataaggcacaataccctctgggggaaaaaaatcatttgccctagctgtaattacagaacataaatttcactacgtactccctacctacagtgaagaataatgtaggaaacgttattcttggattgtctagctgatgcgtggagcagcagcatcccaagtttgacaaggcataagaaagacattaagggaattttaccttgcagcagttaggtcgtctgcattttaagcttggaagtagttttgtgctgtgcatgcataaaagctgttggcagaccagattatatttgcctttatgctttaaaaattagtcattgatcctggagttctgcggaataataattaaggcttgggttttagatccaaaaggtaattctggcacttggagactatatgggagccacttgtcatgcctgcattggtggaacaaatgttcgaaatgaaatgcaaaaactgcaggctgaagcaccacatattgttgttggtacacccgggagagtgtttgatatgttaaacagaagatacctttctccaaaatggatcaaaatgtttgttttggatgaagcagatgaaatgttgagccgtggttttaaggatcaaatctatgagattttccaaaaactaaacacaagtattcaggtaagcattacttcacccccctcttaaaggtagagatggggtttatttaatgcaggtactgttacaatacaactgatgtgttttgttgtcgttccccctgcttaaagcacttgatgcataactctgtctaccttcattccgtagtaagacagagacgcttggcttcagacattttcctttgggtattaatgtgtaagttgtgctacaacataattttctctttttaaggttgtgttgctttctgccacaatgccaactgatgtgttggaagtgaccaaaaaattcatgagagatccaattcgaattctggtgaaaaaggaagaattgacccttgaaggaatcaaacagttttatattaatgttgagagagaggtaactgtctgattgttagacattattttaccttcttgtataagcactgtgctaaaattgcagacactaggaccatgtcttggtttttgcaataatgctagcagagtacacacaagaagaaaagtaacagcactagattgtaaagactggggtggacctctttcttaatgtccaatgtcctttgtcttaagatttggtgcaatatctcattagacctaacagaatgaagttaatttttataatttctacgttttgagactgggttatgagactggctaagactggccaattttggtattttgggtagagacagtttcactttcttgaaaccctggtctggttggaactctgggctctaagtgctaggatcccaaagggctgggattacaggcattagcactgtggctggcccagaatgaatttttaactgaagagttggaaaaactaaatgactgttaactttaacttctaaacattacaggaatggaagttggatacactttgtgacttgtacgagacactgaccattacacaggctgttatttttctcaatacgaggcgcaaggtggactggctgactgagaagatgcatgccagagacttcacagtttctgctctggtaagaggtgttctaaaatgtctggatttccactaaagcaggattcagactacaatatagctgctaagtgctgtgttgtcgttccccctgcttaaaataaagttgtttcttaactatacctgtctgctattctcctgtagcagccagggacgcttggtctcatacatgttgattaaaattaaataccgacctgactggtgattcttgaattaaggtttattaatttgcagcatggtgacatggaccagaaggagagagatgttatcatgagggaattccggtcagggtcaagtcgtgttctgatcactactgacttgttggtaagtctcttaatgctttttaaaaatctaccaaaagttagctttttggggggcaggtttttaagtaacctttgccaacttgggctatttggaagagtaaaagaccacactccacagtgggctataccacttagtatagttcgctactattttgtggcctacatgacaggtgtcaagtttttttgaatcaatttttaaaacatgccattgtgtttcaggctcgcgggattgatgtgcaacaagtgtctttggttataaattatgatctacctaccaatcgtgaaaactatattcacaggtgagaagccagcatcttggctgtattgaaaaaaattcatacgtttttctactgtgatttgtatgaaaggtaacatcaaatcaaggaatagattcagtaaagtcagtagtgttcagtaagatgatgtaattaaatttgtactagggaaggttgatgagaacaaagtgggaaaacttgtaaacattgcccagattgtggacatagggtttttttccacaattgttggtcttaccttatgcttgagcttttagtgatgttcttgtgtccatgtgtttttcttggtgattttttctatagttgggattttcttggtgtcgcctggtagcaatttgagtgaaccctggtttagttatagtggctttatccctaaataaattgaattgtactttgttatatgatgtaaaaaaagactttttaaaaaatacaggagtcgatagcagcagttggtgacgagatggcactcagaaacggcgttgacgtaatttaggacgtggaatcataagcgaaacagcacactgtttgaataaagagcgagtcggtatttatatttgtttttcttttgtcatgattatttgatttttaagttgctccagctaaggcatttttttgtattagtatttctattagggaacctttcttattaggtggtttgtattgtctggtttctaacatgcaggtagctgtttggcagttaaacacgtttagagtaatttgagttacaacgtgtgaaactgagcaaaaaagcagtgataagtttgggttaccataccaaatatttgttttcccactggaaaaaagtaagttttagaaaatagttaacctttgcagcatttgtttacagtttacagttccagaagtgcgtcgaaatggattacataactgctcttttattcctggtgttcacatctgtcccaggctgacacctgctcttggctggcccactttggtatgggctttaatttcactaccccaaacacgatactgtcatctgctttataataatgctcaagatgcctgataaaaatctcattttgcagccagacaagccttgaatccttttggcactaactgcaaaggaagatttttttctctagatatgcattagcagctagtgctccagttagaagcacgaactataaccttgataagtaaacagcagctggtggttaacaagtggatcgtcatgttcagtagtttatacattatgtgagaagtaacgttctgattctttttcttacacagaattggcagagggggtcgatttgggaggaaaggtgtggctataaactttgttactgaagaagacaagaggattcttcgtgacattgagactttctacaatactacagtggaggagatgcccatgaatgtggctgaccttatttaattcctgggatgagagttttggatgcagtgctcgctgttgctgaataggcgatcacaacgtgcattgtgcttctttctttgggaatatttgaatcttgtctcaatgctcataacggatcagaaatacagattttgatagcaaagcgacgttagtcgtgagctcttgtgaggaaagtcattggctttatcctctttagagttagactgttggggtgggtataaaagatggggtctgtaaaatctttctttcttagaaatttatttcctagttctgtagaaatggttgtattagatgttctctatcatttaataatatacttgtggactaaaagatataagtgctgtataaaatcagccaattatgttaaactagcatatctgcctttattgtgtttgtcattagcctgagtagaaaggcctttaaaatttttttagaaagcatttgaatgcattttgtttggtattgtatttattcaataaagtatttaattagtgctaagtgtgaactggaccctgttgctaagccccagcaagcaatcctaggtagggtttaatccccagtaaaattgccatattgcacatgtcttaatgaagtttgaatgttaaataaattgtatattcactttaaaggtgcttttggtcattttatttttattacaacttcattatttacaaaaccccccatccagatatattcacgttaacaattctgagataactgctgcatcacagttgcacaaaggctgatgagttgcaaatgttcatcagcaccatctgctaggcatttgtcaacttcctacgagaaaaatttaagaaattagcatccttcaggtagttaaatgttccattgacatgtgcaaagtacctacttacggcaagtttttctgtgataatagacttctgtttatcagataagttattttctacaaccacatcatggagttgattgacgagctgagttgctgcatgaccctcatctattaaatcctataataaaaaaaacttttggtatgatgacttaatattcctttccccaaagttagtaagctgactttaccttgaccacagcttctagtttgtcaaaagagccactctgacaggcagc

SEQ ID NO: 4395 - protein, 90 aa, Homo sapiens [sequence omitted]

SEQ ID NO: 4396 - DNA, 2664 bp, Homo sapiens
ccagatccctccttttaattgtccatgcatgcagggagtttttgttgaaagttttaaaagaactgggtatgcaggtatggtttgtagggttgtatactaatagattgagaatccgaagcgctctcttggatgtactagatctgtccccattttttaagtttgaatgcagttgtgcaacatgaaaactgcagtgacatgttaccatttgactgtctccgtagttcgtgatgcatctgttgcatgctatgttttcaaagctcactgctatattggctttgaagtaaaccttcctaataaagctgtaggctttattgaggtcaggattatataaggcacaataccctctgggggaaaaaaatcatttgccctagctgtaattacagaacataaatttcactacgtactccctacctacagtgaagaataatgtaggaaacgttattcttggattgtctagctgatgcgtggagcagcagcatcccaagtttgacaaggcataagaaagacattaagggaattttaccttgcagcagttaggtcgtctgcattttaagcttggaagtagttttgtgctgtgcatgcataaaagctgttggcagaccagattatatttgcctttatgctttaaaaattagtcattgatcctggagttctgcggaataataattaaggcttgggttttagatccaaaaggtaattctggcacttggagactatatgggagccacttgtcatgcctgcattggtggaacaaatgttcgaaatgaaatgcaaaaactgcaggctgaagcaccacatattgttgttggtacacccgggagagtgtttgatatgttaaacagaagatacctttctccaaaatggatcaaaatgtttgttttggatgaagcagatgaaatgttgagccgtggttttaaggatcaaatctatgagattttccaaaaactaaacacaagtattcaggttgtgttgctttctgccacaatgccaactgatgtgttggaagtgaccaaaaaattcatgagagatccaattcgaattctggtgaaaaaggaagaattgacccttgaaggaatcaaacagttttatattaatgttgagagagaggaatggaagttggatacactttgtgacttgtacgagacactgaccattacacaggctgttatttttctcaatacgaggcgcaaggtggactggctgactgagaagatgcatgccagagacttcacagtttctgctctgcatggtgacatggaccagaaggagagagatgttatcatgagggaattccggtcagggtcaagtcgtgttctgatcactactgacttgttggctcgcgggattgatgtgcaacaagtgtctttggttataaattatgatctacctaccaatcgtgaaaactatattcacagaattggcagagggggtcgatttgggaggaaaggtgtggctataaactttgttactgaagaagacaagaggattcttcgtgacattgagactttctacaatactacagtggaggagatgcccatgaatgtggctgaccttatttaattcctgggatgagagttttggatgcagtgctcgctgttgctgaataggcgatcacaacgtgcattgtgcttctttctttgggaatatttgaatcttgtctcaatgctcataacggatcagaaatacagattttgatagcaaagcgacgttagtcgtgagctcttgtgaggaaagtcattggctttatcctctttagagttagactgttggggtgggtataaaagatggggtctgtaaaatctttctttcttagaaatttatttcctagttctgtagaaatggttgtattagatgttctctatcatttaataatatacttgtggactaaaagatataagtgctgtataaaatcagccaattatgttaaactagcatatctgcctttattgtgtttgtcattagcctgagtagaaaggcctttaaaatttttttagaaagcatttgaatgcattttgtttggtattgtatttattcaataaagtatttaattagtgctaagtgtgaactggaccctgttgctaagccccagcaagcaatcctaggtagggtttaatccccagtaaaattgccatattgcacatgtcttaatgaagtttgaatgttaaataaattgtatattcactttaaaggtgcttttggtcattttatttttattacaacttcattatttacaaaaccccccatccagatatattcacgttaacaattctgagataactgctgcatcacagttgcacaaaggctgatgagttgcaaatgttcatcagcaccatctgctaggcatttgtcaacttcctacgagaaaaatttaagaaattagcatccttcaggtagttaaatgttccattgacatgtgcaaagtacctacttacggcaagtttttctgtgataatagacttctgtttatcagataagttattttctacaaccacatcatggagttgattgacgagctgagttgctgcatgaccctcatctattaaatcctataataaaaaaaacttttggtatgatgacttaatattcctttccccaaagttagtaagctgactttaccttgaccacagcttctagtttgtcaaaagagccactctgacaggcagc

SEQ ID NO: 4397 - protein, 280 aa, Homo sapiens; identical to SEQ ID NO: 4363

SEQ ID NO: 4398 - DNA, 2420 bp, Homo sapiens
aatggaagttggatacactttgtgacttgtacgagacactgaccattacacaggctgttatttttctcaatacgaggcgcaaggtggactggctgactgagaagatgcatgccagagacttcacagtttctgctctggtaagaggtgttctaaaatgtctggatttccactaaagcaggattcagactacaatatagctgctaagtgctgtgttgtcgttccccctgcttaaaataaagttgtttcttaactatacctgtctgctattctcctgtagcagccagggacgcttggtctcatacatgttgattaaaattaaataccgacctgactggtgattcttgaattaaggtttattaatttgcagcatggtgacatggaccagaaggagagagatgttatcatgagggaattccggtcagggtcaagtcgtgttctgatcactactgacttgttggctcgcgggattgatgtgcaacaagtgtctttggttataaattatgatctacctaccaatcgtgaaaactatattcacaggtgagaagccagcatcttggctgtattgaaaaaaattcatacgtttttctactgtgatttgtatgaaaggtaacatcaaatcaaggaatagattcagtaaagtcagtagtgttcagtaagatgatgtaattaaatttgtactagggaaggttgatgagaacaaagtgggaaaacttgtaaacattgcccagattgtggacatagggtttttttccacaattgttggtcttaccttatgcttgagcttttagtgatgttcttgtgtccatgtgtttttcttggtgattttttctatagttgggattttcttggtgtcgcctggtagcaatttgagtgaaccctggtttagttatagtggctttatccctaaataaattgaattgtactttgttatatgatgtaaaaaaagactttttaaaaaatacaggagtcgatagcagcagttggtgacgagatggcactcagaaacggcgttgacgtaatttaggacgtggaatcataagcgaaacagcacactgtttgaataaagagcgagtcggtatttatatttgtttttcttttgtcatgattatttgatttttaagttgctccagctaaggcatttttttgtattagtatttctattagggaacctttcttattaggtggtttgtattgtctggtttctaacatgcaggtagctgtttggcagttaaacacgtttagagtaatttgagttacaacgtgtgaaactgagcaaaaaagcagtgataagtttgggttaccataccaaatatttgttttcccactggaaaaaagtaagttttagaaaatagttaacctttgcagcatttgtttacagtttacagttccagaagtgcgtcgaaatggattacataactgctcttttattcctggtgttcacatctgtcccaggctgacacctgctcttggctggcccactttggtatgggctttaatttcactaccccaaacacgatactgtcatctgctttataataatgctcaagatgcctgataaaaatctcattttgcagccagacaagccttgaatccttttggcactaactgcaaaggaagatttttttctctagatatgcattagcagctagtgctccagttagaagcacgaactataaccttgataagtaaacagcagctggtggttaacaagtggatcgtcatgttcagtagtttatacattatgtgagaagtaacgttctgattctttttcttacacagaattggcagagggggtcgatttgggaggaaaggtgtggctataaactttgttactgaagaagacaagaggattcttcgtgacattgagactttctacaatactacagtggaggagatgcccatgaatgtggctgaccttatttaattcctgggatgagagttttggatgcagtgctcgctgttgctgaataggcgatcacaacgtgcattgtgcttctttctttgggaatatttgaatcttgtctcaatgctcataacggatcagaaatacagattttgatagcaaagcgacgttagtcgtgagctcttgtgaggaaagtcattggctttatcctctttagagttagactgttggggtgggtataaaagatggggtctgtaaaatctttctttcttagaaatttatttcctagttctgtagaaatggttgtattagatgttctctatcatttaataatatacttgtggactaaaagatataagtgctgtataaaatcagccaattatgttaaactagcatatctgcctttattgtgtttgtcattagcctgagtagaaaggcctttaaaatttttttagaaagcatttgaatgcattttgtttggtattgtatttattcaataaagtatttaattagtgct

SEQ ID NO: 4399 - protein, 54 aa, Homo sapiens
MDQKERDVIMREFRSGSSRVLITTDLLARGIDVQQVSLVINYDLPTNRENYIHR

SEQ ID NO: 4400 - DNA, 1289 bp, Homo sapiens
aatggaagttggatacactttgtgacttgtacgagacactgaccattacacaggctgttatttttctcaatacgaggcgcaaggtggactggctgactgagaagatgcatgccagagacttcacagtttctgctctggtaagaggtgttctaaaatgtctggatttccactaaagcaggattcagactacaatatagctgctaagtgctgtgttgtcgttccccctgcttaaaataaagttgtttcttaactatacctgtctgctattctcctgtagcagccagggacgcttggtctcatacatgttgattaaaattaaataccgacctgactggtgattcttgaattaaggtttattaatttgcagcatggtgacatggaccagaaggagagagatgttatcatgagggaattccggtcagggtcaagtcgtgttctgatcactactgacttgttggctcgcgggattgatgtgcaacaagtgtctttggttataaattatgatctacctaccaatcgtgaaaactatattcacaggagtcgatagcagcagttggtgacgagatggcactcagaaacggcgttgacgtaatttaggacgtggaatcataagcgaaacagcacactgtttgaataaagagcgagtcgaattggcagagggggtcgatttgggaggaaaggtgtggctataaactttgttactgaagaagacaagaggattcttcgtgacattgagactttctacaatactacagtggaggagatgcccatgaatgtggctgaccttatttaattcctgggatgagagttttggatgcagtgctcgctgttgctgaataggcgatcacaacgtgcattgtgcttctttctttgggaatatttgaatcttgtctcaatgctcataacggatcagaaatacagattttgatagcaaagcgacgttagtcgtgagctcttgtgaggaaagtcattggctttatcctctttagagttagactgttggggtgggtataaaagatggggtctgtaaaatctttctttcttagaaatttatttcctagttctgtagaaatggttgtattagatgttctctatcatttaataatatacttgtggactaaaagatataagtgctgtataaaatcagccaattatgttaaactagcatatctgcctttattgtgtttgtcattagcctgagtagaaaggcctttaaaatttttttagaaagcatttgaatgcattttgtttggtattgtatttattcaataaagtatttaattagtgct

SEQ ID NO: 4401 - protein, 56 aa, Homo sapiens
MDQKERDVIMREFRSGSSRVLITTDLLARGIDVQQVSLVINYDLPTNRENYIHRSR

SEQ ID NO: 4402 - DNA, 1424 bp, Homo sapiens
aatggaagttggatacactttgtgacttgtacgagacactgaccattacacaggctgttatttttctcaatacgaggcgcaaggtggactggctgactgagaagatgcatgccagagacttcacagtttctgctctggtaagaggtgttctaaaatgtctggatttccactaaagcaggattcagactacaatatagctgctaagtgctgtgttgtcgttccccctgcttaaaataaagttgtttcttaactatacctgtctgctattctcctgtagcagccagggacgcttggtctcatacatgttgattaaaattaaataccgacctgactggtgattcttgaattaaggtttattaatttgcagcatggtgacatggaccagaaggagagagatgttatcatgagggaattccggtcagggtcaagtcgtgttctgatcactactgacttgttggctcgcgggattgatgtgcaacaagtgtctttggttataaattatgatctacctaccaatcgtgaaaactatattcacaggagtcgatagcagcagttggtgacgagatggcactcagaaacggcgttgacgtaatttaggacgtggaatcataagcgaaacagcacactgtttgaataaagagcgagtcgaattggcagagggggtcgatttgggaggaaaggtgtggctataaactttgttactgaagaagacaagaggattcttcgtgacattgagactttctacaatactacagtggaggagatgcccatgaatgtggctgaccttatttaattcctgggatgagagttttggatgcagtgctcgctgttgctgaataggcgatcacaacgtgcattgtgcttctttctttgggaatatttgaatcttgtctcaatgctcataacggatcagaaatacagattttgatagcaaagcgacgttagtcgtgagctcttgtgaggaaagtcattggctttatcctctttagagttagactgttggggtgggtataaaagatggggtctgtaaaatctttctttcttagaaatttatttcctagttctgtagaaatggttgtattagatgttctctatcatttaataatatacttgtggactaaaagatataagtgctgtataaaatcagccaattatgttaaactagcatatctgcctttattgtgtttgtcattagcctgagtagaaaggcctttaaaatttttttagaaagcatttgaatgcattttgtttggtattgtatttattcaataaagtatttaattagtgctaagtgtgaactggaccctgttgctaagccccagcaagcaatcctaggtagggtttaatccccagtaaaattgccatattgcacatgtcttaatgaagtttgaatgttaaataaattgtatattcactttaaaggt

SEQ ID NO: 4403 - protein, 56 aa, Homo sapiens; identical to SEQ ID NO: 4401

SEQ ID NO: 4404 - DNA, 2555 bp, Homo sapiens
aatggaagttggatacactttgtgacttgtacgagacactgaccattacacaggctgttatttttctcaatacgaggcgcaaggtggactggctgactgagaagatgcatgccagagacttcacagtttctgctctggtaagaggtgttctaaaatgtctggatttccactaaagcaggattcagactacaatatagctgctaagtgctgtgttgtcgttccccctgcttaaaataaagttgtttcttaactatacctgtctgctattctcctgtagcagccagggacgcttggtctcatacatgttgattaaaattaaataccgacctgactggtgattcttgaattaaggtttattaatttgcagcatggtgacatggaccagaaggagagagatgttatcatgagggaattccggtcagggtcaagtcgtgttctgatcactactgacttgttggctcgcgggattgatgtgcaacaagtgtctttggttataaattatgatctacctaccaatcgtgaaaactatattcacaggtgagaagccagcatcttggctgtattgaaaaaaattcatacgtttttctactgtgatttgtatgaaaggtaacatcaaatcaaggaatagattcagtaaagtcagtagtgttcagtaagatgatgtaattaaatttgtactagggaaggttgatgagaacaaagtgggaaaacttgtaaacattgcccagattgtggacatagggtttttttccacaattgttggtcttaccttatgcttgagcttttagtgatgttcttgtgtccatgtgtttttcttggtgattttttctatagttgggattttcttggtgtcgcctggtagcaatttgagtgaaccctggtttagttatagtggctttatccctaaataaattgaattgtactttgttatatgatgtaaaaaaagactttttaaaaaatacaggagtcgatagcagcagttggtgacgagatggcactcagaaacggcgttgacgtaatttaggacgtggaatcataagcgaaacagcacactgtttgaataaagagcgagtcggtatttatatttgtttttcttttgtcatgattatttgatttttaagttgctccagctaaggcatttttttgtattagtatttctattagggaacctttcttattaggtggtttgtattgtctggtttctaacatgcaggtagctgtttggcagttaaacacgtttagagtaatttgagttacaacgtgtgaaactgagcaaaaaagcagtgataagtttgggttaccataccaaatatttgttttcccactggaaaaaagtaagttttagaaaatagttaacctttgcagcatttgtttacagtttacagttccagaagtgcgtcgaaatggattacataactgctcttttattcctggtgttcacatctgtcccaggctgacacctgctcttggctggcccactttggtatgggctttaatttcactaccccaaacacgatactgtcatctgctttataataatgctcaagatgcctgataaaaatctcattttgcagccagacaagccttgaatccttttggcactaactgcaaaggaagatttttttctctagatatgcattagcagctagtgctccagttagaagcacgaactataaccttgataagtaaacagcagctggtggttaacaagtggatcgtcatgttcagtagtttatacattatgtgagaagtaacgttctgattctttttcttacacagaattggcagagggggtcgatttgggaggaaaggtgtggctataaactttgttactgaagaagacaagaggattcttcgtgacattgagactttctacaatactacagtggaggagatgcccatgaatgtggctgaccttatttaattcctgggatgagagttttggatgcagtgctcgctgttgctgaataggcgatcacaacgtgcattgtgcttctttctttgggaatatttgaatcttgtctcaatgctcataacggatcagaaatacagattttgatagcaaagcgacgttagtcgtgagctcttgtgaggaaagtcattggctttatcctctttagagttagactgttggggtgggtataaaagatggggtctgtaaaatctttctttcttagaaatttatttcctagttctgtagaaatggttgtattagatgttctctatcatttaataatatacttgtggactaaaagatataagtgctgtataaaatcagccaattatgttaaactagcatatctgcctttattgtgtttgtcattagcctgagtagaaaggcctttaaaatttttttagaaagcatttgaatgcattttgtttggtattgtatttattcaataaagtatttaattagtgctaagtgtgaactggaccctgttgctaagccccagcaagcaatcctaggtagggtttaatccccagtaaaattgccatattgcacatgtcttaatgaagtttgaatgttaaataaattgtatattcactttaaaggt

SEQ ID NO: 4405 - protein, 54 aa, Homo sapiens; identical to SEQ ID NO: 4399

SEQ ID NO: 4406 - DNA, 3028 bp, Homo sapiens
aatggaagttggatacactttgtgacttgtacgagacactgaccattacacaggctgttatttttctcaatacgaggcgcaaggtggactggctgactgagaagatgcatgccagagacttcacagtttctgctctggtaagaggtgttctaaaatgtctggatttccactaaagcaggattcagactacaatatagctgctaagtgctgtgttgtcgttccccctgcttaaaataaagttgtttcttaactatacctgtctgctattctcctgtagcagccagggacgcttggtctcatacatgttgattaaaattaaataccgacctgactggtgattcttgaattaaggtttattaatttgcagcatggtgacatggaccagaaggagagagatgttatcatgagggaattccggtcagggtcaagtcgtgttctgatcactactgacttgttggctcgcgggattgatgtgcaacaagtgtctttggttataaattatgatctacctaccaatcgtgaaaactatattcacaggtgagaagccagcatcttggctgtattgaaaaaaattcatacgtttttctactgtgatttgtatgaaaggtaacatcaaatcaaggaatagattcagtaaagtcagtagtgttcagtaagatgatgtaattaaatttgtactagggaaggttgatgagaacaaagtgggaaaacttgtaaacattgcccagattgtggacatagggtttttttccacaattgttggtcttaccttatgcttgagcttttagtgatgttcttgtgtccatgtgtttttcttggtgattttttctatagttgggattttcttggtgtcgcctggtagcaatttgagtgaaccctggtttagttatagtggctttatccctaaataaattgaattgtactttgttatatgatgtaaaaaaagactttttaaaaaatacaggagtcgatagcagcagttggtgacgagatggcactcagaaacggcgttgacgtaatttaggacgtggaatcataagcgaaacagcacactgtttgaataaagagcgagtcggtatttatatttgtttttcttttgtcatgattatttgatttttaagttgctccagctaaggcatttttttgtattagtatttctattagggaacctttcttattaggtggtttgtattgtctggtttctaacatgcaggtagctgtttggcagttaaacacgtttagagtaatttgagttacaacgtgtgaaactgagcaaaaaagcagtgataagtttgggttaccataccaaatatttgttttcccactggaaaaaagtaagttttagaaaatagttaacctttgcagcatttgtttacagtttacagttccagaagtgcgtcgaaatggattacataactgctcttttattcctggtgttcacatctgtcccaggctgacacctgctcttggctggcccactttggtatgggctttaatttcactaccccaaacacgatactgtcatctgctttataataatgctcaagatgcctgataaaaatctcattttgcagccagacaagccttgaatccttttggcactaactgcaaaggaagatttttttctctagatatgcattagcagctagtgctccagttagaagcacgaactataaccttgataagtaaacagcagctggtggttaacaagtggatcgtcatgttcagtagtttatacattatgtgagaagtaacgttctgattctttttcttacacagaattggcagagggggtcgatttgggaggaaaggtgtggctataaactttgttactgaagaagacaagaggattcttcgtgacattgagactttctacaatactacagtggaggagatgcccatgaatgtggctgaccttatttaattcctgggatgagagttttggatgcagtgctcgctgttgctgaataggcgatcacaacgtgcattgtgcttctttctttgggaatatttgaatcttgtctcaatgctcataacggatcagaaatacagattttgatagcaaagcgacgttagtcgtgagctcttgtgaggaaagtcattggctttatcctctttagagttagactgttggggtgggtataaaagatggggtctgtaaaatctttctttcttagaaatttatttcctagttctgtagaaatggttgtattagatgttctctatcatttaataatatacttgtggactaaaagatataagtgctgtataaaatcagccaattatgttaaactagcatatctgcctttattgtgtttgtcattagcctgagtagaaaggcctttaaaatttttttagaaagcatttgaatgcattttgtttggtattgtatttattcaataaagtatttaattagtgctaagtgtgaactggaccctgttgctaagccccagcaagcaatcctaggtagggtttaatccccagtaaaattgccatattgcacatgtcttaatgaagtttgaatgttaaataaattgtatattcactttaaaggtgcttttggtcattttatttttattacaacttcattatttacaaaaccccccatccagatatattcacgttaacaattctgagataactgctgcatcacagttgcacaaaggctgatgagttgcaaatgttcatcagcaccatctgctaggcatttgtcaacttcctacgagaaaaatttaagaaattagcatccttcaggtagttaaatgttccattgacatgtgcaaagtacctacttacggcaagtttttctgtgataatagacttctgtttatcagataagttattttctacaaccacatcatggagttgattgacgagctgagttgctgcatgaccctcatctattaaatcctataataaaaaaaacttttggtatgatgacttaatattcctttccccaaagttagtaagctgactttaccttgaccacagcttctagtttgtcaaaagagccactctgacaggcagc

SEQ ID NO: 4407 - protein, 54 aa, Homo sapiens; identical to SEQ ID NO: 4399

SEQ ID NO: 4408 - DNA, 1897 bp, Homo sapiens
aatggaagttggatacactttgtgacttgtacgagacactgaccattacacaggctgttatttttctcaatacgaggcgcaaggtggactggctgactgagaagatgcatgccagagacttcacagtttctgctctggtaagaggtgttctaaaatgtctggatttccactaaagcaggattcagactacaatatagctgctaagtgctgtgttgtcgttccccctgcttaaaataaagttgtttcttaactatacctgtctgctattctcctgtagcagccagggacgcttggtctcatacatgttgattaaaattaaataccgacctgactggtgattcttgaattaaggtttattaatttgcagcatggtgacatggaccagaaggagagagatgttatcatgagggaattccggtcagggtcaagtcgtgttctgatcactactgacttgttggctcgcgggattgatgtgcaacaagtgtctttggttataaattatgatctacctaccaatcgtgaaaactatattcacaggagtcgatagcagcagttggtgacgagatggcactcagaaacggcgttgacgtaatttaggacgtggaatcataagcgaaacagcacactgtttgaataaagagcgagtcgaattggcagagggggtcgatttgggaggaaaggtgtggctataaactttgttactgaagaagacaagaggattcttcgtgacattgagactttctacaatactacagtggaggagatgcccatgaatgtggctgaccttatttaattcctgggatgagagttttggatgcagtgctcgctgttgctgaataggcgatcacaacgtgcattgtgcttctttctttgggaatatttgaatcttgtctcaatgctcataacggatcagaaatacagattttgatagcaaagcgacgttagtcgtgagctcttgtgaggaaagtcattggctttatcctctttagagttagactgttggggtgggtataaaagatggggtctgtaaaatctttctttcttagaaatttatttcctagttctgtagaaatggttgtattagatgttctctatcatttaataatatacttgtggactaaaagatataagtgctgtataaaatcagccaattatgttaaactagcatatctgcctttattgtgtttgtcattagcctgagtagaaaggcctttaaaatttttttagaaagcatttgaatgcattttgtttggtattgtatttattcaataaagtatttaattagtgctaagtgtgaactggaccctgttgctaagccccagcaagcaatcctaggtagggtttaatccccagtaaaattgccatattgcacatgtcttaatgaagtttgaatgttaaataaattgtatattcactttaaaggtgcttttggtcattttatttttattacaacttcattatttacaaaaccccccatccagatatattcacgttaacaattctgagataactgctgcatcacagttgcacaaaggctgatgagttgcaaatgttcatcagcaccatctgctaggcatttgtcaacttcctacgagaaaaatttaagaaattagcatccttcaggtagttaaatgttccattgacatgtgcaaagtacctacttacggcaagtttttctgtgataatagacttctgtttatcagataagttattttctacaaccacatcatggagttgattgacgagctgagttgctgcatgaccctcatctattaaatcctataataaaaaaaacttttggtatgatgacttaatattcctttccccaaagttagtaagctgactttaccttgaccacagcttctagtttgtcaaaagagccactctgacaggcagc

SEQ ID NO: 4409 - protein, 56 aa, Homo sapiens; identical to SEQ ID NO: 4401

SEQ ID NO: 4410 - DNA, 1797 bp, Homo sapiens
gtaagaggtgttctaaaatgtctggatttccactaaagcaggattcagactacaatatagctgctaagtgctgtgttgtcgttccccctgcttaaaataaagttgtttcttaactatacctgtctgctattctcctgtagcagccagggacgcttggtctcatacatgttgattaaaattaaataccgacctgactggtgattcttgaattaaggtttattaatttgcagcatggtgacatggaccagaaggagagagatgttatcatgagggaattccggtcagggtcaagtcgtgttctgatcactactgacttgttggtaagtctcttaatgctttttaaaaatctaccaaaagttagctttttggggggcaggtttttaagtaacctttgccaacttgggctatttggaagagtaaaagaccacactccacagtgggctataccacttagtatagttcgctactattttgtggcctacatgacaggtgtcaagtttttttgaatcaatttttaaaacatgccattgtgtttcaggctcgcgggattgatgtgcaacaagtgtctttggttataaattatgatctacctaccaatcgtgaaaactatattcacaggtgagaagccagcatcttggctgtattgaaaaaaattcatacgtttttctactgtgatttgtatgaaaggtaacatcaaatcaaggaatagattcagtaaagtcagtagtgttcagtaagatgatgtaattaaatttgtactagggaaggttgatgagaacaaagtgggaaaacttgtaaacattgcccagattgtggacatagggtttttttccacaattgttggtcttaccttatgcttgagcttttagtgatgttcttgtgtccatgtgtttttcttggtgattttttctatagttgggattttcttggtgtcgcctggtagcaatttgagtgaaccctggtttagttatagtggctttatccctaaataaattgaattgtactttgttatatgatgtaaaaaaagactttttaaaaaatacaggagtcgatagcagcagttggtgacgagatggcactcagaaacggcgttgacgtaatttaggacgtggaatcataagcgaaacagcacactgtttgaataaagagcgagtcgaattggcagagggggtcgatttgggaggaaaggtgtggctataaactttgttactgaagaagacaagaggattcttcgtgacattgagactttctacaatactacagtggaggagatgcccatgaatgtggctgaccttatttaattcctgggatgagagttttggatgcagtgctcgctgttgctgaataggcgatcacaacgtgcattgtgcttctttctttgggaatatttgaatcttgtctcaatgctcataacggatcagaaatacagattttgatagcaaagcgacgttagtcgtgagctcttgtgaggaaagtcattggctttatcctctttagagttagactgttggggtgggtataaaagatggggtctgtaaaatctttctttcttagaaatttatttcctagttctgtagaaatggttgtattagatgttctctatcatttaataatatacttgtggactaaaagatataagtgctgtataaaatcagccaattatgttaaactagcatatctgcctttattgtgtttgtcattagcctgagtagaaaggcctttaaaatttttttagaaagcatttgaatgcattttgtttggtattgtatttattcaataaagtatttaattagtgct

SEQ ID NO: 4411 - protein, 88 aa, Homo sapiens
MDQKERDVIMREFRSGSSRVLITTDLLVSLLMLFKNLPKVSFLGGRFLSNLCQLGLFGRVKDHTPQWAIPLSIVRYYFVAYMTGVKFF

SEQ ID NO: 4412 - DNA, 1932 bp, Homo sapiens
gtaagaggtgttctaaaatgtctggatttccactaaagcaggattcagactacaatatagctgctaagtgctgtgttgtcgttccccctgcttaaaataaagttgtttcttaactatacctgtctgctattctcctgtagcagccagggacgcttggtctcatacatgttgattaaaattaaataccgacctgactggtgattcttgaattaaggtttattaatttgcagcatggtgacatggaccagaaggagagagatgttatcatgagggaattccggtcagggtcaagtcgtgttctgatcactactgacttgttggtaagtctcttaatgctttttaaaaatctaccaaaagttagctttttggggggcaggtttttaagtaacctttgccaacttgggctatttggaagagtaaaagaccacactccacagtgggctataccacttagtatagttcgctactattttgtggcctacatgacaggtgtcaagtttttttgaatcaatttttaaaacatgccattgtgtttcaggctcgcgggattgatgtgcaacaagtgtctttggttataaattatgatctacctaccaatcgtgaaaactatattcacaggtgagaagccagcatcttggctgtattgaaaaaaattcatacgtttttctactgtgatttgtatgaaaggtaacatcaaatcaaggaatagattcagtaaagtcagtagtgttcagtaagatgatgtaattaaatttgtactagggaaggttgatgagaacaaagtgggaaaacttgtaaacattgcccagattgtggacatagggtttttttccacaattgttggtcttaccttatgcttgagcttttagtgatgttcttgtgtccatgtgtttttcttggtgattttttctatagttgggattttcttggtgtcgcctggtagcaatttgagtgaaccctggtttagttatagtggctttatccctaaataaattgaattgtactttgttatatgatgtaaaaaaagactttttaaaaaatacaggagtcgatagcagcagttggtgacgagatggcactcagaaacggcgttgacgtaatttaggacgtggaatcataagcgaaacagcacactgtttgaataaagagcgagtcgaattggcagagggggtcgatttgggaggaaaggtgtggctataaactttgttactgaagaagacaagaggattcttcgtgacattgagactttctacaatactacagtggaggagatgcccatgaatgtggctgaccttatttaattcctgggatgagagttttggatgcagtgctcgctgttgctgaataggcgatcacaacgtgcattgtgcttctttctttgggaatatttgaatcttgtctcaatgctcataacggatcagaaatacagattttgatagcaaagcgacgttagtcgtgagctcttgtgaggaaagtcattggctttatcctctttagagttagactgttggggtgggtataaaagatggggtctgtaaaatctttctttcttagaaatttatttcctagttctgtagaaatggttgtattagatgttctctatcatttaataatatacttgtggactaaaagatataagtgctgtataaaatcagccaattatgttaaactagcatatctgcctttattgtgtttgtcattagcctgagtagaaaggcctttaaaatttttttagaaagcatttgaatgcattttgtttggtattgtatttattcaataaagtatttaattagtgctaagtgtgaactggaccctgttgctaagccccagcaagcaatcctaggtagggtttaatccccagtaaaattgccatattgcacatgtcttaatgaagtttgaatgttaaataaattgtatattcactttaaaggt

SEQ ID NO: 4413 - protein, 88 aa, Homo sapiens; identical to SEQ ID NO: 4411

SEQ ID NO: 4414 - DNA, 2405 bp, Homo sapiens
gtaagaggtgttctaaaatgtctggatttccactaaagcaggattcagactacaatatagctgctaagtgctgtgttgtcgttccccctgcttaaaataaagttgtttcttaactatacctgtctgctattctcctgtagcagccagggacgcttggtctcatacatgttgattaaaattaaataccgacctgactggtgattcttgaattaaggtttattaatttgcagcatggtgacatggaccagaaggagagagatgttatcatgagggaattccggtcagggtcaagtcgtgttctgatcactactgacttgttggtaagtctcttaatgctttttaaaaatctaccaaaagttagctttttggggggcaggtttttaagtaacctttgccaacttgggctatttggaagagtaaaagaccacactccacagtgggctataccacttagtatagttcgctactattttgtggcctacatgacaggtgtcaagtttttttgaatcaatttttaaaacatgccattgtgtttcaggctcgcgggattgatgtgcaacaagtgtctttggttataaattatgatctacctaccaatcgtgaaaactatattcacaggtgagaagccagcatcttggctgtattgaaaaaaattcatacgtttttctactgtgatttgtatgaaaggtaacatcaaatcaaggaatagattcagtaaagtcagtagtgttcagtaagatgatgtaattaaatttgtactagggaaggttgatgagaacaaagtgggaaaacttgtaaacattgcccagattgtggacatagggtttttttccacaattgttggtcttaccttatgcttgagcttttagtgatgttcttgtgtccatgtgtttttcttggtgattttttctatagttgggattttcttggtgtcgcctggtagcaatttgagtgaaccctggtttagttatagtggctttatccctaaataaattgaattgtactttgttatatgatgtaaaaaaagactttttaaaaaatacaggagtcgatagcagcagttggtgacgagatggcactcagaaacggcgttgacgtaatttaggacgtggaatcataagcgaaacagcacactgtttgaataaagagcgagtcgaattggcagagggggtcgatttgggaggaaaggtgtggctataaactttgttactgaagaagacaagaggattcttcgtgacattgagactttctacaatactacagtggaggagatgcccatgaatgtggctgaccttatttaattcctgggatgagagttttggatgcagtgctcgctgttgctgaataggcgatcacaacgtgcattgtgcttctttctttgggaatatttgaatcttgtctcaatgctcataacggatcagaaatacagattttgatagcaaagcgacgttagtcgtgagctcttgtgaggaaagtcattggctttatcctctttagagttagactgttggggtgggtataaaagatggggtctgtaaaatctttctttcttagaaatttatttcctagttctgtagaaatggttgtattagatgttctctatcatttaataatatacttgtggactaaaagatataagtgctgtataaaatcagccaattatgttaaactagcatatctgcctttattgtgtttgtcattagcctgagtagaaaggcctttaaaatttttttagaaagcatttgaatgcattttgtttggtattgtatttattcaataaagtatttaattagtgctaagtgtgaactggaccctgttgctaagccccagcaagcaatcctaggtagggtttaatccccagtaaaattgccatattgcacatgtcttaatgaagtttgaatgttaaataaattgtatattcactttaaaggtgcttttggtcattttatttttattacaacttcattatttacaaaaccccccatccagatatattcacgttaacaattctgagataactgctgcatcacagttgcacaaaggctgatgagttgcaaatgttcatcagcaccatctgctaggcatttgtcaacttcctacgagaaaaatttaagaaattagcatccttcaggtagttaaatgttccattgacatgtgcaaagtacctacttacggcaagtttttctgtgataatagacttctgtttatcagataagttattttctacaaccacatcatggagttgattgacgagctgagttgctgcatgaccctcatctattaaatcctataataaaaaaaacttttggtatgatgacttaatattcctttccccaaagttagtaagctgactttaccttgaccacagcttctagtttgtcaaaagagccactctgacaggcagc

SEQ ID NO: 4415 - protein, 88 aa, Homo sapiens; identical to SEQ ID NO: 4411

SEQ ID NO: 4416 - DNA, 135 bp, Homo sapiens; identical to SEQ ID NO: 459

SEQ ID NO: 4417 - protein, 35 aa, Homo sapiens
LLSAVLSFPLLKIKLFLNYTCLLFSCSSQGRLVSY

SEQ ID NO: 4418 - DNA, 3936 bp, Homo sapiens
accggcgtattcccgccctgcttttcgcccgccgttccgtggcgggaactgaggcgactgtggggacatcagtgatcgtaagtctcctgggcccgttattctcagattaggtgacggagctaagacttcgagaccatctcgtcctttttgtatcgcggaaacctgaggaacgagccggcggcggtgacctgcacgagaagccaggctaactgggtgaagtaccatgcaagcatttcttaaaggtacatccatcagtactaaacccccgctgaccaaggatcgaggagtagctgccagtgcgggaagtagcggagagaacaagaaagccaaacccgttccctgggtggaaaaatatcgcccaaaatgtgtggatgaagttgctttccaggaagaagtggttgcagtgctgaaaaaatctttagaaggagcagatcttcctaatctcttgttttacggaccacctggaactggaaaaacatccactattttggcagcagctagagaactctttgggcctgaacttttccgattaagagttcttgagttaaatgcatctgatgaacgtggaatacaagtagttcgagagaaagtgaaaaattttgctcaattaactgtgtcaggaagtcgctcagatgggaagccgtgtccgccttttaagattgtgattctggatgaagcagattctatgacctcagctgctcaggcagctttaagacgtaccatggagaaggagtcgaaaaccacccgattctgtcttatctgtaactatgtcagtcgaataattgaacccctgacctctagatgttcaaaattccgcttcaagcctctgtcagataaaattcaacagcagcgattactagacattgccaagaaggaaaatgtcaaaattagtgatgagggaatagcttatcttgttaaagtgtcagaaggagacttaagaaaagccattacatttcttcaaagcgctactcgattaacaggtggaaaggagatcacagagaaagtgattacagacattgccggggtaataccagctgagaaaattgatggagtatttgctgcctgtcagagtggctcttttgacaaactagaagctgtggtcaaggatttaatagatgagggtcatgcagcaactcagctcgtcaatcaactccatgatgtggttgtagaaaataacttatctgataaacagaagtctattatcacagaaaaacttgccgaagttgacaaatgcctagcagatggtgctgatgaacatttgcaactcatcagcctttgtgcaactgtgatgcagcagttatctcagaattgttaacgtgaatatatctggatggggggttttgtaaataatgaagttgtaataaaaataaaatgaccaaaagcacctttaaagtgaatatacaatttatttaacattcaaacttcattaagacatgtgcaatatggcaattttactggggattaaaccctacctaggattgcttgctggggcttagcaacagggtccagttcacacttagcactaattaaatactttattgaataaatacaataccaaacaaaatgcattcaaatgctttctaaaaaaattttaaaggcctttctactcaggctaatgacaaacacaataaaggcagatatgctagtttaacataattggctgattttatacagcacttatatcttttagtccacaagtatattattaaatgatagagaacatctaatacaaccatttctacagaactaggaaataaatttctaagaaagaaagattttacagaccccatcttttatacccaccccaacagtctaactctaaagaggataaagccaatgactttcctcacaagagctcacgactaacgtcgctttgctatcaaaatctgtatttctgatccgttatgagcattgagacaagattcaaatattcccaaagaaagaagcacaatgcacgttgtgatcgcctattcagcaacagcgagcactgcatccaaaactctcatcccaggaattaaataaggtcagccacattcatgggcatctcctccactgtagtattgtagaaagtctcaatgtcacgaagaatcctcttgtcttcttcagtaacaaagtttatagccacacctttcctcccaaatcgaccccctctgccaattctgtgtaagaaaaagaatcagaacgttacttctcacataatgtataaactactgaacatgacgatccacttgttaaccaccagctgctgtttacttatcaaggttatagttcgtgcttctaactggagcactagctgctaatgcatatctagagaaaaaaatcttcctttgcagttagtgccaaaaggattcaaggcttgtctggctgcaaaatgagatttttatcaggcatcttgagcattattataaagcagatgacagtatcgtgtttggggtagtgaaattaaagcccataccaaagtgggccagccaagagcaggtgtcagcctgggacagatgtgaacaccaggaataaaagagcagttatgtaatccatttcgacgcacttctggaactgtaaactgtaaacaaatgctgcaaaggttaactattttctaaaacttacttttttccagtgggaaaacaaatatttggtatggtaacccaaacttatcactgcttttttgctcagtttcacacgttgtaactcaaattactctaaacgtgtttaactgccaaacagctacctgcatgttagaaaccagacaatacaaaccacctaataagaaaggttccctaatagaaatactaatacaaaaaaatgccttagctggagcaacttaaaaatcaaataatcatgacaaaagaaaaacaaatataaataccgactcgctctttattcaaacagtgtgctgtttcgcttatgattccacgtcctaaattacgtcaacgccgtttctgagtgccatctcgtcaccaactgctgctatcgactcctgtattttttaaaaagtctttttttacatcatataacaaagtacaattcaatttatttagggataaagccactataactaaaccagggttcactcaaattgctaccaggcgacaccaagaaaatcccaactatagaaaaaatcaccaagaaaaacacatggacacaagaacatcactaaaagctcaagcataaggtaagaccaacaattgtggaaaaaaaccctatgtccacaatctgggcaatgtttacaagttttcccactttgttctcatcaaccttccctagtacaaatttaattacatcatcttactgaacactactgactttactgaatctattccttgatttgatgttacctttcatacaaatcacagtagaaaaacgtatgaatttttttcaatacagccaagatgctggcttctcacctgtgaatatagttttcacgattggtaggtagatcataatttataaccaaagacacttgttgcacatcaatcccgcgagcctgaaacacaatggcatgttttaaaaattgattcaaaaaaacttgacacctgtcatgtaggccacaaaatagtagcgaactatactaagtggtatagcccactgtggagtgtggtcttttactcttccaaatagcccaagttggcaaaggttacttaaaaacctgccccccaaaaagctaacttttggtagatttttaaaaagcattaagagacttaccaacaagtcagtagtgatcagaacacgacttgaccctgaccggaattccctcatgataacatctctctccttctggtccatgtcaccatgctgcaaattaataaaccttaattcaagaatcaccagtcaggtcggtatttaattttaatcaacatgtatgagaccaagcgtccctggctgctacaggagaatagcagacaggtatagttaagaaacaactttattttaagcaggggg

SEQ ID NO: 4419 - protein, 363 aa, Homo sapiens; identical to SEQ ID NO: 462

SEQ ID NO: 4420 - DNA, 799 bp, Homo sapiens
gaccagaaggagagagatgttatcatgagggaattccggtcagggtcaagtcgtgttctgatcactactgacttgttggctcgcgggattgatgtgcaacaagtgtctttggttataaattatgatctacctaccaatcgtgaaaactatattcacagaattggcagagggggtcgatttgggaggaaaggtgtggctataaactttgttactgaagaagacaagaggattcttcgtgacattgagactttctacaatactacagtggaggagatgcccatgaatgtggctgaccttatttaattcctgggatgagagttttggatgcagtgctcgctgttgctgaataggcgatcacaacgtgcattgtgcttctttctttgggaatatttgaatcttgtctcaatgctcataacggatcagaaatacagattttgatagcaaagcgacgttagtcgtgagctcttgtgaggaaagtcattggctttatcctctttagagttagactgttggggtgggtataaaagatggggtctgtaaaatctttctttcttagaaatttatttcctagttctgtagaaatggttgtattagatgttctctatcatttaataatatacttgtggactaaaagatataagtgctgtataaaatcagccaattatgttaaactagcatatctgcctttattgtgtttgtcattagcctgagtagaaaggcctttaaaatttttttagaaagcatttgaatgcattttgtttggtattgtatttattcaataaagtatttaattagtgct

SEQ ID NO: 4421 - protein, 92 aa, Homo sapiens
MREFRSGSSRVLITTDLLARGIDVQQVSLVINYDLPTNRENYIHRIGRGGRFGRKGVAINFVTEEDKRILRDIETFYNTTVEEMPMNVADLI

SEQ ID NO: 4422 - DNA, 934 bp, Homo sapiens
gaccagaaggagagagatgttatcatgagggaattccggtcagggtcaagtcgtgttctgatcactactgacttgttggctcgcgggattgatgtgcaacaagtgtctttggttataaattatgatctacctaccaatcgtgaaaactatattcacagaattggcagagggggtcgatttgggaggaaaggtgtggctataaactttgttactgaagaagacaagaggattcttcgtgacattgagactttctacaatactacagtggaggagatgcccatgaatgtggctgaccttatttaattcctgggatgagagttttggatgcagtgctcgctgttgctgaataggcgatcacaacgtgcattgtgcttctttctttgggaatatttgaatcttgtctcaatgctcataacggatcagaaatacagattttgatagcaaagcgacgttagtcgtgagctcttgtgaggaaagtcattggctttatcctctttagagttagactgttggggtgggtataaaagatggggtctgtaaaatctttctttcttagaaatttatttcctagttctgtagaaatggttgtattagatgttctctatcatttaataatatacttgtggactaaaagatataagtgctgtataaaatcagccaattatgttaaactagcatatctgcctttattgtgtttgtcattagcctgagtagaaaggcctttaaaatttttttagaaagcatttgaatgcattttgtttggtattgtatttattcaataaagtatttaattagtgctaagtgtgaactggaccctgttgctaagccccagcaagcaatcctaggtagggtttaatccccagtaaaattgccatattgcacatgtcttaatgaagtttgaatgttaaataaattgtatattcactttaaaggt

SEQ ID NO: 4423 - protein, 92 aa, Homo sapiens; identical to SEQ ID NO: 4421

SEQ ID NO: 4424 - DNA, 1407 bp, Homo sapiens
gaccagaaggagagagatgttatcatgagggaattccggtcagggtcaagtcgtgttctgatcactactgacttgttggctcgcgggattgatgtgcaacaagtgtctttggttataaattatgatctacctaccaatcgtgaaaactatattcacagaattggcagagggggtcgatttgggaggaaaggtgtggctataaactttgttactgaagaagacaagaggattcttcgtgacattgagactttctacaatactacagtggaggagatgcccatgaatgtggctgaccttatttaattcctgggatgagagttttggatgcagtgctcgctgttgctgaataggcgatcacaacgtgcattgtgcttctttctttgggaatatttgaatcttgtctcaatgctcataacggatcagaaatacagattttgatagcaaagcgacgttagtcgtgagctcttgtgaggaaagtcattggctttatcctctttagagttagactgttggggtgggtataaaagatggggtctgtaaaatctttctttcttagaaatttatttcctagttctgtagaaatggttgtattagatgttctctatcatttaataatatacttgtggactaaaagatataagtgctgtataaaatcagccaattatgttaaactagcatatctgcctttattgtgtttgtcattagcctgagtagaaaggcctttaaaatttttttagaaagcatttgaatgcattttgtttggtattgtatttattcaataaagtatttaattagtgctaagtgtgaactggaccctgttgctaagccccagcaagcaatcctaggtagggtttaatccccagtaaaattgccatattgcacatgtcttaatgaagtttgaatgttaaataaattgtatattcactttaaaggtgcttttggtcattttatttttattacaacttcattatttacaaaaccccccatccagatatattcacgttaacaattctgagataactgctgcatcacagttgcacaaaggctgatgagttgcaaatgttcatcagcaccatctgctaggcatttgtcaacttcctacgagaaaaatttaagaaattagcatccttcaggtagttaaatgttccattgacatgtgcaaagtacctacttacggcaagtttttctgtgataatagacttctgtttatcagataagttattttctacaaccacatcatggagttgattgacgagctgagttgctgcatgaccctcatctattaaatcctataataaaaaaaacttttggtatgatgacttaatattcctttccccaaagttagtaagctgactttaccttgaccacagcttctagtttgtcaaaagagccactctgacaggcagc

SEQ ID NO: 4425 - protein, 92 aa, Homo sapiens; identical to SEQ ID NO: 4421

SEQ ID NO: 4426 - DNA, 1558 bp, Homo sapiens
tctgatcactactgacttgttggctcgcgggattgatgtgcaacaagtgtctttggttataaattatgatctacctaccaatcgtgaaaactatattcacaggagtcgatagcagcagttggtgacgagatggcactcagaaacggcgttgacgtaatttaggacgtggaatcataagcgaaacagcacactgtttgaataaagagcgagtcggtatttatatttgtttttcttttgtcatgattatttgatttttaagttgctccagctaaggcatttttttgtattagtatttctattagggaacctttcttattaggtggtttgtattgtctggtttctaacatgcaggtagctgtttggcagttaaacacgtttagagtaatttgagttacaacgtgtgaaactgagcaaaaaagcagtgataagtttgggttaccataccaaatatttgttttcccactggaaaaaagtaagttttagaaaatagttaacctttgcagcatttgtttacagtttacagttccagaagtgcgtcgaaatggattacataactgctcttttattcctggtgttcacatctgtcccaggctgacacctgctcttggctggcccactttggtatgggctttaatttcactaccccaaacacgatactgtcatctgctttataataatgctcaagatgcctgataaaaatctcattttgcagccagacaagccttgaatccttttggcactaactgcaaaggaagatttttttctctagatatgcattagcagctagtgctccagttagaagcacgaactataaccttgataagtaaacagcagctggtggttaacaagtggatcgtcatgttcagtagtttatacattatgtgagaagtaacgttctgattctttttcttacacagaattggcagagggggtcgatttgggaggaaaggtgtggctataaactttgttactgaagaagacaagaggattcttcgtgacattgagactttctacaatactacagtggaggagatgcccatgaatgtggctgaccttatttaattcctgggatgagagttttggatgcagtgctcgctgttgctgaataggcgatcacaacgtgcattgtgcttctttctttgggaatatttgaatcttgtctcaatgctcataacggatcagaaatacagattttgatagcaaagcgacgttagtcgtgagctcttgtgaggaaagtcattggctttatcctctttagagttagactgttggggtgggtataaaagatggggtctgtaaaatctttctttcttagaaatttatttcctagttctgtagaaatggttgtattagatgttctctatcatttaataatatacttgtggactaaaagatataagtgctgtataaaatcagccaattatgttaaactagcatatctgcctttattgtgtttgtcattagcctgagtagaaaggcctttaaaatttttttagaaagcatttgaatgcattttgtttggtattgtatttattcaataaagtatttaattagtgct

SEQ ID NO: 4427 - protein, 60 aa, Homo sapiens
MGSVKSFFLRNLFPSSVEMVVLDVLYHLIIYLWTKRYKCCIKSANYVKLAYLPLLCLSLA

SEQ ID NO: 4428 - DNA, 1693 bp, Homo sapiens
tctgatcactactgacttgttggctcgcgggattgatgtgcaacaagtgtctttggttataaattatgatctacctaccaatcgtgaaaactatattcacaggagtcgatagcagcagttggtgacgagatggcactcagaaacggcgttgacgtaatttaggacgtggaatcataagcgaaacagcacactgtttgaataaagagcgagtcggtatttatatttgtttttcttttgtcatgattatttgatttttaagttgctccagctaaggcatttttttgtattagtatttctattagggaacctttcttattaggtggtttgtattgtctggtttctaacatgcaggtagctgtttggcagttaaacacgtttagagtaatttgagttacaacgtgtgaaactgagcaaaaaagcagtgataagtttgggttaccataccaaatatttgttttcccactggaaaaaagtaagttttagaaaatagttaacctttgcagcatttgtttacagtttacagttccagaagtgcgtcgaaatggattacataactgctcttttattcctggtgttcacatctgtcccaggctgacacctgctcttggctggcccactttggtatgggctttaatttcactaccccaaacacgatactgtcatctgctttataataatgctcaagatgcctgataaaaatctcattttgcagccagacaagccttgaatccttttggcactaactgcaaaggaagatttttttctctagatatgcattagcagctagtgctccagttagaagcacgaactataaccttgataagtaaacagcagctggtggttaacaagtggatcgtcatgttcagtagtttatacattatgtgagaagtaacgttctgattctttttcttacacagaattggcagagggggtcgatttgggaggaaaggtgtggctataaactttgttactgaagaagacaagaggattcttcgtgacattgagactttctacaatactacagtggaggagatgcccatgaatgtggctgaccttatttaattcctgggatgagagttttggatgcagtgctcgctgttgctgaataggcgatcacaacgtgcattgtgcttctttctttgggaatatttgaatcttgtctcaatgctcataacggatcagaaatacagattttgatagcaaagcgacgttagtcgtgagctcttgtgaggaaagtcattggctttatcctctttagagttagactgttggggtgggtataaaagatggggtctgtaaaatctttctttcttagaaatttatttcctagttctgtagaaatggttgtattagatgttctctatcatttaataatatacttgtggactaaaagatataagtgctgtataaaatcagccaattatgttaaactagcatatctgcctttattgtgtttgtcattagcctgagtagaaaggcctttaaaatttttttagaaagcatttgaatgcattttgtttggtattgtatttattcaataaagtatttaattagtgctaagtgtgaactggaccctgttgctaagccccagcaagcaatcctaggtagggtttaatccccagtaaaattgccatattgcacatgtcttaatgaagtttgaatgttaaataaattgtatattcactttaaaggt

SEQ ID NO: 4429 - protein, 60 aa, Homo sapiens; identical to SEQ ID NO: 4427

SEQ ID NO: 4430 - DNA, 2166 bp, Homo sapiens
tctgatcactactgacttgttggctcgcgggattgatgtgcaacaagtgtctttggttataaattatgatctacctaccaatcgtgaaaactatattcacaggagtcgatagcagcagttggtgacgagatggcactcagaaacggcgttgacgtaatttaggacgtggaatcataagcgaaacagcacactgtttgaataaagagcgagtcggtatttatatttgtttttcttttgtcatgattatttgatttttaagttgctccagctaaggcatttttttgtattagtatttctattagggaacctttcttattaggtggtttgtattgtctggtttctaacatgcaggtagctgtttggcagttaaacacgtttagagtaatttgagttacaacgtgtgaaactgagcaaaaaagcagtgataagtttgggttaccataccaaatatttgttttcccactggaaaaaagtaagttttagaaaatagttaacctttgcagcatttgtttacagtttacagttccagaagtgcgtcgaaatggattacataactgctcttttattcctggtgttcacatctgtcccaggctgacacctgctcttggctggcccactttggtatgggctttaatttcactaccccaaacacgatactgtcatctgctttataataatgctcaagatgcctgataaaaatctcattttgcagccagacaagccttgaatccttttggcactaactgcaaaggaagatttttttctctagatatgcattagcagctagtgctccagttagaagcacgaactataaccttgataagtaaacagcagctggtggttaacaagtggatcgtcatgttcagtagtttatacattatgtgagaagtaacgttctgattctttttcttacacagaattggcagagggggtcgatttgggaggaaaggtgtggctataaactttgttactgaagaagacaagaggattcttcgtgacattgagactttctacaatactacagtggaggagatgcccatgaatgtggctgaccttatttaattcctgggatgagagttttggatgcagtgctcgctgttgctgaataggcgatcacaacgtgcattgtgcttctttctttgggaatatttgaatcttgtctcaatgctcataacggatcagaaatacagattttgatagcaaagcgacgttagtcgtgagctcttgtgaggaaagtcattggctttatcctctttagagttagactgttggggtgggtataaaagatggggtctgtaaaatctttctttcttagaaatttatttcctagttctgtagaaatggttgtattagatgttctctatcatttaataatatacttgtggactaaaagatataagtgctgtataaaatcagccaattatgttaaactagcatatctgcctttattgtgtttgtcattagcctgagtagaaaggcctttaaaatttttttagaaagcatttgaatgcattttgtttggtattgtatttattcaataaagtatttaattagtgctaagtgtgaactggaccctgttgctaagccccagcaagcaatcctaggtagggtttaatccccagtaaaattgccatattgcacatgtcttaatgaagtttgaatgttaaataaattgtatattcactttaaaggtgcttttggtcattttatttttattacaacttcattatttacaaaaccccccatccagatatattcacgttaacaattctgagataactgctgcatcacagttgcacaaaggctgatgagttgcaaatgttcatcagcaccatctgctaggcatttgtcaacttcctacgagaaaaatttaagaaattagcatccttcaggtagttaaatgttccattgacatgtgcaaagtacctacttacggcaagtttttctgtgataatagacttctgtttatcagataagttattttctacaaccacatcatggagttgattgacgagctgagttgctgcatgaccctcatctattaaatcctataataaaaaaaacttttggtatgatgacttaatattcctttccccaaagttagtaagctgactttaccttgaccacagcttctagtttgtcaaaagagccactctgacaggcagc

SEQ ID NO: 4431 - protein, 60 aa, Homo sapiens; identical to SEQ ID NO: 4427

SEQ ID NO: 4432 - DNA, 137 bp, Homo sapiens; identical to SEQ ID NO: 460

SEQ ID NO: 4433 - protein, 44 aa, Homo sapiens
PKVSFLGGRFLSNLCQLGLFGRVKDHTPQWAIPLSIVRYYFVAY

SEQ ID NO: 4434 - DNA, 1138 bp, Homo sapiens
cacgtttagagtaatttgagttacaacgtgtgaaactgagcaaaaaagcagtgataagtttgggttaccataccaaatatttgttttcccactggaaaaaagtaagttttagaaaatagttaacctttgcagcatttgtttacagtttacagttccagaagtgcgtcgaaatggattacataactgctcttttattcctggtgttcacatctgtcccaggctgacacctgctcttggctggcccactttggtatgggctttaatttcactaccccaaacacgatactgtcatctgctttataataatgctcaagatgcctgataaaaatctcattttgcagccagacaagccttgaatccttttggcactaactgcaaaggaagatttttttctctagatatgcattagcagctagtgctccagttagaagcacgaactataaccttgataagtaaacagcagctggtggttaacaagtggatcgtcatgttcagtagtttatacattatgtgagaagtaacgttctgattctttttcttacacagaattggcagagggggtcgatttgggaggaaaggtgtggctataaactttgttactgaagaagacaagaggattcttcgtgacattgagactttctacaatactacagtggaggagatgcccatgaatgtggctgaccttatttaattcctgggatgagagttttggatgcagtgctcgctgttgctgaataggcgatcacaacgtgcattgtgcttctttctttgggaatatttgaatcttgtctcaatgctcataacggatcagaaatacagattttgatagcaaagcgacgttagtcgtgagctcttgtgaggaaagtcattggctttatcctctttagagttagactgttggggtgggtataaaagatggggtctgtaaaatctttctttcttagaaatttatttcctagttctgtagaaatggtattgtatttattcaataaagtatttaattagtgctaagtgtgaactggaccctgttgctaagccccagcaagcaatcctaggtagggtttaatccccagtaaaattgccatattgcacatgtcttaatgaagtttgaatgttaaataaattgtatattcacttt

SEQ ID NO: 4435 - protein, 37 aa, Homo sapiens
MQCSLLLNRRSQRALCFFLWEYLNLVSMLITDQKYRF

SEQ ID NO: 4436 - DNA, 1617 bp, Homo sapiens
cacgtttagagtaatttgagttacaacgtgtgaaactgagcaaaaaagcagtgataagtttgggttaccataccaaatatttgttttcccactggaaaaaagtaagttttagaaaatagttaacctttgcagcatttgtttacagtttacagttccagaagtgcgtcgaaatggattacataactgctcttttattcctggtgttcacatctgtcccaggctgacacctgctcttggctggcccactttggtatgggctttaatttcactaccccaaacacgatactgtcatctgctttataataatgctcaagatgcctgataaaaatctcattttgcagccagacaagccttgaatccttttggcactaactgcaaaggaagatttttttctctagatatgcattagcagctagtgctccagttagaagcacgaactataaccttgataagtaaacagcagctggtggttaacaagtggatcgtcatgttcagtagtttatacattatgtgagaagtaacgttctgattctttttcttacacagaattggcagagggggtcgatttgggaggaaaggtgtggctataaactttgttactgaagaagacaagaggattcttcgtgacattgagactttctacaatactacagtggaggagatgcccatgaatgtggctgaccttatttaattcctgggatgagagttttggatgcagtgctcgctgttgctgaataggcgatcacaacgtgcattgtgcttctttctttgggaatatttgaatcttgtctcaatgctcataacggatcagaaatacagattttgatagcaaagcgacgttagtcgtgagctcttgtgaggaaagtcattggctttatcctctttagagttagactgttggggtgggtataaaagatggggtctgtaaaatctttctttcttagaaatttatttcctagttctgtagaaatggtattgtatttattcaataaagtatttaattagtgctaagtgtgaactggaccctgttgctaagccccagcaagcaatcctaggtagggtttaatccccagtaaaattgccatattgcacatgtcttaatgaagtttgaatgttaaataaattgtatattcactttaaaggtgcttttggtcattttatttttattacaacttcattatttacaaaaccccccatccagatatattcacgttaacaattctgagataactgctgcatcacagttgcacaaaggctgatgagttgcaaatgttcatcagcaccatctgctaggcatttgtcaacttcctacgagaaaaatttaagaaattagcatccttcaggtagttaaatgttccattgacatgtgcaaagtacctacttacggcaagtttttctgtgataatagacttctgtttatcagataagttattttctacaaccacatcatggagttgattgacgagctgagttgctgcatgaccctcatctattaaatcctataataaaaaaaacttttggtatgatgacttaatattcctttccccaaagttagtaagctgactttaccttgaccacagcttctagtttgtcaaaagagccactctgacaggcagc

SEQ ID NO: 4437 - protein, 37 aa, Homo sapiens; identical to SEQ ID NO: 4435

SEQ ID NO: 4438 - DNA, 715 bp, Homo sapiens
tttccgattaagagttcttgagttaaatgcatctgatgaacgtggaatacaagtagttcgagagaaagtgaaaaattttgctcaattaactctatgtcagtcgaataattgaacccctgacctctagatgttcaaaattccgcttcaagcctctgtcagataaaattcaacagcagcgattactagacattgccaagaaggaaaatgtcaaaattagtgatgagggaatagcttatcttgttaaagtgtcagaaggagacttaagaaaagccattacatttcttcaaagcgctactcgattaacaggtggaaaggagatcacagagaaagtgattacagacattgccggggtaataccagctgagaaaattgatggagtatttgctgcctgtcagagtggctcttttgacaaactagaagctgtggtcaaggatttaatagatgagggtcatgcagcaactcagctcgtcaatcaactccatgatgtggttgtagaaaataacttatctgataaacagaagtctattatcacagaaaaacttgccgaagttgacaaatgcctagcagatggtgctgatgaacatttgcaactcatcagcctttgtgcaactgtgatgcagcagttatctcagaattgttaacgtgaatatatctggatggggggttttgtaaataatgaagttgtaataaaaataaaatgaccaaaagcaccttt

SEQ ID NO: 4439 - protein, 39 aa, Homo sapiens
SVRRRLKKSHYISSKRYSINRWKGDHRESDYRHCRGNTS

SEQ ID NO: 4440 - DNA, 1389 bp, Homo sapiens
accggcgtattcccgccctgcttttcgcccgccgttccgtggcgggaactgaggcgactgtggggacatcagtgatcgtaagtctcctgggcccgttattctcagattaggtgacggagctaagacttcgagaccatctcgtcctttttgtatcgcggaaacctgaggaacgagccggcggcggtgacctgcacgagaagccaggctaactgggtgaagtaccatgcaagcatttcttaaaggtacatccatcagtactaaacccccgctgaccaaggatcgaggagtagctgccagtgcgggaagtagcggagagaacaagaaagccaaacccgttccctgggtggaaaaatatcgcccaaaatgtgtggatgaagttgctttccaggaagaagtggttgcagtgctgaaaaaatctttagaaggagcagatcttcctaatctcttgttttacggaccacctggaactggaaaaacatccactattttggcagcagctagagaactctttgggcctgaacttttccgattaagagttcttgagttaaatgcatctgatgaacgtggaatacaagtagttcgagagaaagtgaaaaattttgctcaattaactgtgtcaggaagtcgctcagatgggaagccgtgtccgccttttaagattgtgattctggatgaagcagattctatgacctcagctgctcaggcagctttaagacgtaccatggagaaggagtcgaaaaccacccgattctgtcttatctgtaactatgtcagtcgaataattgaacccctgacctctagatgttcaaaattccgcttcaagcctctgtcagataaaattcaacagcagcgattactagacattgccaagaaggaaaatgtcaaaattagtgatgagggaatagcttatcttgttaaagtgtcagaaggagacttaagaaaagccattacatttcttcaaagcgctactcgattaacaggtggaaaggagatcacagagaaagtgattacagacattgccggggtaataccagctgagaaaattgatggagtatttgctgcctgtcagagtggctcttttgacaaactagaagctgtggtcaaggatttaatagatgagggtcatgcagcaactcagctcgtcaatcaactccatgatgtggttgtagaaaataacttatctgataaacagaagtctattatcacagaaaaacttgccgaagttgacaaatgcctagcagatggtgctgatgaacatttgcaactcatcagcctttgtgcaactgtgatgcagcagttatctcagaattgttaacgtgaatatatctggatggggggttttgtaaataatgaagttgtaataaaaataaaatgaccaaaagcaccttt

SEQ ID NO: 4441 - protein, 363 aa, Homo sapiens; identical to SEQ ID NO: 462

SEQ ID NO: 4442 - DNA, 3969 bp, Homo sapiens
agtgtaaaagtctctgaggctccttgcagagacaagtgatggaacgaccttgacagaagagagcagagagaggaaagaagggggaggaagccaagcaaaggagagagaaatggtgtgatgggggaggagacgcggagttgggtagaaatgccttttaataagatattgggaaaaaagtattaaacctaaaactgcagctcttgaaggatcattttttcatctttgtgttaggatttacaagtacagtgcatagtaatttttggataattggagtgaatgaatgaaaagcgtgaaacgccttacaggagcgagaagatccacgagagaaagcgagcagggacgcagctctggtgcctggtcctgccgggtggtccccacgccgccagccgcgcgttccccaaccgggcgctcccggcgccctctcggtgagccgccctgaaaccgccagggggcgctccccggctgccggggctgaggcgggcggagctgctttaaatcgcggcgcccagcggttctgcgtctcagttcccgagcctgggagcaaccgcagcttctagtatccagactccagcgccgccccgggcgcggaccccaaccccgacccagagcttctccagcggcggcgcagcgagcagggctccccgccttaacttcctccgcggggcccagccaccttcgggagtccgggttgcccacctgcaaactctccgccttctgcacctgccacccctgagccagcgcgggcgcccgagcgagtcatggccaacgcggggctgcagctgttgggcttcattctcgccttcctgggatggatcggcgccatcgtcagcactgccctgccccagtggaggatttactcctatgccggcgacaacatcgtgaccgcccaggccatgtacgaggggctgtggatgtcctgcgtgtcgcagagcaccgggcagatccagtgcaaagtctttgactccttgctgaatctgagcagcacattgcaagcaacccgtgccttgatggtggttggcatcctcctgggagtgatagcaatctttgtggccaccgttggcatgaagtgtatgaagtgcttggaagacgatgaggtgcagaagatgaggatggctgtcattgggggtgcgatatttcttcttgcaggtctggctattttagttgccacagcatggtatggcaatagaatcgttcaagaattctatgaccctatgaccccagtcaatgccaggtacgaatttggtcaggctctcttcactggctgggctgctgcttctctctgccttctgggaggtgccctactttgctgttcctgtccccgaaaaacaacctcttacccaacaccaaggccctatccaaaacctgcaccttccagcgggaaagactacgtgtgacacagaggcaaaaggagaaaatcatgttgaaacaaaccgaaaatggacattgagatactatcattaacattaggaccttagaattttgggtattgtaatctgaagtatggtattacaaaacaaacaaacaaacaaaaaacccatgtgttaaaatactcagtgctaaacatggcttaatcttattttatcttctttcctcaatataggagggaagatttttccatttgtattactgcttcccattgagtaatcatactcaactgggggaaggggtgctccttaaatatatatagatatgtatatatacatgtttttctattaaaaatagacagtaaaatactattctcattatgttgatactagcatacttaaaatatctctaaaataggtaaatgtatttaattccatattgatgaagatgtttattggtatattttctttttcgtctatatatacatatgtaacagtcaaatatcatttactcttcttcattagctttgggtgcctttgccacaagacctagcctaatttaccaaggatgaattctttcaattcttcatgcgtgcccttttcatatacttattttattttttaccataatcttatagcacttgcatcgttattaagcccttatttgttttgtgtttcattggtctctatctcctgaatctaacacatttcatagcctacattttagtttctaaagccaagaagaatttattacaaatcagaactttggaggcaaatctttctgcatgaccaaagtgataaattcctgttgaccttcccacacaatccctgtactctgacccatagcactcttgtttgctttgaaaatatttgtccaattgagtagctgcatgctgttcccccaggtgttgtaacacaactttattgattgaatttttaagctacttattcatagttttatatccccctaaactacctttttgttccccattccttaattgtattgttttcccaagtgtaattatcatgcgttttatatcttcctaataaggtgtggtctgtttgtctgaacaaagtgctagactttctggagtgataatctggtgacaaatattctctctgtagctgtaagcaagtcacttaatctttctacctcttttttctatctgccaaattgagataatgatacttaaccagttagaagaggtagtgtgaatattaattagtttatattactctcattctttgaacatgaactatgcctatgtagtgtctttatttgctcagctggctgagacactgaagaagtcactgaacaaaacctacacacgtaccttcatgtgattcactgccttcctctctctaccagtctatttccactgaacaaaacctacacacataccttcatgtggttcagtgccttcctctctctaccagtctatttccactgaacaaaacctacgcacataccttcatgtggctcagtgccttcctctctctaccagtctatttccattctttcagctgtgtctgacatgtttgtgctctgttccattttaacaactgctcttacttttccagtctgtacagaatgctatttcacttgagcaagatgatgtaatggaaagggtgttggcattggtgtctggagacctggatttgagtcttggtgctatcaatcaccgtctgtgtttgagcaaggcatttggctgctgtaagcttattgcttcatctgtaagcggtggtttgtaattcctgatcttcccacctcacagtgatgttgtggggatccagtgagatagaatacatgtaagtgtggttttgtaatttaaaaagtgctatactaagggaaagaattgaggaattaactgcatacgttttggtgttgcttttcaaatgtttgaaaacaaaaaaaatgttaagaaatgggtttcttgccttaaccagtctctcaagtgatgagacagtgaagtaaaattgagtgcactaaacaaataagattctgaggaagtcttatcttctgcagtgagtatggcccgatgctttctgtggctaaacagatgtaatgggaagaaataaaagcctacgtgttggtaaatccaacagcaagggagatttttgaatcataataactcataaggtgctatctgttcagtgatgccctcagagctcttgctgttagctggcagctgacgctgctaggatagttagtttggaaatggtacttcataataaactacacaaggaaagtcagccactgtgtcttatgaggaattggacctaataaattttagtgtgccttccaaacctgagaatatatgcttttggaagttaaaatttaaatggcttttgccacatacatagatcttcatgatgtgtgagtgtaattccatgtggatatcagttaccaaacattacaaaaaaattttatggcccaaaatgaccaacgaaattgttacaatagaatttatccaattttgatctttttatattcttctaccacacctggaaacagaccaatagacattttggggttttataataggaatttgtataaagcattactctttttcaataaattgttttttaatttaaaaaaaggatt

SEQ ID NO: 4443 - protein, 211 aa, Homo sapiens; identical to SEQ ID NO: 466

SEQ ID NO: 4444 - DNA, 3294 bp, Homo sapiens
agtgtaaaagtctctgaggctccttgcagagacaagtgatggaacgaccttgacagaagagagcagagagaggaaagaagggggaggaagccaagcaaaggagagagaaatggtgtgatgggggaggagacgcggagttgggtagaaatgccttttaataagatattgggaaaaaagtattaaacctaaaactgcagctcttgaaggatcattttttcatctttgtgttaggatttacaagtacagtgcatagtaatttttggataattggagtgaatgaatgaaaagcgtgaaacgccttacaggagcgagaagatccacgagagaaagcgagcagggacgcagctctggtgcctggtcctgccgggtggtccccacgccgccagccgcgcgttccccaaccgggcgctcccggcgccctctcggtgagccgccctgaaaccgccagggggcgctccccggctgccggggctgaggcgggcggagctgctttaaatcgcggcgcccagcggttctgcgtctcagttcccgagcctgggagcaaccgcagcttctagtatccagactccagcgccgccccgggcgcggaccccaaccccgacccagagcttctccagcggcggcgcagcgagcagggctccccgccttaacttcctccgcggggcccagccaccttcgggagtccgggttgcccacctgcaaactctccgccttctgcacctgccacccctgagccagcgcgggcgcccgagcgagtcatggccaacgcggggctgcagctgttgggcttcattctcgccttcctgggatggatcggcgccatcgtcagcactgccctgccccagtggaggatttactcctatgccggcgacaacatcgtgaccgcccaggccatgtacgaggggctgtggatgtcctgcgtgtcgcagagcaccgggcagatccagtgcaaagtctttgactccttgctgaatctgagcagcacattgcaagcaacccgtgccttgatggtggttggcatcctcctgggagtgatagcaatctttgtggccaccgttggcatgaagtgtatgaagtgcttggaagacgatgaggtgcagaagatgaggatggctgtcattgggggtgcgatatttcttcttgcaggtctggctattttagttgccacagcatggtatggcaatagaatcgttcaagaattctatgaccctatgaccccagtcaatgccaggtacgaatttggtcaggctctcttcactggctgggctgctgcttctctctgccttctgggaggtgccctactttgctgttcctgtccccgaaaaacaacctcttacccaacaccaaggccctatccaaaacctgcaccttccagcgggaaagactacgtgtgacacagaggcaaaaggagaaaatcatgttgaaacaaaccgaaaatggacattgagatactatcattaacattaggaccttagaattttgggtattgtaatctgaagtatggtattacaaaacaaacaaacaaacaaaaaacccatgtgttaaaatactcagtgctaaacatggcttaatcttattttatcttctttcctcaatataggagggaagatttttccatttgtattactgcttcccattgagtaatcatactcaactgggggaaggggtgctccttaaatatatatagatatgtatatatacatgtttttctattaaaaatagacagtaaaatactattctcattatgttgatactagcatacttaaaatatctctaaaataggtaaatgtatttaattccatattgatgaagatgtttattggtatattttctttttcgtctatatatacatatgtaacagtcaaatatcatttactcttcttcattagctttgggtgcctttgccacaagacctagcctaatttaccaaggatgaattctttcaattcttcatgcgtgcccttttcatatacttattttattttttaccataatcttatagcacttgcatcgttattaagcccttatttgttttgtgtttcattggtctctatctcctgaatctaacacatttcatagcctacattttagtttctaaagccaagaagaatttattacaaatcagaactttggaggcaaatctttctgcatgaccaaagtgataaattcctgttgaccttcccacacaatccctgtactctgacccatagcactcttgtttgctttgaaaatatttgtccaattgagtagctgcatgctgttcccccaggtgttgtaacacaactttattgattgaatttttaagctacttattcatagttttatatccccctaaactacctttttgttccccattccttaattgtattgttttcccaagtgtaattatcatgcgttttatatcttcctaataaggtgtggtctgtttgtctgaacaaagtgctagactttctggagtgataatctggtgacaaatattctctctgtagctgtaagcaagtcacttaatctttctacctcttttttctatctgccaaattgagataatgatacttaaccagttagaagaggtagtgtgaatattaattagtttatattactctcattctttgaacatgaactatgcctatgtagtgtctttatttgctcagctggctgagacactgaagaagtcactgaacaaaacctacacacgtaccttcatgtgattcactgccttcctctctctaccagtctatttccactgaacaaaacctacacacataccttcatgtggttcagtgccttcctctctctaccagtctatttccactgaacaaaacctacgcacataccttcatgtggctcagtgccttcctctctctaccagtctatttccattctttcagctgtgtctgacatgtttgtgctctgttccattttaacaactgctcttacttttccagtctgtacagaatgctatttcacttgagcaagatgatgtaatggaaagggtgttggcattggtgtctggagacctggatttgagtcttggtgctatcaatcaccgtctgtgtttgagcaaggcatttggctgctgtaagcttattgcttcatctgtaagcggtggtttgtaattcctgatcttcccacctcacagtgatgttgtggggatccagtgagatagaatacatgtaagtgtggttttgtaatttaaaaagtgctatactaagggaaagaattgaggaattaactgcatacgttttggtgttgcttttcaaatgtttgaaaacaaaaaaaatgttaagaaatggg

SEQ ID NO: 4445 - protein, 211 aa, Homo sapiens; identical to SEQ ID NO: 466

SEQ ID NO: 4446 - DNA, 1817 bp, Homo sapiens
agtgtaaaagtctctgaggctccttgcagagacaagtgatggaacgaccttgacagaagagagcagagagaggaaagaagggggaggaagccaagcaaaggagagagaaatggtgtgatgggggaggagacgcggagttgggtagaaatgccttttaataagatattgggaaaaaagtattaaacctaaaactgcagctcttgaaggatcattttttcatctttgtgttaggatttacaagtacagtgcatagtaatttttggataattggagtgaatgaatgaaaagcgtgaaacgccttacaggagcgagaagatccacgagagaaagcgagcagggacgcagctctggtgcctggtcctgccgggtggtccccacgccgccagccgcgcgttccccaaccgggcgctcccggcgccctctcggtgagccgccctgaaaccgccagggggcgctccccggctgccggggctgaggcgggcggagctgctttaaatcgcggcgcccagcggttctgcgtctcagttcccgagcctgggagcaaccgcagcttctagtatccagactccagcgccgccccgggcgcggaccccaaccccgacccagagcttctccagcggcggcgcagcgagcagggctccccgccttaacttcctccgcggggcccagccaccttcgggagtccgggttgcccacctgcaaactctccgccttctgcacctgccacccctgagccagcgcgggcgcccgagcgagtcatggccaacgcggggctgcagctgttgggcttcattctcgccttcctgggatggatcggcgccatcgtcagcactgccctgccccagtggaggatttactcctatgccggcgacaacatcgtgaccgcccaggccatgtacgaggggctgtggatgtcctgcgtgtcgcagagcaccgggcagatccagtgcaaagtctttgactccttgctgaatctgagcagcacattgcaagcaacccgtgccttgatggtggttggcatcctcctgggagtgatagcaatctttgtggccaccgttggcatgaagtgtatgaagtgcttggaagacgatgaggtgcagaagatgaggatggctgtcattgggggtgcgatatttcttcttgcaggtctggctattttagttgccacagcatggtatggcaatagaatcgttcaagaattctatgaccctatgaccccagtcaatgccaggtacgaatttggtcaggctctcttcactggctgggctgctgcttctctctgccttctgggaggtgccctactttgctgttcctgtccccgaaaaacaacctcttacccaacaccaaggccctatccaaaacctgcaccttccagcgggaaagactacgtgtgacacagaggcaaaaggagaaaatcatgttgaaacaaaccgaaaatggacattgagatactatcattaacattaggaccttagaattttgggtattgtaatctgaagtatggtattacaaaacaaacaaacaaacaaaaaacccatgtgttaaaatactcagtgctaaacatggcttaatcttattttatcttctttcctcaatataggagggaagatttttccatttgtattactgcttcccattgagtaatcatactcaactgggggaaggggtgctccttaaatatatatagatatgtatatatacatgtttttctattaaaaatagacagtaaaatactattctcattatgttgatactagcatacttaaaatatctctaaaataggtaaatgtatttaattccatattgatgaagatgtt

SEQ ID NO: 4447 - protein, 211 aa, Homo sapiens; identical to SEQ ID NO: 466

SEQ ID NO: 4448 - DNA, 1727 bp, Homo sapiens
agtgtaaaagtctctgaggctccttgcagagacaagtgatggaacgaccttgacagaagagagcagagagaggaaagaagggggaggaagccaagcaaaggagagagaaatggtgtgatgggggaggagacgcggagttgggtagaaatgccttttaataagatattgggaaaaaagtattaaacctaaaactgcagctcttgaaggatcattttttcatctttgtgttaggatttacaagtacagtgcatagtaatttttggataattggagtgaatgaatgaaaagcgtgaaacgccttacaggagcgagaagatccacgagagaaagcgagcagggacgcagctctggtgcctggtcctgccgggtggtccccacgccgccagccgcgcgttccccaaccgggcgctcccggcgccctctcggtgagccgccctgaaaccgccagggggcgctccccggctgccggggctgaggcgggcggagctgctttaaatcgcggcgcccagcggttctgcgtctcagttcccgagcctgggagcaaccgcagcttctagtatccagactccagcgccgccccgggcgcggaccccaaccccgacccagagcttctccagcggcggcgcagcgagcagggctccccgccttaacttcctccgcggggcccagccaccttcgggagtccgggttgcccacctgcaaactctccgccttctgcacctgccacccctgagccagcgcgggcgcccgagcgagtcatggccaacgcggggctgcagctgttgggcttcattctcgccttcctgggatggatcggcgccatcgtcagcactgccctgccccagtggaggatttactcctatgccggcgacaacatcgtgaccgcccaggccatgtacgaggggctgtggatgtcctgcgtgtcgcagagcaccgggcagatccagtgcaaagtctttgactccttgctgaatctgagcagcacattgcaagcaacccgtgccttgatggtggttggcatcctcctgggagtgatagcaatctttgtggccaccgttggcatgaagtgtatgaagtgcttggaagacgatgaggtgcagaagatgaggatggctgtcattgggggtgcgatatttcttcttgcaggtctggctattttagttgccacagcatggtatggcaatagaatcgttcaagaattctatgaccctatgaccccagtcaatgccaggtacgaatttggtcaggctctcttcactggctgggctgctgcttctctctgccttctgggaggtgccctactttgctgttcctgtccccgaaaaacaacctcttacccaacaccaaggccctatccaaaacctgcaccttccagcgggaaagactacgtgtgacacagaggcaaaaggagaaaatcatgttgaaacaaaccgaaaatggacattgagatactatcattaacattaggaccttagaattttgggtattgtaatctgaagtatggtattacaaaacaaacaaacaaacaaaaaacccatgtgttaaaatactcagtgctaaacatggcttaatcttattttatcttctttcctcaatataggagggaagatttttccatttgtattactgcttcccattgagtaatcatactcaactgggggaaggggtgctccttaaatatatatagatatgtatatatacatgtttttctattaaaaatagacagt

SEQ ID NO: 4449 - protein, 211 aa, Homo sapiens; identical to SEQ ID NO: 466

SEQ ID NO: 4450 - DNA, 1203 bp, Homo sapiens
agtgtaaaagtctctgaggctccttgcagagacaagtgatggaacgaccttgacagaagagagcagagagaggaaagaagggggaggaagccaagcaaaggagagagaaatggtgtgatgggggaggagacgcggagttgggtagaaatgccttttaataagatattgggaaaaaagtattaaacctaaaactgcagctcttgaaggatcattttttcatctttgtgttaggatttacaagtacagtgcatagtaatttttggataattggagtgaatgaatgaaaagcgtgaaacgccttacaggagcgagaagatccacgagagaaagcgagcagggacgcagctctggtgcctggtcctgccgggtggtccccacgccgccagccgcgcgttccccaaccgggcgctcccggcgccctctcggtgagccgccctgaaaccgccagggggcgctccccggctgccggggctgaggcgggcggagctgctttaaatcgcggcgcccagcggttctgcgtctcagttcccgagcctgggagcaaccgcagcttctagtatccagactccagcgccgccccgggcgcggaccccaaccccgacccagagcttctccagcggcggcgcagcgagcagggctccccgccttaacttcctccgcggggcccagccaccttcgggagtccgggttgcccacctgcaaactctccgccttctgcacctgccacccctgagccagcgcgggcgcccgagcgagtcatggccaacgcggggctgcagctgttgggcttcattctcgccttcctgggatggatcggcgccatcgtcagcactgccctgccccagtggaggatttactcctatgccggcgacaacatcgtgaccgcccaggccatgtacgaggggctgtggatgtcctgcgtgtcgcagagcaccgggcagatccagtgcaaagtctttgactccttgctgaatctgagcagcacattgcaagcaacccgtgccttgatggtggttggcatcctcctgggagtgatagcaatctttgtggccaccgttggcatgaagtgtatgaagtgcttggaagacgatgaggtgcagaagatgaggatggctattttagttgccacagcatggtatggcaatagaatcgttcaagaattctatgaccctatgaccccagtcaatgccaggtaacgctatt

SEQ ID NO: 4451 - protein, 145 aa, Homo sapiens
MANAGLQLLGFILAFLGWIGAIVSTALPQWRIYSYAGDNIVTAQAMYEGLWMSCVSQSTGQIQCKVFDSLLNLSSTLQATRALMVVGILLGVIAIFVATVGMKCMKCLEDDEVQKMRMAILVATAWYGNRIVQEFYDPMTPVNAR

SEQ ID NO: 4452 - DNA, 2390 bp, Homo sapiens
cttcttccgagtggggaggagaatagctcactctccctagagggcctaagaaagatcagtttacaggttccagcatggggtgggacccttcctccttcccccgtcttggcactggcacttggtctggtgaccaccactagcccacagttgggtcagaaaacgttacagaactcctctctcccccacccgaaacacactcagcccttgcactgacctgccttctgattggaggctggttgcttcggataatgacctccaggaccccactgttggttacagcctgtttgtattattcttactgcaactcaagacacctgcagcagggcgtgagaaaaagtaaaagaccagtattttcacattgccaggtaccagaaacacagaagactgacacccgccacttaagtggggccagggctggtgtctgcccatgttgccatcctgatgggctgcttgccacaatgagggatcttcttcaatacatcgcttgcttctttgcctttttctctgctgggtttttgattgtggccacctggactgactgttggatggtgaatgctgatgactctctggaggtgagcacaaaatgccgaggcctctggtgggaatgcgtcacaaatgcttttgatgggattcgcacctgtgatgagtacgattccatacttgcggagcatcccttgaagctggtggtaactcgagcgttgatgattactgcagatattctagctgggtttggatttctcaccctgctccttggtcttgactgcgtgaaattcctccctgatgagccgtacattaaagtccgcatctgctttgttgctggagccacgttactaatagcaggtaccccaggaatcattggctctgtgtggtatgctgttgatgtgtatgtggaacgttctactttggttttgcacaatatatttcttggtatccaatataaatttggttggtcctgttggctcggaatggctgggtctctgggttgctttttggctggagctgttctcacctgctgcttatatctttttaaagatgttggacctgagagaaactatccttattccttgaggaaagcctattcagccgcgggtgtttccatggccaagtcatactcagcccctcgcacagagacggccaaaatgtatgctgtagacacaagggtgtaaaatgcacgtttcagggtgtgtttgcatatgatttaatcaatcagtatggttacattgataaaatagtaagtcaatccaggaacagttatttagaattcatattgaattaaattaattgctagcttaatcaaaatgtttgattctcctatactttttctttctattactcttatattttcccgtcattctctctgctaaccttccaccttatgcacacactttccctatattttaagataagtctgctaggatgtagaaatatttgtttgtgatttctatatagctattagagattatgacatagtaatattaaaatgaaatgatacttaaacagaaagcaatttccaaagaggccagggaccctaatctttgaagagatgaagaaacttacttttctccctggcttttggttcactttttgtacttttaacaagtgggtgaattatttgataattttgaggaagattattcttttaaattcaaactagtatgtcaatgcctaccattactctgattatattaaaacagaaaaaggaaataacaacttcgtataccagccactggtgagagttaaagacaagagctgcccccccacccccaaatgtcaaaggcaaatgctaaattgatactggagctcgtggtgactttctacctcactaacaacataagggatctccatattatttcaccactattctagctttgctgatatattgccaaatgattagactacagaatagttcaaccagagaatttactcatttattgattaaacatccaaatactattgtaatatactatgttaaaattcatcaattcaagtgcccacacaccactgaatcatcagcaccaagcaatatattagacatatggcaaaattcaacaaatatattttgatataaataaataaacgttcacgactttacttaaaaaatcaatgttgcggctgggcacggtagctcgcgtctgtaatccccgcactttgggaggccaaggcgggtggatcacgaggtcaagagacggagaccatcctggctaacatggtgaaaccctgtctctactaaaaatacaaaaattagccgggcgtggtggcggtgcctgtagtcccagctactcgggaggctgaggcaggagaatcgtttgaacccaggaggtggaggttgcagtgagcggagatcgcaccattgcactccagtctggcaacagagcgagactccatctcaa

SEQ ID NO: 4453 - protein, 305 aa, Homo sapiens; identical to SEQ ID NO: 468

SEQ ID NO: 4454 - DNA, 1447 bp, Homo sapiens
agttctgagaaagaaggaaataaacacaggcaccaaaccactatcctaagttgactgtcctttaaatatgtcaagatccagacttttcagtgtcacctcagcgatctcaacgatagggatcttgtgtttgccgctattccagttggtgctctcggacctaccatgcgaagaagatgaaatgtgtgtaaattataatgaccaacaccctaatggctggtatatctggatcctcctgctgctggttttggtggcagctcttctctgtggagctgtggtcctctgcctccagtgctggctgaggagaccccgaattgattctcacaggcgcaccatggcagtttttgctgttggagacttggactctatttatgggacagaagcagctgtgagtccaactgttggaattcaccttcaaactcaaacccctgacctatatcctgttcctgctccatgttttggccctttaggctccccacctccatatgaagaaattgtaaaaacaacctgattttaggtgtggattatcaatttaaagtattaacgacatctgtaattccaaaacatcaaatttaggaatagttatttcagttgttggaaatgtccagagatctattcatatagtctgaggaaggacaattcgacaaaagaatggatgttggaaaaaattttggtcatggagatgtttaaatagtaaagtagcaggcttttgatgtgtcactgctgtatcatacttttatgctacacaaccaaattaatgcttctccactagtatccaaacaggcaacaattaggtgctggaagtagtttccatcacatttaggactccactgcagtatacagcacaccattttctgctttaaactctttcctagcatggggtccataaaaattattataatttaacaatagcccaagccgagaatccaacatgtccagaaccagaaccagaaagatagtatttgaatgaaggtgaggggagagagtaggaaaaagaaaagtttggagttgaagggtaaaggataaatgaagaggaaaaggaaaagattacaagtctcagcaaaaacaagaggttttatgccccaacctgaagaggaagaaattgtagatagaaggtgaaggagattgctgaagatatagagcacatataatgccaacacggggagaaaagaaaagttccccttttacagtaatgaatgtggcctccatagtccatagtgtttctctggagcctcagggcttggcatttattgcagcatcatgctaagaaccttcggcataggtatctgttcccatgaggactgcagaagtagcaatgagacatcttcaagtggcattttggcagtggccatcagcagggggacagacaaaaacatccatcacagatgacatatgatcttcagctgacaaatttgttgaacaaaacaataaacatcaatagatatctaaa

SEQ ID NO: 4455 - protein, 146 aa, Homo sapiens; identical to SEQ ID NO: 470

SEQ ID NO: 4456 - DNA, 3647 bp, Homo sapiens
acaatgtcacagtggttatacaagtgagtcctgttcagcgtgggaggaaataacacaagaggcaaagatcactcgggaccaccttgtatattggctaccacagaacccaacacaagcagtaagttaaaatcatgaagctcctgacgtcagaggacatggctctgccatttgttaggtagggatcctgttaaaggctcagcttcctcatctggaaatggaaatataggccttgcctggtttgctgtaatgggtcgtgatgaggaccaaactacaaagagtggtacagatgttaattacaatgatttttcctatgccacccatggaaacaaaaatagcaagatagagaaggctaaatcccagttttttttgactgctattcagcaaagcctaggagactttcatgacacctggagaggcggccgtagtgtatgtgtaagagtaccggttccagagtggggctccccgagctcagccccaccacttaccaacagcggaccttgggccagatgctgaagccctttgtgccttggtttcctgacctattactgtggaaatgatgacagtaccctcctcatggcatcgtgagaattaaattagctaattcaggtgaagcatttagaagaggacctcctgacacttaataactgcttgatataaataatagcttctgctacagagtggccatgaagtctggacatgtagatattatattatcatgcatcataaggttgtgagtgaggaatggatgccattgttagtggcttccgttgtgctcagtggaaacacgcatctacaggtagaatgtagaggaacagcccaattcagctgtcttgtggatttcaggctgtggtctctctgcctctctctggaacacaggaggaactttgctactgccttgaccaacagaatatgggggaagcgacattgtgtgaattacaaggaaatcaacattcaaggggagacccaatgaagaagatagtgccagaacttaatggaggcagcccaagaggaacgtgtacctggggaagtcaagagctatttcttggacatttgtgcctctattccaaactcttctctcagagtagatgacaactcaggaaggagccagagatcttcctcagttgacttgttcagaaatatgatttgggattcagtctggcccgaagccatgcttccagcctcatctccactgtgcactttccatggcgttctgtcttggtccacttggcttgtgtagctgcctggcctgggttgtcctccccacccttgtctgcttggtggcacttggccctgttctaattgcttctgctcgggcagcttctctcctccctcctctgtgctctgagcacactggacagattcctgttagagctgtcactgtcttcctgctgtctgcccactgaccttggagctccaggaggacaggagccttatcttaccccatgacatggcctatgcccagcctggtgccaacgtggtctggaggtatctgtaggctgaatgaaattcttccctctgggatgccctttaaagttgttttctttctggaacctggggcagtgactggaatggttggaatgtggccttggtttgccattgggtgttttgttcctccgagcattggctggactctctggtgatttctggtcttgaaggacttcctgttttaaatgtctgtggggttgtggttcccgagctgctgcactgtctcccataacctttctctctatcctggcctggtctctcttccacaccagaactttcctctagatcaatggtccaggaccatcagaaccagtgaaccacactcctgaccattctccaaatagtcatttggccaaatacgaggtacgtggcagctctttcttttctggaccccacttcacctctgagcagcttccttctcccaggagctgaagctcccccacgatgtctcaatgccaggcagatgcgcttgaccttctgcctcttggggccctcaccaagctaagggattttaaatcattcaactaatgtattacagtgggaaagacaccccactaaggggctccactaaatatcctttccagttgataagatcatttttttttaatccagctacaaactcttgagttttaaaccccatgagttatttaccatacgcttgtatcccctacagtgatttttaaagtgccatggctgtttctccactggctgtggagtgagctgatgttactgcaggttgaggttgagccactttgcttcaccgacagttccaggagtccttttgggcactgactgtgggtccagtcctgagctgagtgcacagaggacgggggaggttgagggagtcaacacaactccgaggtgtccttgttctccaggggctctaggttctgacctgcacccagccacaagctgacttgagtcaaaaagtcacaaagtgtgacttggggtttcctatcccaggatcttggccagagcttcatttggaagccccagagacctggaccagacttgcaggtagacattcaccaatgcgtgatttgagggctgctcaaagggacctccccacttcccacatggagcactctcgggattagccatcaccggaaactcctttcccgcaggacagagcccagacaactcattctgtcttcaaaagccaccactgtctggcaccaacccacttttccaaactccacctcctgcgacttcagccacatggaacaagcatggactgatgttctctatacctttccaactccagctcttggcttctgctcttttctctgccaatgaggctgtgctgtctattactgagtaacaatattaccatatacttagcacctttaaacaatacacacttattatctcataatttctgtgggtcaagaattcaggtgtggcttagctgggtcctctgaaaggctgcaatgaagatgtcagccaggactgtggtctcaatccaagcttcagctagagaaggatctgcttcccaacttcgcatatgttggtaagattcaggctcttgcaagtgatcggaccaaggcccccagtttgttgttggctgttggctggaggctgccctcagtttctagctggttgtgggcagttgccttgagttccttgccacatgagcctcctcaacatgaatgcttgcttcttcaaagctggtgagagagaggctcttctaataagatggactgtacaagctcacattatgtaatcacagaagcaacagctgtcacctttgttatactttattgcttagcatcaagtcacaattcctgctgatactcaaaaggtagggattacatcagggcgtgggcaccaagaggtggggatcatggggccactttagcctctgtctccacccatctccttctcccaacctccctgtccactctagaaacagcaacctagtaaaattcatgaaagcttcccttagtcacctcaaccacagggctttgcttacatcgttctttagtacttcattcatttattcaacaaaatacatattgagcatctgccgtatgcctggagctagaggtagtatagtataatggttaaggcttcaagttctggaatcagagtctcttgttccaaatcctgggtctccacttcatgctgggtctcaataaactcatctctaaataacactagga

SEQ ID NO: 4457 - protein, 84 aa, Homo sapiens
MHHKVVSEEWMPLLVASVVLSGNTHLQVECRGTAQFSCLVDFRLWSLCLSLEHRRNFATALTNRIWGKRHCVNYKEINIQGETQ

SEQ ID NO: 4458 - DNA, 549 bp, Homo sapiens
tctcccataacctttctctctatcctggcctggtctctcttccacaccagaactttcctctagatcaatggtccaggaccatcagaaccagtgaaccacactcctgaccattctccaaatagtcatttggccaaatacgaggatcttggccagagcttcatttggaagccccagagacctggaccagacttgcaggtagacattcaccaatgcgtgatttgagggctgctcaaagggacctccccacttcccacatggagcactctcgggattagccatcaccggaaactcctttcccgcaggacagagcccagacaactcattctgtcttcaaaagccaccactgtctggcaccaacccacttttccaaactccacctcctgcgacttcagccacatggaacaagcatggactgatgttctctatacctttccaactccagctcttggcttctgctcttttctctgccaatgaggctgtgctgtctattactgagtaacaatattaccatatacttagcacctttaaacaatacacacttattatctc

SEQ ID NO: 4459 - protein, 52 aa, Homo sapiens
INGPGPSEPVNHTPDHSPNSHLAKYEDLGQSFIWKPQRPGPDLQVDIHQCVI

SEQ ID NO: 4460 - DNA, 1370 bp, Homo sapiens
tgttgttccagagtcgggctgtgccgagggaatgtgctgcttcccccattttgcagacagggacactgaggctcagtgagggtgagggctcacccaggttgcagagcctgcccaaagctgggtcttctggctccaagtcgggagcacgctgcacacctcatgccatggatcaggccttgaagctctccgtgaaggtgtacattgtgcccctcattgaccggcagagagccaggcctcagggacgagatcctggacagtcattgcatataagccgtggtgagtagatatggctcacgggaactgggcaggtggaatccacacctcaccgcgttgctgggaagatggaggaggtgacgcatgggaagacctccccaccaccaggtcgctccagtttggtgccagcgcctggagggagaggcgtggcgagggctgtgctgcctaggatccactgagtggctcttgctggcgtgtcagctgcgcgcgaaccagggctgggaggctcggctggaggtgtgaccagggcagggactgacctggcccggaacagaagcgcgcagagtcccatcctgccacgccacgaggagagaagaaggaaagatacagtgttaggaaagagacctccctcgcccctacgccccgcgcccctgcgcctcgcttcagcctcaggacagtcctgccgggacggtgagcgcattcagcaccctggacagcaccgcggttgcgctgcctccagggcggccccgggctgctcctgctccgcagagctacgccctccccccgggtgccccggaccctgcacttgccgccgctttcctcgcgctgctctggaccttgctagccggctctgcacctcccagaagccgtgggcgcgccgctcagctgctccatcgcctcactttcccaggctcgcgcccgaagcagagccatgagaaccccagggtgcctggcgagccgctagcgccatgggccccggcgaggcgctgctggcgggtctcctggtgatggtactggccgtggcgctgctatccaacgcactggtgctgctttgttgcgcctacagcgctgagctccgcactcgagcctcaggcgtcctcctggtgaatctgtctctgggccacctgctgctggcggcgctggacatgcccttcacgctgctcggtgtgatgcgcgggcggacaccgtcggcgcccggcgcatgccaagtcattggcttcctggacaccttcctggcgtccaacgcggcgctgagcgtggcggcgctgagcgcagaccagtggctggcagtgggcttcccactgcgctacgccggacgcctgcgaccgcgctatgccggcctgctgctgggctgtgcctggggacagtcgctggcc

SEQ ID NO: 4461 - protein, 52 aa, Homo sapiens [sequence omitted]

SEQ ID NO: 4462 - DNA, 1215 bp, Homo sapiens
ctgcccaaagctgggtcttctggctccaagtcgggagcacgctgcacacctcatgccatggatcaggccttgaagctctccgtgaaggtgtacattgtgcccctcattgaccggcagagagccaggcctcagggacgagatcctggacagtgtgaatacttccactgcagcccatctccagttaccaatgcggggtactgtgcatggagctggagagagccaccaggtcgctccagtttggtgccagcgcctggagggagaggcgtggcgagggctgtgctgcctaggatccactgagtggctcttgctggcgtgtcagctgcgcgcgaaccagggctgggaggctcggctggaggtgtgaccagggcagggactgacctggcccggaacagaagcgcgcagagtcccatcctgccacgccacgaggagagaagaaggaaagatacagtgttaggaaagagacctccctcgcccctacgccccgcgcccctgcgcctcgcttcagcctcaggacagtcctgccgggacggtgagcgcattcagcaccctggacagcaccgcggttgcgctgcctccagggcggccccgggctgctcctgctccgcagagctacgccctccccccgggtgccccggaccctgcacttgccgccgctttcctcgcgctgctctggaccttgctagccggctctgcacctcccagaagccgtgggcgcgccgctcagctgctccatcgcctcactttcccaggctcgcgcccgaagcagagccatgagaaccccagggtgcctggcgagccgctagcgccatgggccccggcgaggcgctgctggcgggtctcctggtgatggtactggccgtggcgctgctatccaacgcactggtgctgctttgttgcgcctacagcgctgagctccgcactcgagcctcaggcgtcctcctggtgaatctgtctctgggccacctgctgctggcggcgctggacatgcccttcacgctgctcggtgtgatgcgcgggcggacaccgtcggcgcccggcgcatgccaagtcattggcttcctggacaccttcctggcgtccaacgcggcgctgagcgtggcggcgctgagcgcagaccagtggctggcagtgggcttcccactgcgctacgccggacgcctgcgaccgcgctatgccggcctgctgctgggctgtgcctggggacagtcgctggcc

SEQ ID NO: 4463 - protein, 79 aa, Homo sapiens
MDQALKLSVKVYIVPLIDRQRARPQGRDPGQCEYFHCSPSPVTNAGYCAWSWREPPGRSSLVPAPGGRGVARAVLPRIH

SEQ ID NO: 4464 - DNA, 2113 bp, Homo sapiens
ataagccaccaggtcgctccagtttggtgccagcgcctggagggagaggcgtggcgagggctgtgctgcctaggatccactgagtggctcttgctggcgtgtcagctgcgcgcgaaccagggctgggaggctcggctggaggtgtgaccagggcagggactgacctggcccggaacagaagcgcgcagagtcccatcctgccacgccacgaggagagaagaaggaaagatacagtgttaggaaagagacctccctcgcccctacgccccgcgcccctgcgcctcgcttcagcctcaggacagtcctgccgggacggtgagcgcattcagcaccctggacagcaccgcggttgcgctgcctccagggcggccccgggctgctcctgctccgcagagctacgccctccccccgggtgccccggaccctgcacttgccgccgctttcctcgcgctgctctggaccttgctagccggctctgcacctcccagaagccgtgggcgcgccgctcagctgctccatcgcctcactttcccaggctcgcgcccgaagcagagccatgagaaccccagggtgcctggcgagccgctagcgccatgggccccggcgaggcgctgctggcgggtctcctggtgatggtactggccgtggcgctgctatccaacgcactggtgctgctttgttgcgcctacagcgctgagctccgcactcgagcctcaggcgtcctcctggtgaatctgtctctgggccacctgctgctggcggcgctggacatgcccttcacgctgctcggtgtgatgcgcgggcggacaccgtcggcgcccggcgcatgccaagtcattggcttcctggacaccttcctggcgtccaacgcggcgctgagcgtggcggcgctgagcgcagaccagtggctggcagtgggcttcccactgcgctacgccggacgcctgcgaccgcgctatgccggcctgctgctgggctgtgcctggggacagtcgctggccttctcaggcgctgcacttggctgctcgtggcttggctacagcagcgccttcgcgtcctgttcgctgcgcctgccgcccgagcctgagcgtccgcgcttcgcagccttcaccgccacgctccatgccgtgggcttcgtgctgccgctggcggtgctctgcctcacctcgctccaggtgcaccgggtggcacgcagacactgccagcgcatggacaccgtcaccatgaaggcgctcgcgctgctcgccgacctgcaccccagtgtgcggcagcgctgcctcatccagcagaagcggcgccgccaccgcgccaccaggaagattggcattgctattgcgaccttcctcatctgctttgccccgtatgtcatgaccaggctggcggagctcgtgcccttcgtcaccgtgaacgcccagtggggcatcctcagcaagtgcctgacctacagcaaggcggtggccgacccgttcacgtactctctgctccgccggccgttccgccaagtcctggccggcatggtgcaccggctgctgaagagaaccccgcgcccagcatccacccatgacagctctctggatgtggccggcatggtgcaccagctgctgaagagaaccccgcgcccagcgtccacccacaacggctctgtggacacagagaatgattcctgcctgcagcagacacactgagggcctggcagggctcatcgcccccaccttctaagaagccctgtggaaagggcactggccctgccacagagatgccactggggacccccagacaccagtggcttgactttgagctaaggctgaagtacaggaggaggaggaggagagggccggatgtgggtgtggacagcagtagtggcggaggagagctcggggctgggctgcctggctgctgggtggccccgggacagtggcttttcctctctgaaccttagcttcctcacccttgttctggggtcatggcgatgcttcgagacagtgggtagggaagtgccctgtgtggcatatggtactcgtgggcgtgctataagtgactgctgttcatgtgggtgaggtggtcactcttgctcagggtctgttgtgcagcccagatggacacctgtttctcc

SEQ ID NO: 4465 - protein, 363 aa, Homo sapiens; identical to SEQ ID NO: 472

SEQ ID NO: 4466 - DNA, 3150 bp, Homo sapiens
ataagccaccaggtcgctccagtttggtgccagcgcctggagggagaggcgtggcgagggctgtgctgcctaggatccactgagtggctcttgctggcgtgtcagctgcgcgcgaaccagggctgggaggctcggctggaggtgtgaccagggcagggactgacctggcccggaacagaagcgcgcagagtcccatcctgccacgccacgaggagagaagaaggaaagatacagtgttaggaaagagacctccctcgcccctacgccccgcgcccctgcgcctcgcttcagcctcaggacagtcctgccgggacggtgagcgcattcagcaccctggacagcaccgcggttgcgctgcctccagggcggccccgggctgctcctgctccgcagagctacgccctccccccgggtgccccggaccctgcacttgccgccgctttcctcgcgctgctctggaccttgctagccggctctgcacctcccagaagccgtgggcgcgccgctcagctgctccatcgcctcactttcccaggctcgcgcccgaagcagagccatgagaaccccagggtgcctggcgagccgctagcgccatgggccccggcgaggcgctgctggcgggtctcctggtgatggtactggccgtggcgctgctatccaacgcactggtgctgctttgttgcgcctacagcgctgagctccgcactcgagcctcaggcgtcctcctggtgaatctgtctctgggccacctgctgctggcggcgctggacatgcccttcacgctgctcggtgtgatgcgcgggcggacaccgtcggcgcccggcgcatgccaagtcattggcttcctggacaccttcctggcgtccaacgcggcgctgagcgtggcggcgctgagcgcagaccagtggctggcagtgggcttcccactgcgctacgccggacgcctgcgaccgcgctatgccggcctgctgctgggctgtgcctggggacagtcgctggccttctcaggcgctgcacttggctgctcgtggcttggctacagcagcgccttcgcgtcctgttcgctgcgcctgccgcccgagcctgagcgtccgcgcttcgcagccttcaccgccacgctccatgccgtgggcttcgtgctgccgctggcggtgctctgcctcacctcgctccaggtgcaccgggtggcacgcagacactgccagcgcatggacaccgtcaccatgaaggcgctcgcgctgctcgccgacctgcaccccagtgtgcggcagcgctgcctcatccagcagaagcggcgccgccaccgcgccaccaggaagattggcattgctattgcgaccttcctcatctgctttgccccgtatgtcatgaccaggctggcggagctcgtgcccttcgtcaccgtgaacgcccagtggggcatcctcagcaagtgcctgacctacagcaaggcggtggccgacccgttcacgtactctctgctccgccggccgttccgccaagtcctggccggcatggtgcaccggctgctgaagagaaccccgcgcccagcatccacccatgacagctctctggatgtggccggcatggtgcaccagctgctgaagagaaccccgcgcccagcgtccacccacaacggctctgtggacacagagaatgattcctgcctgcagcagacacactgagggcctggcagggctcatcgcccccaccttctaagaagccctgtggaaagggcactggccctgccacagagatgccactggggacccccagacaccagtggcttgactttgagctaaggctgaagtacaggaggaggaggaggagagggccggatgtgggtgtggacagcagtagtggcggaggagagctcggcttgttctggggtcatggcgatgcttcgagacagtgggtagggaagtgccctgtgtggcatatggtactcgtgggcgtgctataagtgactgctgttcatgtgggtgaggtggtcactcttgctcagggtctgttgtgcagcccagatggacacctgtttctccaacctggttattagcattgttccgatttgttctcggcattgcccaggtttgggagataaatgccggggcggagtctggttgggggctcccagagttcacatctgatagtctgtggtcaggacctggcaggcacgggcagtccctgggacatgcccatctctggaagcctaggggtccccagctccaggcctgtccgctgtgactgcctgtgtgggcacgcagatggagcctgtctcctgccttcctttccatggtttgccaggggtttggcatcttgactgcggaagctgtggagtctgtgtgctcagagccttttctggtgaagatatcatcagagcatgtgacctctgtttcctccccctgaaggccaccgctgggcctctggatcttagacatgagacggtcaagagattgaagtagtagccagggcccaggtgtccagagagggtggcctgggatggggagggcccttgctccccaacagcagtgctgggggagccaagagaaggtggagcatccctgagtagtggtgtgcatcacccccagtttagtaatcacggggtgccattccccggtgggagcacccaccatcaatgtcattgaatgtccccatgggacagtgttgaggacttttgtgacatctgtcctatttcacagctcagggaaaggtgcaagcagaagcaggttgttccccatttaaagttctggagcccaggctgtgagctccttggctgagccctctcctgtccctgggagctccccaggtgcgaggagcctgccagccagtggggcctacactctgtgttattgcatctccgccaggctaaaagccttggtcactactttagaacggggactgcttgctgtcatgtttcgccttcctcggcagctccatggaatgttctggagcaggcatcttagggcattccctccgcacttctctgccagcccatgtggctcccacactgggctatcccttgccttaggcttgtggccttttttttttttttttttttaatttgaaaaatatttttcatgtgcacttaaacgtgttgtggaatgatgctgggtctcaagaatgctgtgaatcaataaacattttattcag

SEQ ID NO: 4467 - protein, 363 aa, Homo sapiens; identical to SEQ ID NO: 472

SEQ ID NO: 4468 - DNA, 915 bp, Homo sapiens
cctggctaatttttgtatttttttttgtagagatggcggtctcactttgttgcccaggctggtcttgaattcctgagcttaagtgatcctcccacctcagcctcccaaagtgctgggattacaggtgtgagccaccacacccagccaaaaccaggtgttatttgctgactcaccaatgcctcccccaaaaggataaatttaaaggtgtgtataacccatgaagtgtaattcaaataaaacaaattatcgtttggaataataacaactataggtatgtggtcaggaagcagttaaaaacattaaaatacagacctggccagttcaatccaacccaggggttccaagcaggaggtggggcaggtgggcgtcatgccccctgtgcttataagggagggcacgtgcacagcagaagcaggttgttccccatttaaagttctggagcccaggctgtgagctccttggctgagccctctcctgtccctgggagctccccaggtgcgaggagcctgccagccagtggggcctacactctgtgttattgcatctccgccaggctaaaagccttggtcactactttagagccactcaaggaaacgcgtgcaccctgccctgctggaaggcaccatggttagagggaggcacactgtttcttagagacggggactgcttgctgtcatgtttcgccttcctcggcagctccatggaatgttctggagcaggcatcttagggcattccctccgcacttctctgccagcccatgtggctcccacactgggctatcccttgccttaggcttgtggccttttttttttttttttttttaatttgaaaaatatttttcatgtgcacttaaacgtgttgtggaatgatgctgggtctcaagaatgctgtgaatcaataaacattttattcag

SEQ ID NO: 4469 - protein, 49 aa, Homo sapiens
MFRLPRQLHGMFWSRHLRAFPPHFSASPCGSHTGLSLALGLWPFFFFFF

SEQ ID NO: 4470 - DNA, 2277 bp, Homo sapiens
agcggcatcctctctctagcttctggcgctgcccactgtaacccgactccggcatttgcgtttggggcgccctccctgcgccgggggcgggagcccagcgagcgcagagccccggccccgcgcggcccgagtgccacatcactgcgctggccgtccaaggtccgccgccccaccatgccgcccccgctgccgctgctgctccttacagtcctggtcgtcgccgctgcccggccggggtgcgagtttgagcggaaccccgccggtgaatgccacaggccaccagctgcagacagcgccacctgcgtggacctgcagctcaggacctgcagtgatgccgcctacaaccacaccaccttccccaacctgcttcagcaccggtcatgggaggtggtggaggccagctccgagtacatcctgctgagcgttctacaccagctcctggaaggccagtgcaacccggacctgcggctgctgggctgtgctgtgctggccccccggtgtgagggcggctgggtgcgcagaccctgccggcacatctgcgagggcctgcgggaggtctgccagcccgccttcgacgccattgacatggcctggccctacttccttgactgccaccgctacttcacgagagaggacgagggctgctatgacccgctggagaagcttcggggaggcctggaggctgacgaggcactgccctcagggctgccgcccaccttcatccgcttcagccaccactcctacgcccagatggtgcgtgtgctgaggcggacggcctcccgctgcgcccacgtggccaggacctacagcatcgggcgcagcttcgacggcagggagctgctggtcatcgagttctccagccgccccggccagcacgagctgatggagcccgaggtgaagctcatcggcaacattcatggcaacgaggtggcgggccgggagatgctcatctacctagcccagtacctgtgctctgagtacctgcttggtaacccccgcatccagcgcctgctcaacaccacccgcatccacctgctgccctccatgaaccctgacggctatgaggtggcagctgccgagggtgccggctacaacgggtggacgagcgggaggcagaacgcgcagaacctggatctgaaccgaaatttcccggacctgacgtccgagtactaccggctggcggagacccgcggcgcacgcagcgaccacatccccatcccccagcactactggtggggtaaggtggccccggagacaaaggcaatcatgaagtggatgcagaccataccctttgtgctctcagccagccttcatgggggcgacctggtggtgtcctaccccttcgacttctccaagcacccccaggaggagaagatgttttctcccacgcccgacgagaagatgttcaagctgctgtccagagcctacgctgacgtccaccccatgatgatggacaggtcggagaataggtgtggaggcaatttcctgaagagggggagcatcatcaacggggcggactggtacagcttcacgggaggcatgtccgatttcaactacctgcacaccaactgctttgagatcacggtagagctgggctgtgtgaagttcccccccgaggaggccctgtacatactctggcagcacaacaaggagtcactcctgaatttcgtggagacggtgcaccggggcatcaaaggtgtggtgacagataaattcggcaagccagtcaaaaacgcccggatctcagtcaaaggcattcgccacgacatcaccacagccccagatggtgactactggagactgctgcccccaggtatccacattgtcattgcccaagcccctggctacgccaaagtcatcaagaaagtcatcatccccgcccggatgaagagggctggccgtgtggacttcattctgcaacctctggggatgggacccaagaactttattcatgggctgcggaggactgggccccacgacccactgggaggtgccagctctttgggggaggccacggagcccgacccgctccgggcgcgcaggcagccctcggccgacgggagtaagccctggtggtggtcctacttcacatcgctgagcacccacaggccacgctggctgctcaagtactagccccggccccagcacccgccaggatgtggagaccgaggcccatctccgcatcccgggctcctggctcttgattttgtctgccacagacatcccacaaagccgctgccattttattaaagtgttttgatccactttgcactggaa

SEQ ID NO: 4471 - protein, 652 aa, Homo sapiens
MPPPLPLLLLTVLVVAAARPGCEFERNPAGECHRPPAADSATCVDLQLRTCSDAAYNHTTFPNLLQHRSWEVVEASSEYILLSVLHQLLEGQCNPDLRLLGCAVLAPRCEGGWVRRPCRHICEGLREVCQPAFDAIDMAWPYFLDCHRYFTREDEGCYDPLEKLRGGLEADEALPSGLPPTFIRFSHHSYAQMVRVLRRTASRCAHVARTYSIGRSFDGRELLVIEFSSRPGQHELMEPEVKLIGNIHGNEVAGREMLIYLAQYLCSEYLLGNPRIQRLLNTTRIHLLPSMNPDGYEVAAAEGAGYNGWTSGRQNAQNLDLNRNFPDLTSEYYRLAETRGARSDHIPIPQHYWWGKVAPETKAIMKWMQTIPFVLSASLHGGDLVVSYPFDFSKHPQEEKMFSPTPDEKMFKLLSRAYADVHPMMMDRSENRCGGNFLKRGSIINGADWYSFTGGMSDFNYLHTNCFEITVELGCVKFPPEEALYILWQHNKESLLNFVETVHRGIKGVVTDKFGKPVKNARISVKGIRHDITTAPDGDYWRLLPPGIHIVIAQAPGYAKVIKKVIIPARMKRAGRVDFILQPLGMGPKNFIHGLRRTGPHDPLGGASSLGEATEPDPLRARRQPSADGSKPWWWSYFTSLSTHRPRWLLKY

SEQ ID NO: 4472 - DNA, 2196 bp, Homo sapiens
ccggcatttgcgtttggggcgccctccctgcgccgggggcgggagcccagcgagcgcagagccccggccccgcgcggcccgagtgccacatcactgcgctggccgtccaaggtccgccgccccaccatgccgcccccgctgccgctgctgctccttacagtcctggtcgtcgccgctgcccggccggggtgcgagtttgagcggaaccccgccgccacctgcgtggacctgcagctcaggacctgcagtgatgccgcctacaaccacaccaccttccccaacctgcttcagcaccggtcatgggaggtggtggaggccagctccgagtacatcctgctgagcgttctacaccagctcctggaaggccagtgcaacccggacctgcggctgctgggctgtgctgtgctggccccccggtgtgagggcggctgggtgcgcagaccctgccggcacatctgcgagggcctgcgggaggtctgccagcccgccttcgacgccattgacatggcctggccctacttccttgactgccaccgctacttcacgagagaggacgagggctgctatgacccgctggagaagcttcggggaggcctggaggctgacgaggcactgccctcagggctgccgcccaccttcatccgcttcagccaccactcctacgcccagatggtgcgtgtgctgaggcggacggcctcccgctgcgcccacgtggccaggacctacagcatcgggcgcagcttcgacggcagggagctgctggtcatcgagttctccagccgccccggccagcacgagctgatggagcccgaggtgaagctcatcggcaacattcatggcaacgaggtggcgggccgggagatgctcatctacctagcccagtacctgtgctctgagtacctgcttggtaacccccgcatccagcgcctgctcaacaccacccgcatccacctgctgccctccatgaaccctgacggctatgaggtggcagctgccgagggtgccggctacaacgggtggacgagcgggaggcagaacgcgcagaacctggatctgaaccgaaatttcccggacctgacgtccgagtactaccggctggcggagacccgcggcgcacgcagcgaccacatccccatcccccagcactactggtggggtaaggtggccccggagacaaaggcaatcatgaagtggatgcagaccataccctttgtgctctcagccagccttcatgggggcgacctggtggtgtcctaccccttcgacttctccaagcacccccaggaggagaagatgttttctcccacgcccgacgagaagatgttcaagctgctgtccagagcctacgctgacgtccaccccatgatgatggacaggtcggagaataggtgtggaggcaatttcctgaagagggggagcatcatcaacggggcggactggtacagcttcacgggaggcatgtccgatttcaactacctgcacaccaactgctttgagatcacggtagagctgggctgtgtgaagttcccccccgaggaggccctgtacatactctggcagcacaacaaggagtcactcctgaatttcgtggagacggtgcaccggggcatcaaaggtgtggtgacagataaattcggcaagccagtcaaaaacgcccggatctcagtcaaaggcattcgccacgacatcaccacagccccagatggtgactactggagactgctgcccccaggtatccacattgtcattgcccaagcccctggctacgccaaagtcatcaagaaagtcatcatccccgcccggatgaagagggctggccgtgtggacttcattctgcaacctctggggatgggacccaagaactttattcatgggctgcggaggactgggccccacgacccactgggaggtgccagctctttgggggaggccacggagcccgacccgctccgggcgcgcaggcagccctcggccgacgggagtaagccctggtggtggtcctacttcacatcgctgagcacccacaggccacgctggctgctcaagtactagccccggccccagcacccgccaggatgtggagaccgaggcccatctccgcatcccgggctcctggctcttgattttgtctgccacagacatcccacaaagccgctgccattttattaaagtgttttgatccactttgcactggaa

SEQ ID NO: 4473 - protein, 641 aa, Homo sapiens
MPPPLPLLLLTVLVVAAARPGCEFERNPAATCVDLQLRTCSDAAYNHTTFPNLLQHRSWEVVEASSEYILLSVLHQLLEGQCNPDLRLLGCAVLAPRCEGGWVRRPCRHICEGLREVCQPAFDAIDMAWPYFLDCHRYFTREDEGCYDPLEKLRGGLEADEALPSGLPPTFIRFSHHSYAQMVRVLRRTASRCAHVARTYSIGRSFDGRELLVIEFSSRPGQHELMEPEVKLIGNIHGNEVAGREMLIYLAQYLCSEYLLGNPRIQRLLNTTRIHLLPSMNPDGYEVAAAEGAGYNGWTSGRQNAQNLDLNRNFPDLTSEYYRLAETRGARSDHIPIPQHYWWGKVAPETKAIMKWMQTIPFVLSASLHGGDLVVSYPFDFSKHPQEEKMFSPTPDEKMFKLLSRAYADVHPMMMDRSENRCGGNFLKRGSIINGADWYSFTGGMSDFNYLHTNCFEITVELGCVKFPPEEALYILWQHNKESLLNFVETVHRGIKGVVTDKFGKPVKNARISVKGIRHDITTAPDGDYWRLLPPGIHIVIAQAPGYAKVIKKVIIPARMKRAGRVDFILQPLGMGPKNFIHGLRRTGPHDPLGGASSLGEATEPDPLRARRQPSADGSKPWWWSYFTSLSTHRPRWLLKY

SEQ ID NO: 4474 - DNA, 2492 bp, Homo sapiens
ccggcatttgcgtttggggcgccctccctgcgccgggggcgggagcccagcgagcgcagagccccggccccgcgcggcccgagtgccacatcactgcgctggccgtccaaggtccgccgccccaccatgccgcccccgctgccgctgctgctccttacagtcctggtcgtcgccgctgcccggccggggtgcgagtttgagcggaaccccgccggtgaatgccacaggccaccagctgcagacagcggtacagtaccgggacctccctggcttctgttctgtaggagggctgcagcccccacactgtcagagcactttaggcagctgaatccgtgatttcagaagctctgattcctgcacagtagctgttgtcctggtcctcccctgccagaccgtgggtgcccctccctgcaggccctggccctgcgtggggtcccctacgtaaatgtctgatgcgtgacggtcagggccactgcaggagggactgacctgccgaccctgcctccccagccacctgcgtggacctgcagctcaggacctgcagtgatgccgcctacaaccacaccaccttccccaacctgcttcagcaccggtcatgggaggtggtggaggccagctccgagtacatcctgctgagcgttctacaccagctcctggaaggccagtgcaacccggacctgcggctgctgggctgtgctgtgctggccccccggtgtgagggcggctgggtgcgcagaccctgccggcacatctgcgagggcctgcgggaggtctgccagcccgccttcgacgccattgacatggcctggccctacttccttgactgccaccgctacttcacgagagaggacgagggctgctatgacccgctggagaagcttcggggaggcctggaggctgacgaggcactgccctcagggctgccgcccaccttcatccgcttcagccaccactcctacgcccagatggtgcgtgtgctgaggcggacggcctcccgctgcgcccacgtggccaggacctacagcatcgggcgcagcttcgacggcagggagctgctggtcatcgagttctccagccgccccggccagcacgagctgatggagcccgaggtgaagctcatcggcaacattcatggcaacgaggtggcgggccgggagatgctcatctacctagcccagtacctgtgctctgagtacctgcttggtaacccccgcatccagcgcctgctcaacaccacccgcatccacctgctgccctccatgaaccctgacggctatgaggtggcagctgccgagggtgccggctacaacgggtggacgagcgggaggcagaacgcgcagaacctggatctgaaccgaaatttcccggacctgacgtccgagtactaccggctggcggagacccgcggcgcacgcagcgaccacatccccatcccccagcactactggtggggtaaggtggccccggagacaaaggcaatcatgaagtggatgcagaccataccctttgtgctctcagccagccttcatgggggcgacctggtggtgtcctaccccttcgacttctccaagcacccccaggaggagaagatgttttctcccacgcccgacgagaagatgttcaagctgctgtccagagcctacgctgacgtccaccccatgatgatggacaggtcggagaataggtgtggaggcaatttcctgaagagggggagcatcatcaacggggcggactggtacagcttcacgggaggcatgtccgatttcaactacctgcacaccaactgctttgagatcacggtagagctgggctgtgtgaagttcccccccgaggaggccctgtacatactctggcagcacaacaaggagtcactcctgaatttcgtggagacggtgcaccggggcatcaaaggtgtggtgacagataaattcggcaagccagtcaaaaacgcccggatctcagtcaaaggcattcgccacgacatcaccacagccccagatggtgactactggagactgctgcccccaggtatccacattgtcattgcccaagcccctggctacgccaaagtcatcaagaaagtcatcatccccgcccggatgaagagggctggccgtgtggacttcattctgcaacctctggggatgggacccaagaactttattcatgggctgcggaggactgggccccacgacccactgggaggtgccagctctttgggggaggccacggagcccgacccgctccgggcgcgcaggcagccctcggccgacgggagtaagccctggtggtggtcctacttcacatcgctgagcacccacaggccacgctggctgctcaagtactagccccggccccagcacccgccaggatgtggagaccgaggcccatctccgcatcccgggctcctggctcttgattttgtctgccacagacatcccacaaagccgctgccattttattaaagtgttttgatccactttgcactggaa

SEQ ID NO: 4475 - protein, 515 aa, Homo sapiens
MAWPYFLDCHRYFTREDEGCYDPLEKLRGGLEADEALPSGLPPTFIRFSHHSYAQMVRVLRRTASRCAHVARTYSIGRSFDGRELLVIEFSSRPGQHELMEPEVKLIGNIHGNEVAGREMLIYLAQYLCSEYLLGNPRIQRLLNTTRIHLLPSMNPDGYEVAAAEGAGYNGWTSGRQNAQNLDLNRNFPDLTSEYYRLAETRGARSDHIPIPQHYWWGKVAPETKAIMKWMQTIPFVLSASLHGGDLVVSYPFDFSKHPQEEKMFSPTPDEKMFKLLSRAYADVHPMMMDRSENRCGGNFLKRGSIINGADWYSFTGGMSDFNYLHTNCFEITVELGCVKFPPEEALYILWQHNKESLLNFVETVHRGIKGVVTDKFGKPVKNARISVKGIRHDITTAPDGDYWRLLPPGIHIVIAQAPGYAKVIKKVIIPARMKRAGRVDFILQPLGMGPKNFIHGLRRTGPHDPLGGASSLGEATEPDPLRARRQPSADGSKPWWWSYFTSLSTHRPRWLLKY

SEQ ID NO: 4476 - DNA, 837 bp, Homo sapiens
atgccgcccccgctgccgctgctgctccttacagtcctggtcgtcgccgctgcccggccggggtgcgagtttgagcggaaccccgccggtgaatgccacaggccaccagctgcagacagcggtacagtaccgggacctccctggcttctgttctgtaggagggctgcagcccccacactgtcagagcactttaggcagctgaatccgtgatttcagaagtgggtaatggataacacagcccattaatcaaactagaaccccctcgtaaacagccagagaaaaattagacataacaaaaaaagaccagctaggaaaaggtgcaccagcttcccaccgggctatgcccaccccagcccctgcagagatgtcctctccatccctctccagtccccactgcagtcacacgtcctgcatttgggccttgtccacatgcatttcatggtcactggctctgtgccgggcccctgctgagtctggggtttgggtgagtcacctcccccgccaggccccgatttcctccttgtgacaggaggagtgctgaacgaatcttgtgagatggtttcaaaagtgacgtgggagccaaccaatgtgaagtgctcaggtcagggctgaggacagggctttttccctgaaaggggcaaacatttcattgtcgcctcctgacggatttgggcatctggtgtattctaagtggaggctttcaaaatatcagaaaaaaaattctgggtaccaagtcaatgacatatgtaaaatgtctattttattttattttttatttatttatttttatttttagagatggaggtcttgctgtgttacccaggctggtctcaaact

SEQ ID NO: 4477 - protein, 69 aa, Homo sapiens
MPPPLPLLLLTVLVVAAARPGCEFERNPAGECHRPPAADSGTVPGPPWLLFCRRAAAPTLSEHFRQLNP

SEQ ID NO: 4478 - DNA, 3720 bp, Homo sapiens
cgattgctcatcgctgggcctggaagatcacacagagggtttggcttggagtgactcctccaagcagggtctgcaccgccctgtgggctcaaggagggagaggagctgtggagaaatgctttgatgtctcttgcagatgaaacagtggagggggagtgggcaagactgggccaccatgggccacttgtctctgaggtgtgcaaagaggtgccagagggccacttggcagcggggctggttgggggccctgcatggagtcccctgtgtctgttgtctcacgagtcggtgtccaccagagaccctgcatgatccgcagcagtcctggcccgttagacctttctgtgtaaaagaaatgttctattgtgttctgtccaagacagttaccactggccgcatgtggcccccaaggcttgggatgtggctcttgccactgaggcctggatgtgggcgtttcatcgcatttgaatgagtctgaacctgtctttgaagagcctagggccagtgtgtgccacattcaactgtgcagggcagtgtccgctcatggttgggttcagaggatctgactgcgggtgccacacatgtgctagctcacgcgagtctcacgacagccttgctccatggaagaggaagtggagcctcgggaagggtgacagcagtggggtctttagctggagtggcccaagcccattgcggatggagggatggatttggccatttgtcaaacagctaccgagcacccactgtacatgtggctttgtgctgggacattgaggagggcaggagaaggaaggcagacaaacacccgggccgggctccagcaagccctgggttccgggctatgtcaggtgctcagggctgaacctggcatgtcttgcagcctctggctcccaatctgagaagggtggaccctgggctcccatgcgatgcagcggtagggggggtgccctttgccagcaggtgggagccgtctgtctgcagagctcagtccctgtagaggtggtggagctgcctgtgggaggccagggaggcgaggaaggaagccaagcccacagccctgggaaagcccaaggagtcggttggagattattttgggcatctctaccaccaaattgccggcttcctctgctagtctttcccctggagaaccgttttgagcagaagcaaaaccacagggcaaggagaagcttagaggagcacattaactctctgtggacccaggaacagcctgcgggcacctgcgtcctgctcctgtgggcctgactgctgcaaagcccctggcggggtggagggagctaagcgtcatcggggtggccctcagggcacctctgttctagtggatgacaggatggtggggaagctggtgcgtatgtggtgtagagacgttcgtattctagttccagaacccctccctcttccccagcccccttttttcttcctcccccaagtacttcccagagcccccctttctgtttccttcctggacaggcactcactgttgtaccgatgaggttgtaacagaaacactgggaagcctcacagcagccggagggggcaccacaaggagccttcctgtttccaccattagccaagcaaatgaagcagaatactgaactgcctgagtgccactgtcatggaaaacacgcccaggaaaatcccctctgcacacccagcaggggtttgccttggggggtccaggaccccatatatctgtcttcctttctgttgtcctgctccgtattttaggagcttcccacagtggccccatagtatgtttactcacagtcacgttaggaaccatggcgctgtgctgtgtacatacctcaggtgccgtttggcttagatatcgttgtaggcactgcagagggaactctaattaaagatagagatgtccaagcatggctgtcgtgcagaggggactaagggtgctgtgtgtggtcagcgttcccaggcagtggtaggaagcctgggggcctgacactgactgagcccccccactgctcccccaggaggcctggaggctgacgaggcactgccctcagggctgccgcccaccttcatccgcttcagccaccactcctacgcccagatggtgcgtgtgctgaggcggacggcctcccgctgcgcccacgtggccaggacctacagcatcgggcgcagcttcgacggcagggagctgctggtcatcgagttctccagccgccccggccagcacgagctgatggagcccgaggtgaagctcatcggcaacattcatggcaacgaggtggcgggccgggagatgctcatctacctagcccagtacctgtgctctgagtacctgcttggtaacccccgcatccagcgcctgctcaacaccacccgcatccacctgctgccctccatgaaccctgacggctatgaggtggcagctgccgagggtgccggctacaacgggtggacgagcgggaggcagaacgcgcagaacctggatctgaaccgaaatttcccggacctgacgtccgagtactaccggctggcggagacccgcggcgcacgcagcgaccacatccccatcccccagcactactggtggggtaaggtggccccggagacaaaggcaatcatgaagtggatgcagaccataccctttgtgctctcagccagccttcatgggggcgacctggtggtgtcctaccccttcgacttctccaagcacccccaggaggagaagatgttttctcccacgcccgacgagaagagggagccccctcctcagcacagacctgtcctgcttggtggggccctgatgagctcatgcagggtgagcccttcgcctgcctgacccaccaggagcctctgcccaagatgttcaagctgctgtccagagcctacgctgacgtccaccccatgatgatggacaggtcggagaataggtgtggaggcaatttcctgaagagggggagcatcatcaacggggcggactggtacagcttcacgggaggcatgtccgatttcaactacctgcacaccaactgctttgagatcacggtagagctgggctgtgtgaagttcccccccgaggaggccctgtacatactctggcagcacaacaaggagtcactcctgaatttcgtggagacggtgcaccggggcatcaaaggtgtggtgacagataaattcggcaagccagtcaaaaacgcccggatctcagtcaaaggcattcgccacgacatcaccacagccccagatggtgactactggagactgctgcccccaggtatccacattgtcattgcccaagcccctggctacgccaaagtcatcaagaaagtcatcatccccgcccggatgaagagggctggccgtgtggacttcattctgcaacctctggggatgggacccaagaactttattcatgggctgcggaggactgggccccacgacccactgggaggtgccagctctttgggggaggccacggagcccgacccgctccgggcgcgcaggcagccctcggccgacgggagtaagccctggtggtggtcctacttcacatcgctgagcacccacaggccacgctggctgctcaagtactagccccggccccagcacccgccaggatgtggagaccgaggcccatctccgcatcccgggctcctggctcttgattttgtctgccacagacatcccacaaagccgctgccattttattaaagtgttttgatccactttgcactggaa

SEQ ID NO: 4479 - protein, 260 aa, Homo sapiens
MQGEPFACLTHQEPLPKMFKLLSRAYADVHPMMMDRSENRCGGNFLKRGSIINGADWYSFTGGMSDFNYLHTNCFEITVELGCVKFPPEEALYILWQHNKESLLNFVETVHRGIKGVVTDKFGKPVKNARISVKGIRHDITTAPDGDYWRLLPPGIHIVIAQAPGYAKVIKKVIIPARMKRAGRVDFILQPLGMGPKNFIHGLRRTGPHDPLGGASSLGEATEPDPLRARRQPSADGSKPWWWSYFTSLSTHRPRWLLKY

SEQ ID NO: 4480 - DNA, 937 bp, Homo sapiens
ggcagggaaggaatgccgatcaggcagaagagtggcaggaaagggttctctgctcaatgcccatagagatggagtcagccaggcctcgggtgagatgcagggtcattcaaaagcccagaacgtgctcgggtcaattgccagggaggaaactgaggcccagagaggggagtgactgactcgttaaagatggcagagcgagggctggcagagtggggctctgtggggtagttccccctagataccaagctctgaggagcatgtggggaacgagctgacggcctccacgctcagcaggagagctcacgccatctccctggcctccccttggtctcttcaggtgcaccggggcatcaaaggtgtggtgacagataaattcggcaagccagtcaaaaacgcccggatctcagtcaaaggcattcgccacgacatcaccacagccccagatggtgactactggagactgctgcccccaggtatccacattgtcattgcccaagcccctggctacgccaaagtcatcaagaaagtcatcatccccgcccggatgaagagggctggccgtgtggacttcattctgcaacctctggggatgggacccaagaactttattcatgggctgcggaggactgggccccacgacccactgggaggtgccagctctttgggggaggccacggagcccgacccgctccgggcgcgcaggcagccctcggccgacgggagtaagccctggtggtggtcctacttcacatcgctgagcacccacaggccacgctggctgctcaagtactagccccggccccagcacccgccaggatgtggagaccgaggcccatctccgcatcccgggctcctggctcttgattttgtctgccacagacatcccacaaagccgctgccattttattaaagtgttttgatccactttgcactggaa

SEQ ID NO: 4481 - protein, 82 aa, Homo sapiens
MKRAGRVDFILQPLGMGPKNFIHGLRRTGPHDPLGGASSLGEATEPDPLRARRQPSADGSKPWWWSYFTSLSTHRPRWLLKY

SEQ ID NO: 4482 - DNA, 1624 bp, Homo sapiens
acctcggttccgccctgggtggggagaagccctgctgcaccactcgggcttcccagagcggggctggcccgcgggggaaactgaggcccgggaccccgaccggcgcctgcactgcgctggtaggagtgctgtcaccgacgtcgtagagccgccgagggtgtttctgtagggtaaacatgaagcctcggctatattccaggcattttcacttggaaacattttacataaagtatttgaaggtctagataaagaataacagagtgatccatactacatgatgaggagctgtccaaacaccatgcagatgctcctaggattcttaaactagccaaaaataattccaggcattgtcagatataggataagtacatgaagacagcattagtcgcagtagcgaagacacggaaacaacctaagtgttcaccaacagatgaatggatgaagcaaatgtagcatatatacacagtggaatactattcagcctttaaaaagaaggaaatctggctaactgcaacaacatggatgaacctggaggatattatataagtgaaataagccaggcatggaaagtttttgtagagatgaagtcttgctgtgttgcccaggctggtctccaactcctgtactcaagctagcttcctgctttggcctcccaaactgctggaattaagttgtctgccctattgctcaacaagataaaatgtctgggctggtggctggaggctggaggaagaatctggaaagagagagagactgtggaaaaggcatagaaagacctttgaactagcagaacatatttctttgagggacttaggaacttcattctgggcaatcttcccaaaaggtacacagctctggacgtaccaacactctatttaaaaaccagtaaggtagagtggaaggcagagctgagtgaaactgaaacctggtatttgctggaggtttctttctggaaagctgacagcacacctctgaccctctccaaaaggtctgatatgaaatattgcgacaaagttggaatcaactggcaggcatttcagtagatgtgctaatagcatgcaacaatgggaaggcgccaaaactgaactgaggtggtgaaatgaggtagagataagcaagtaccgcaaaaaaggaggcaagagaaatggcaaaactggggtggttcaaagaaggaaacagggtttgatgccaatggttattgtctggcttattcgagtagtttttaaagggagaggaagggagaggtgtgtcgctacctgctggtactgtggtgtgcctttattgcgtttggacatccaagcagacctatttatttgttccctaagcaaatatttattgaatatgtattatgtcctaggcactgtgtatcagaaataactgcatatatgagccttggagggtgattgtggttgatatgcattgacatgggtgaaagggaagagacatattttcaactttgtatttttcaacacatccagctgcgtgctttcagcccagcaggtgctcaaaataggtttactgaggtgaaaaccaattcttgcctctaaagggtgttccatggtctcacaggaattaggaaggagtgaggagcatctttagtaaataaacaatgtgctcatagcat

SEQ ID NO: 4483 - protein, 38 aa, Homo sapiens
MDEPGGYYISEISQAWKVFVEMKSCCVAQAGLQLLYSS

SEQ ID NO: 4484 - DNA, 842 bp, Homo sapiens
aatctaatcacaagagcagaatccaccatattcatgacactgcaccaggaactggaggacaaggtagccaatttcttgccattctattaagggaggaagattttaaacaaataactacaacaaaatgtacagagtggcatgatcaaaggagtacaaggagctatcagagatgactaggagttggccagatgaagaaagtgtagagggaagtgtcttgaaacctttcccctgaacaaacctgaaaggaaccctgcctccatcttcagctctggaggttcatgcaagtggtttggagctaattcatccaaaactggcatagcgattcaggaatccaggtctaagacagttagcacttgctaggcccctggactccattcatgaatcgatcaagctcaggccagagacacaagagggagaaattcttagggttctaagtcagacatttcctataactgaaaaacaaaccactggatgtcagagggaagtaaatacactgagtaagggtcaatcaaaaaactatggagaaactgagttatagtcttcaggttaataaatcctcaagtctagctggtttctaggtttcttttttcctgagccaaatgtatttccttattatttaagatagtctgaatttttgttgctttgttattgttgttctcacttaaacaaaccacctctgatatgttttgttccttctcttgccatgagacacactggctccttttcacattttgctatgattgtaagcttcctgaggctgccaaccagaagctaagcagatgctgttactttgcttgtgaagtctgcagaatgatgagacaaataaacctcttttctttctg

SEQ ID NO: 4485 - protein, 52 aa, Homo sapiens
MFCSFSCHETHWLLFTFCYDCKLPEAANQKLSRCCYFACEVCRMMRQINLFS

SEQ ID NO: 4486 - DNA, 1962 bp, Homo sapiens
aaatgctaatgtcttccaaatccatctctttagcctcatggtcaaaatcatatttccaactgcctgtttaacagtttgacctgggtgtccttcagccacatcaattcaatgtgtctatacctgcattcaacatcttccccaaaatctgcttctcctattttgcttcttgtcttggctgacgtcatcatcacacaaccagtttctcaagctgaaacatgagtcatcctcttccttcatctctctcaccctccaaaaacaattgtcaaccatgctctgtcaattatactgcagaaacgttactcaaatgtaattccttcatgtatctccgcattcccttgcctttcacattcctggaacacaagtgcccaataagtatttgttgattagtaattgcccaatgaatgctgtaagaagaaaagatgaagaaaaggagaaaacaaggtaaggaaaggaaggagggagatggaaggaaggaaagaggtagatgtttccaaagcatgctttacaaagacatgagccattttgtggataactgtagcattgttaccttatgtttactggagaaaaaataaaatgaataatcataataacaatgacaaaaaagttattttccttcccaatattttttccttgacaataccaaactaaaagtttcactctggttattacgatctctattctggttattatgccatacaaagatgaactcattgacaaagaaaaatatcaagaatcttcccctgatgacaaagtgtagccccgaaacataatagaaggtctgtgttaccctttgtggcatccaggggatttatcatcccactccaatacccccacctaggagagaacctgtcagcctctccagtaatttctgccacgatgctcactgggcccttacgtagactgactgacttctctattgctacttatcttgtatctttaaggccatgtgaactcgattgaattacaagtctttgtaggcagttgctatgccttatatgttctttaattttcctagttcttattgattgatttatgtattcagaaactctctgttgagtgcctgctctgtaccagacactgtgcaaggcactatgggtataactgtgaaaagaacagaaaatatatccattattctgtacatcctcacagaggctgtaaataaatactgttgacattagttatgataattcccaaccctaattatctgggcagagtcataaacagtgagactgtaggctgaaactgacctactaaattggaatcctacttgctgcaatatgaccttgccgggctggtcatcggtggagccttgtgatctatacagaatattgagcattagtcgcagtagcgaagacacggaaacaacctaagtgttcaccaacagatgaatggatgaagcaaatgtagcatatatacacagtggaatactattcagcctttaaaaagaaggaaatctggctaactgcaacaacatggatgaacctggaggatattatataagtgaaataagccaggcatggaaagttgtctgccctattgctcaacaagataaaatgtctgggctggtggctggaggctggaggaagaatctggaaagagagagagactgtggaaaaggcatagaaagacctttgaactagcagaacatatttctttgagggacttaggaacttcattctgcaaatctgtttccaatgcctgttaagtacaaaacaccgtgtggacatgttcctattctcaagacgtttgctatacagtaggaaggagaggagggcctgctctctgccaaacactgtcctaggagttttgcacaatccattgagtattctctatatttttaacagccctgagagagtctggatccattgcagccattttgaaattaacaaataataagggaaggccaacaaggacagatgtataaaagtataatgaatcataacaagagcttcatcctcctgg

SEQ ID NO: 4487 - protein, 55 aa, Homo sapiens
MFLFSRRLLYSRKERRACSLPNTVLGVLHNPLSILYIFNSPERVWIHCSHFEINK

SEQ ID NO: 4488 - DNA, 526 bp, Homo sapiens
atgcagacgcagccgagggcgcgctcgcgctcccgggagggcgggagcgagcggcgtgtcccgttgggtctctccgctcccggggaaatggacaggcgctggtaggagtgctgtcaccgacgtcgtagagccgccgagggtgtttctgtagggtaaacatgaagcctcggctatattccaggcattttcacttggaaacattttacataaagtatttgaaggtctagataaagaataacagagtgatccatactacatgatgaggtattgtgcaggaaaaaaaactacttctgcaactaaggaatgtaaagtcttaacaacggatgatttttttccaagtacagttgtatttgattggaatcatttgcagatccaacaacaaatcttgaaatagggggaaaatacaggagctgtccaaacaccatgcagatgctcctaggattcttaaactagccaaaaataattccaggcattgtcagatataggataagtacatgaagacagagtcataaacagtgagactgta

SEQ ID NO: 4489 - protein, 45 aa, Homo sapiens
MMRYCAGKKTTSATKECKVLTTDDFFPSTVVFDWNHLQIQQQILK

SEQ ID NO: 4490 - DNA, 565 bp, Homo sapiens
gttcctgggcaacggcccctccttggcgcgggatccgcgcagagtctgcctgggtcgcacgcgtctccgcccctcgcggcgctggtaggagtgctgtcaccgacgtcgtagagccgccgagggtgtttctgtagggtaaacatgaagcctcggctatattccaggcattttcacttggaaacattttacataaagtatttgaaggtctagataaagaataacagagtgatccatactacatgatgaggagctgtccaaacaccatgcagatgctcctaggattcttaaactagccaaaaataattccaggcattgtcagatataggataagtacatgaagacaggtaagtcatcccaagactataacgctggggaatagataaccctggagtacaagggggaaaacttctgtctcaggagactagagttgggactccaggaacacaggggttcattacaggagcttgaacaaagagaggagtcaagaccccatctcatagaaatggaaccagttcaggaggcactgcagttaaggtcaactggatgccttacttccatgctgctg

SEQ ID NO: 4491 - protein, 43 aa, Homo sapiens
SWATAPPWRGIRAESAWVARVSAPRGAGRSAVTDVVEPPRVFL

SEQ ID NO: 4492 - DNA, 423 bp, Homo sapiens
ctcggctatattccaggcattttcacttgggtattgtgcaggaaaaaaaactacttctgcaactaaggaatgtaaagtcttaacaacggatgatttttttccaagtacagttgtatttgattggaatcatttgcagatccaacaacaaatcttgaaatagggggaaaatacaggagctgtccaaacaccatgcagatgctcctaggattcttaaactagccaaaaataattccaggcattgtcagatataggataagtacatgaagacaggtaagtcatcccaagactataacgctggggaatagataaccctggagtacaagggggaaaacttctgtctcaggagactagagttgggactccaggaacacaggggttcattacaggagcttgaacaaagagaggagtcaagaccccatctca

SEQ ID NO: 4493 - protein, 52 aa, Homo sapiens
SAIFQAFSLGYCAGKKTTSATKECKVLTTDDFFPSTVVFDWNHLQIQQQILK

SEQ ID NO: 4494 - DNA, 553 bp, Homo sapiens
gacacgggcgagaagctagggaagaaggccgggttcatggacgacggcagcccggggcgctggtaggagtgctgtcaccgacgtcgtagagccgccgagggtgtttctgtagggtaaacatgaagcctcggctatattccaggcattttcacttggaaacattttacataaagtatttgaaggtctagataaagaataacagagtgatccatactacatgatgaggtattgtgcaggaaaaaaaactacttctgcaactaaggaatgtaaagtcttaacaacggatgatttttttccaagtacagttgtatttgattggaatcatttgcagatccaacaacaaatcttgaaatagggggaaaatacaggagctgtccaaacaccatgcagatgctcctaggattcttaaactagccaaaaataattccaggcattgtcagatataggataagtacatgaagacaggtaagtcatcccaagactataacgctggggaatagataaccctggagtacaagggggaaaacttctgtctcaggagactagagttggg

SEQ ID NO: 4495 - protein, 45 aa, Homo sapiens; identical to SEQ ID NO: 4489

SEQ ID NO: 4496 - DNA, 734 bp, Homo sapiens
attactatgcagacgcagccgagggcgcgctcgcgctcccgggagggcgggagcgagcggcgtgtcccgttgggtctctccgctcccggggaaatggacaggccggttggggtgggggtcggctggcaaacagtggtcgggagcattgggcgggcgcgcgcacgagggcaagcacgcgcgggagggagggacggttcctgggcaacggcccctccttggcgcgggatccgcgcagagtctgcctgggtcgcacgcgtctccgcccctcgcggtgcctcctccttcctgtcacctcggttccgccctgggtggggagaagccctgctgcaccactcgggcttcccagagcggggctggcccgcgggggaaactgaggcccgggaccccgaccggcgcctgcactgtgcgacccgcgtagaaataggcgcccgaggggcccccagcgcaacgcgggagcccggcccagcccgggggtcctgtggtgaactagcgtctgggctctgccggcttgaagtccgctgagcgcctcgccgcgcacctctagaccccgagtccccgatctagggcctccttgtagccctaggtagcgccctctaagcttgtttctgtttttaggcgctggtaggagtgctgtcaccgacgtcgtagagccgccgagggtgtttctgtaggaaacattttacataaagtatttgaaggtctagataaagaataacagagtgatccatactaca

SEQ ID NO: 4497 - protein, 171 aa, Homo sapiens [sequence omitted]

SEQ ID NO: 4498 - DNA, 999 bp, Homo sapiens
atgagggatttcgggtttggggtgctgcagaccgccccgctccgaagtagcagtcctgggcccctgttctgcggcgaggcgtatggtccttacgccgtggggtccgtcaacccgctgccctccgccacgcccttcggcccactgtcgccaccaccgttgcctgtcaccggcttcttagaggccgcctcccccttctccgtccccctcggcggcggcgcgggcagcccggccgccgccgcttcctcttcctccccgttcctggcgcatcagcagaccatgcaggatgagctgcttctggggctgacacagcagccggcgcggccgctttcgggggcggcggccacggagaaactccccgaccaccaccccggcggcggcacgatcgcgggtgacttcgccccgcggcagcgtccggcagacctgcccccgctcccgcagctccctccctcgccgcctgcagccccgcggcgccgccacggaggcgcgggcagccctcgcaagaccccagccgcgggcgagggcagcgccgccgagtcccccaatgcgggcttggcctcctcgacgccggtgaaccccgcgccgggctccatggagtcccccaaccaccctctgctcaacagtcccagtaacctcctgcccggagggccgccgccccggacccccgacgcggggaggcgcggcgaggaccgggggctggccgggggcctcggaagagcggccgtgggaagtgaacttgggcaggggaaaaatgattgctggagaagcctcagcccctcgggcggtcagtcgagccgctcccaaagctccgcccgatcaacctgctggcagcgccgcaccctgggccgccggcccaggagggagtcgggagggagcggccgaccgccctcctcgcaggacctggttcccgcggggccgcctccttggctgtcacaggactgggaaagagaaactgttagtgaccgctcgggttcaaaccgagatatcccacgaatgtcttag

SEQ ID NO: 4499 - protein, 332 aa, Homo sapiens
MRDFGFGVLQTAPLRSSSPGPLFCGEAYGPYAVGSVNPLPSATPFGPLSPPPLPVTGFLEAASPFSVPLGGGAGSPAAAASSSSPFLAHQQTMQDELLLGLTQQPARPLSGAAATEKLPDHHPGGGTIAGDFAPRQRPADLPPLPQLPPSPPAAPRRRHGGAGSPRKTPAAGEGSAAESPNAGLASSTPVNPAPGSMESPNHPLLNSPSNLLPGGPPPRTPDAGRRGEDRGLAGGLGRAAVGSELGQGKNDCWRSLSPSGGQSSRSQSSARSTCWQRRTLGRRPRRESGGSGRPPSSQDLVPAGPPPWLSQDWERETVSDRSGSNRDIPRMS

SEQ ID NO: 4500 - DNA, 5744 bp, Homo sapiens
cgcgtcgccgccgccgctgcccggcttcggcaccccctggtcggtgcagaccgcgtcgccgccaccccagccccagcagccgccgccgacccagccgcagcagcagccgccgccaccccagcagccgccccagccgcagccgcagccgcccggctcgtctgccaccaccccgggcggcggcagcggcggctcgctcagcgccatgccgccgcccagccccgactcagagaacggcttctaccccgggctgccgtcgtccatgaacccggccttcttccctagcttctcgcccgtgtcgccgcacggctgcactgggctcagcgttccgacgagcggcggcggcggcggcggcttcggcggccccttctcggctaccgctgtgccccctccgccgccgcccgccatgaatatacctcaacagcagcccccgccgcccgcggcgccgcagcagccgcagagccggaggtcgcccgtcagcccgcagctccagcagcagcaccaggcggcggccgccgccttcctgcagcagaggaactcctataaccaccaccagcctcttctgaaacagtctccctggagcaaccatcagagcagtggctggggcactggaagtatgtcctggggagcaatgcatggcagagatcatcgtagaaccggaaacatgggaatcccaggaactatgaatcagatatctccattgaagaaaccgttttctggtaatgtcatagcaccaccgaaatttactcgctcaactccatcactgactccaaaatcttggattgaagataatgtgttcagaacagacaacaatagtaatacactcttacccttacaggtgagatctagtttgcagttgccagcttggggctcagattcactccaagatagttggtgcactgcagccggaacatccagaatagaccaggatcgaagtagaatgtatgacagtttgaatatgcactctttggaaaattcccttatcgatattatgagagcagagcatgatcctcttaagggtcgattgagctatccacatccaggaactgacaatctgttgatgttaaatggtcgttcttccctctttccaatagatgatggcttgcttgatgatggtcacagtgatcaagttggagttttaaattcacccacctgttattcagctcaccaaaatggagagcgaatagaacgcttctctcgaaaagtttttgttggtggtcttcctccagatattgatgaagatgaaataactgctagcttcagaagatttgggcctttggtagtagattggcctcataaagcagaaagcaagtcctattttccaccaaaaggctatgcatttcttctctttcaagaagagagctcagttcaggcactcattgatgcttgtattgaagaagatggaaaactctatctgtgtgtttctagccctactatcaaggacaaaccagttcaaatacgtccttggaatttaagtgatagtgattttgtaatggatggttctcagcctttggatccccgaaaaacaatttttgttggaggtgttcctaggccattaagggctgtggaacttgctatgatcatggaccggctgtatggtggagtttgttatgcaggaattgatacagatcctgagctaaaatacccaaaaggtgctgggcgagttgctttctccaatcagcagagctatattgctgccattagtgctcggtttgttcagcttcagcatggtgatattgataaacgtgtggaggtaaagccatatgtgctagatgaccagatgtgtgatgaatgccagggcgcacgctgtggtggaaaatttgctccctttttttgtgccaatgtcacttgcctgcagtattactgtgagttttgttgggcaaatatccactctcgtgctggacgtgagttccataagccattggtaaaggaaggtgctgatcgcccacgtcagatccacttccgctggaactaagaatagcaaactggcctctgtttaacaaggaaagaaagggtgcatgtggcttactgtgtctgaagatactgacatgcagaagaaataagtgcattcttctgcttttcaccccagctatcaatacatgcatctttatcagcagccaaaacactacaagcctcttgtttttcaccaaaaccctacatctcaggcttactaatttttgtgatattttcatgttcaaataaaatgtttttttgtattttctccaagttatttttatatgtaaagttaaaattagatatgagaatgttttgcgtaggggcaacacagtctgctgctatatagtgggggaagcgtgcacttatttctaaacatgggtttttaacttcaagatctgccccagtaatttaccaaaggtagcaaaataatagtgaagatggaatatgtctgctacaaatgcttatttttattgttgctattttcagtgtatacataaactaaaaattagggttgatttttttgctctccattttgacttgcaagaaataatacctcaagataatctgatttattagctatttttaaacatttttaatcacaagctgtattagctttgctgctatataggtgttatgtgtaaatgccacctattaatacgggactgaaaacgttagagacacactgcattgcagataaaatgcaggcagcacaatatggcctaaactgccatagttttagaatgtgaaaaaaatgcatgtttacttacctgtatacaccatatgcatgcactagaattattaactaacgaggtgaggtattgcaaatgttcaaaaaagctctcttgaatctaggtagcatgaacaaattataaaatttgtttaaaaaagcaaacttgcatgcattattgtgacttcaagtttaaaaaatcgtcttacatgtgtacaatatgcaaattagttttagattagagagtgcagccattttgtgatctggtcagtagtggaattcgattttatgcagactggatgtaatatttgtaatccctgtgcaattttgtgacgtgcggttctaattcatgtgcagtgatatagtatagataaaagaatgagtaaaagaaaatacaagaattctaaagaaagttggttttagcccctttgatagtccatggttaagacatcctttataaaccaaagatggccagcacactgctaaccagtcaccaaatgtaagacccataagaaacccatatttaaaaatctgaattttttagaagaatgcaaaactttagtaaaccctaagtaaagtcaaaatggagaaggggaaatatacagatggctagttgcataaaattaaattttacctttataagacaatggtgaaatctggcttgaacttgcttatgtgtttaacctataaatattggggtcttctgtctaaactggggtcactgttgcatggaacattgttcttaatagttgagaattgcttttttgaaaattttcatgaaggaattttggtaatgactttgcttgcaggttttttggggtgttttgagaaagtggcatggaaacatgcagtagttaatgagtttctcttggtactgaacactattagaatatcattagtgatattttttctctttagagcatttttaatgcaactagcccctatattttaatgtaagagttactctgcaatctaagcaaagcacccaacaatggtaaatgttttttaaaaatgcagaactaagatttttgactctaaagagagaaaattacaagggtgttgccttatagcaaacccttgggacaatccttcatgtgagcaaagtgttgatcttaatattggttgtctgtggtgtgcttttttgtactgtaaaaatatgtggttcatgtctaactctgctgttttattgtggttgtggttcaagtttttaatgtttaaagttgatgctgttttcagaagagctttttactaatttatttgtcagtgttccctatttgttacttaaccatgatcctccagattttttggagtattcttttctaaccttaaccctgccaaaccttgatccattttgacatttgttatgcactatttttatatctctgtgagagatttttccaacagtcagctattttatggcacactttttttgactgatgacatctcctttgctatacctcaatttttggaatttagagaagaaatcagtagttttgcaatgttaattatttagatatttaatttcgcagatttttaaactttattttcataatttctgcttaatgtttaaaattgaagagccttttcatgtattaaataatgaacacaaattatataattaaaataattggagatgttgaaaatcattttcccttcttaaacagaaataaatatttggaatgaaggggaatgtactagaacaccctttttgccacgggtaaaaataacagaaatgtatggtttgttttaccttcatttctgtacaagtaaagcttattagtctaatgttttgttcctttcccacctcacccctacctcttttgttttgttttgtttttgccctttatgtactacattcttattttctaacttttaaacactgtattggaggtttttttttaatttacagatcatatttattttactatttttgtagaaaattattaattttgattgtatttttgtattttaaaagcttcttcacttgtgttccctaaatattcatattgctgcccaaaagtatgactgtggaggaaaaaaaaatactttaaaaatccacactttttgttaagaaggaaacatttagcatttatatatttgtgtatggaaaacacttgatattttatccctgttgcatctggctgcacagagcctctcctcaaagatgctacaaaacttgaatataacacattttggaaggctgactaacctcgattctgtgttgtgatgtgcaatactgtttctaatgtttgtataaaaaaaaacagtgtaaacctttttaatgcaaatttatttttttcattgcatattttgcagattttatccacagtgtcattttttactgtcagaaaagataccccttttgtcattgcaactattttttaaatccagaaatctttgtactgatgtaaatgattgtagttattttggatagtgttttgctaacaaaaggagagacttttttcatgcatatttctattttgtttttttgggttttattttattttaatagtagtaaaatacttggaataatttttcatattcttgtcattaatattattttgtatttttatgtggaaatatataattttatgacactaattgctaaagtttattttatgttgaattatttttggagctgaaatctttgtaatattaaagcaactagtttctaattcccagtttctgtatagaatcgcacaagtggtttatggagtgtttggattgtaattataaatggttctttgatatgcaaattaatattttcagttgattttattttatattcctaatggggtgttaaagccgttttttatttttttctaaataaaaagagaacccatgcttttatggacactaggtaaacaccttcagcttaaatttttcgttaaatattttagtttattttattgttatcttccaggtgtctaaatctccagtctgtctgttgtactggtaatttaactctgtaatggaatagtttgctgccaactatttatattaagtaatttttaaatatttgtaatattgttgactgactaataaactattaagttattggcat

SEQ ID NO: 4501 - protein, 589 aa, Homo sapiens; identical to SEQ ID NO: 482

SEQ ID NO: 4502 - DNA, 5678 bp, Homo sapiens
cgcgtcgccgccgccgctgcccggcttcggcaccccctggtcggtgcagaccgcgtcgccgccaccccagccccagcagccgccgccgacccagccgcagcagcagccgccgccaccccagcagccgccccagccgcagccgcagccgcccggctcgtctgccaccaccccgggcggcggcagcggcggctcgctcagcgccatgccgccgcccagccccgactcagagaacggcttctaccccgggctgccgtcgtccatgaacccggccttcttccctagcttctcgcccgtgtcgccgcacggctgcactgggctcagcgttccgacgagcggcggcggcggcggcggcttcggcggccccttctcggctaccgctgtgccccctccgccgccgcccgccatgaatatacctcaacagcagcccccgccgcccgcggcgccgcagcagccgcagagccggaggtcgcccgtcagcccgcagctccagcagcagcaccaggcggcggccgccgccttcctgcagcagaggaactcctataaccaccaccagcctcttctgaaacagtctccctggagcaaccatcagagcagtggctggggcactggaagtatgtcctggggagcaatgcatggcagagatcatcgtagaaccggaaacatgggaatcccaggaactatgaatcagatatctccattgaagaaaccgttttctggtaatgtcatagcaccaccgaaatttactcgctcaactccatcactgactccaaaatcttggattgaagataatgtgttcagaacagacaacaatagtaatacactcttacccttacaggatcgaagtagaatgtatgacagtttgaatatgcactctttggaaaattcccttatcgatattatgagagcagagcatgatcctcttaagggtcgattgagctatccacatccaggaactgacaatctgttgatgttaaatgcaaggagttatgggcgaagacgaggtcgttcttccctctttccaatagatgatggcttgcttgatgatggtcacagtgatcaagttggagttttaaattcacccacctgttattcagctcaccaaaatggagagcgaatagaacgcttctctcgaaaagtttttgttggtggtcttcctccagatattgatgaagatgaaataactgctagcttcagaagatttgggcctttggtagtagattggcctcataaagcagaaagcaagtcctattttccaccaaaaggctatgcatttcttctctttcaagaagagagctcagttcaggcactcattgatgcttgtattgaagaagatggaaaactctatctgtgtgtttctagccctactatcaaggacaaaccagttcaaatacgtccttggaatttaagtgatagtgattttgtaatggatggttctcagcctttggatccccgaaaaacaatttttgttggaggtgttcctaggccattaagggctgtggaacttgctatgatcatggaccggctgtatggtggagtttgttatgcaggaattgatacagatcctgagctaaaatacccaaaaggtgctgggcgagttgctttctccaatcagcagagctatattgctgccattagtgctcggtttgttcagcttcagcatggtgatattgataaacgtgtggaggtaaagccatatgtgctagatgaccagatgtgtgatgaatgccagggcgcacgctgtggtggaaaatttgctccctttttttgtgccaatgtcacttgcctgcagtattactgtgagttttgttgggcaaatatccactctcgtgctggacgtgagttccataagccattggtaaaggaaggtgctgatcgcccacgtcagatccacttccgctggaactaagaatagcaaactggcctctgtttaacaaggaaagaaagggtgcatgtggcttactgtgtctgaagatactgacatgcagaagaaataagtgcattcttctgcttttcaccccagctatcaatacatgcatctttatcagcagccaaaacactacaagcctcttgtttttcaccaaaaccctacatctcaggcttactaatttttgtgatattttcatgttcaaataaaatgtttttttgtattttctccaagttatttttatatgtaaagttaaaattagatatgagaatgttttgcgtaggggcaacacagtctgctgctatatagtgggggaagcgtgcacttatttctaaacatgggtttttaacttcaagatctgccccagtaatttaccaaaggtagcaaaataatagtgaagatggaatatgtctgctacaaatgcttatttttattgttgctattttcagtgtatacataaactaaaaattagggttgatttttttgctctccattttgacttgcaagaaataatacctcaagataatctgatttattagctatttttaaacatttttaatcacaagctgtattagctttgctgctatataggtgttatgtgtaaatgccacctattaatacgggactgaaaacgttagagacacactgcattgcagataaaatgcaggcagcacaatatggcctaaactgccatagttttagaatgtgaaaaaaatgcatgtttacttacctgtatacaccatatgcatgcactagaattattaactaacgaggtgaggtattgcaaatgttcaaaaaagctctcttgaatctaggtagcatgaacaaattataaaatttgtttaaaaaagcaaacttgcatgcattattgtgacttcaagtttaaaaaatcgtcttacatgtgtacaatatgcaaattagttttagattagagagtgcagccattttgtgatctggtcagtagtggaattcgattttatgcagactggatgtaatatttgtaatccctgtgcaattttgtgacgtgcggttctaattcatgtgcagtgatatagtatagataaaagaatgagtaaaagaaaatacaagaattctaaagaaagttggttttagcccctttgatagtccatggttaagacatcctttataaaccaaagatggccagcacactgctaaccagtcaccaaatgtaagacccataagaaacccatatttaaaaatctgaattttttagaagaatgcaaaactttagtaaaccctaagtaaagtcaaaatggagaaggggaaatatacagatggctagttgcataaaattaaattttacctttataagacaatggtgaaatctggcttgaacttgcttatgtgtttaacctataaatattggggtcttctgtctaaactggggtcactgttgcatggaacattgttcttaatagttgagaattgcttttttgaaaattttcatgaaggaattttggtaatgactttgcttgcaggttttttggggtgttttgagaaagtggcatggaaacatgcagtagttaatgagtttctcttggtactgaacactattagaatatcattagtgatattttttctctttagagcatttttaatgcaactagcccctatattttaatgtaagagttactctgcaatctaagcaaagcacccaacaatggtaaatgttttttaaaaatgcagaactaagatttttgactctaaagagagaaaattacaagggtgttgccttatagcaaacccttgggacaatccttcatgtgagcaaagtgttgatcttaatattggttgtctgtggtgtgcttttttgtactgtaaaaatatgtggttcatgtctaactctgctgttttattgtggttgtggttcaagtttttaatgtttaaagttgatgctgttttcagaagagctttttactaatttatttgtcagtgttccctatttgttacttaaccatgatcctccagattttttggagtattcttttctaaccttaaccctgccaaaccttgatccattttgacatttgttatgcactatttttatatctctgtgagagatttttccaacagtcagctattttatggcacactttttttgactgatgacatctcctttgctatacctcaatttttggaatttagagaagaaatcagtagttttgcaatgttaattatttagatatttaatttcgcagatttttaaactttattttcataatttctgcttaatgtttaaaattgaagagccttttcatgtattaaataatgaacacaaattatataattaaaataattggagatgttgaaaatcattttcccttcttaaacagaaataaatatttggaatgaaggggaatgtactagaacaccctttttgccacgggtaaaaataacagaaatgtatggtttgttttaccttcatttctgtacaagtaaagcttattagtctaatgttttgttcctttcccacctcacccctacctcttttgttttgttttgtttttgccctttatgtactacattcttattttctaacttttaaacactgtattggaggtttttttttaatttacagatcatatttattttactatttttgtagaaaattattaattttgattgtatttttgtattttaaaagcttcttcacttgtgttccctaaatattcatattgctgcccaaaagtatgactgtggaggaaaaaaaaatactttaaaaatccacactttttgttaagaaggaaacatttagcatttatatatttgtgtatggaaaacacttgatattttatccctgttgcatctggctgcacagagcctctcctcaaagatgctacaaaacttgaatataacacattttggaaggctgactaacctcgattctgtgttgtgatgtgcaatactgtttctaatgtttgtataaaaaaaaacagtgtaaacctttttaatgcaaatttatttttttcattgcatattttgcagattttatccacagtgtcattttttactgtcagaaaagataccccttttgtcattgcaactattttttaaatccagaaatctttgtactgatgtaaatgattgtagttattttggatagtgttttgctaacaaaaggagagacttttttcatgcatatttctattttgtttttttgggttttattttattttaatagtagtaaaatacttggaataatttttcatattcttgtcattaatattattttgtatttttatgtggaaatatataattttatgacactaattgctaaagtttattttatgttgaattatttttggagctgaaatctttgtaatattaaagcaactagtttctaattcccagtttctgtatagaatcgcacaagtggtttatggagtgtttggattgtaattataaatggttctttgatatgcaaattaatattttcagttgattttattttatattcctaatggggtgttaaagccgttttttatttttttctaaataaaaagagaacccatgcttttatggacactaggtaaacaccttcagcttaaatttttcgttaaatattttagtttattttattgttatcttccaggtgtctaaatctccagtctgtctgttgtactggtaatttaactctgtaatggaatagtttgctgccaactatttatattaagtaatttttaaatatttgtaatattgttgactgactaataaactattaagttattggcat

SEQ ID NO: 4503 - protein, 567 aa, Homo sapiens
MPPPSPDSENGFYPGLPSSMNPAFFPSFSPVSPHGCTGLSVPTSGGGGGGFGGPFSATAVPPPPPPAMNIPQQQPPPPAAPQQPQSRRSPVSPQLQQQHQAAAAAFLQQRNSYNHHQPLLKQSPWSNHQSSGWGTGSMSWGAMHGRDHRRTGNMGIPGTMNQISPLKKPFSGNVIAPPKFTRSTPSLTPKSWIEDNVFRTDNNSNTLLPLQDRSRMYDSLNMHSLENSLIDIMRAEHDPLKGRLSYPHPGTDNLLMLNARSYGRRRGRSSLFPIDDGLLDDGHSDQVGVLNSPTCYSAHQNGERIERFSRKVFVGGLPPDIDEDEITASFRRFGPLVVDWPHKAESKSYFPPKGYAFLLFQEESSVQALIDACIEEDGKLYLCVSSPTIKDKPVQIRPWNLSDSDFVMDGSQPLDPRKTIFVGGVPRPLRAVELAMIMDRLYGGVCYAGIDTDPELKYPKGAGRVAFSNQQSYIAAISARFVQLQHGDIDKRVEVKPYVLDDQMCDECQGARCGGKFAPFFCANVTCLQYYCEFCWANIHSRAGREFHKPLVKEGADRPRQIHFRWN

SEQ ID NO: 4504 - DNA, 5654 bp, Homo sapiens
cgcgtcgccgccgccgctgcccggcttcggcaccccctggtcggtgcagaccgcgtcgccgccaccccagccccagcagccgccgccgacccagccgcagcagcagccgccgccaccccagcagccgccccagccgcagccgcagccgcccggctcgtctgccaccaccccgggcggcggcagcggcggctcgctcagcgccatgccgccgcccagccccgactcagagaacggcttctaccccgggctgccgtcgtccatgaacccggccttcttccctagcttctcgcccgtgtcgccgcacggctgcactgggctcagcgttccgacgagcggcggcggcggcggcggcttcggcggccccttctcggctaccgctgtgccccctccgccgccgcccgccatgaatatacctcaacagcagcccccgccgcccgcggcgccgcagcagccgcagagccggaggtcgcccgtcagcccgcagctccagcagcagcaccaggcggcggccgccgccttcctgcagcagaggaactcctataaccaccaccagcctcttctgaaacagtctccctggagcaaccatcagagcagtggctggggcactggaagtatgtcctggggagcaatgcatggcagagatcatcgtagaaccggaaacatgggaatcccaggaactatgaatcagatatctccattgaagaaaccgttttctggtaatgtcatagcaccaccgaaatttactcgctcaactccatcactgactccaaaatcttggattgaagataatgtgttcagaacagacaacaatagtaatacactcttacccttacaggatcgaagtagaatgtatgacagtttgaatatgcactctttggaaaattcccttatcgatattatgagagcagagcatgatcctcttaagggtcgattgagctatccacatccaggaactgacaatctgttgatgttaaatggtcgttcttccctctttccaatagatgatggcttgcttgatgatggtcacagtgatcaagttggagttttaaattcacccacctgttattcagctcaccaaaatggagagcgaatagaacgcttctctcgaaaagtttttgttggtggtcttcctccagatattgatgaagatgaaataactgctagcttcagaagatttgggcctttggtagtagattggcctcataaagcagaaagcaagtcctattttccaccaaaaggctatgcatttcttctctttcaagaagagagctcagttcaggcactcattgatgcttgtattgaagaagatggaaaactctatctgtgtgtttctagccctactatcaaggacaaaccagttcaaatacgtccttggaatttaagtgatagtgattttgtaatggatggttctcagcctttggatccccgaaaaacaatttttgttggaggtgttcctaggccattaagggctgtggaacttgctatgatcatggaccggctgtatggtggagtttgttatgcaggaattgatacagatcctgagctaaaatacccaaaaggtgctgggcgagttgctttctccaatcagcagagctatattgctgccattagtgctcggtttgttcagcttcagcatggtgatattgataaacgtgtggaggtaaagccatatgtgctagatgaccagatgtgtgatgaatgccagggcgcacgctgtggtggaaaatttgctccctttttttgtgccaatgtcacttgcctgcagtattactgtgagttttgttgggcaaatatccactctcgtgctggacgtgagttccataagccattggtaaaggaaggtgctgatcgcccacgtcagatccacttccgctggaactaagaatagcaaactggcctctgtttaacaaggaaagaaagggtgcatgtggcttactgtgtctgaagatactgacatgcagaagaaataagtgcattcttctgcttttcaccccagctatcaatacatgcatctttatcagcagccaaaacactacaagcctcttgtttttcaccaaaaccctacatctcaggcttactaatttttgtgatattttcatgttcaaataaaatgtttttttgtattttctccaagttatttttatatgtaaagttaaaattagatatgagaatgttttgcgtaggggcaacacagtctgctgctatatagtgggggaagcgtgcacttatttctaaacatgggtttttaacttcaagatctgccccagtaatttaccaaaggtagcaaaataatagtgaagatggaatatgtctgctacaaatgcttatttttattgttgctattttcagtgtatacataaactaaaaattagggttgatttttttgctctccattttgacttgcaagaaataatacctcaagataatctgatttattagctatttttaaacatttttaatcacaagctgtattagctttgctgctatataggtgttatgtgtaaatgccacctattaatacgggactgaaaacgttagagacacactgcattgcagataaaatgcaggcagcacaatatggcctaaactgccatagttttagaatgtgaaaaaaatgcatgtttacttacctgtatacaccatatgcatgcactagaattattaactaacgaggtgaggtattgcaaatgttcaaaaaagctctcttgaatctaggtagcatgaacaaattataaaatttgtttaaaaaagcaaacttgcatgcattattgtgacttcaagtttaaaaaatcgtcttacatgtgtacaatatgcaaattagttttagattagagagtgcagccattttgtgatctggtcagtagtggaattcgattttatgcagactggatgtaatatttgtaatccctgtgcaattttgtgacgtgcggttctaattcatgtgcagtgatatagtatagataaaagaatgagtaaaagaaaatacaagaattctaaagaaagttggttttagcccctttgatagtccatggttaagacatcctttataaaccaaagatggccagcacactgctaaccagtcaccaaatgtaagacccataagaaacccatatttaaaaatctgaattttttagaagaatgcaaaactttagtaaaccctaagtaaagtcaaaatggagaaggggaaatatacagatggctagttgcataaaattaaattttacctttataagacaatggtgaaatctggcttgaacttgcttatgtgtttaacctataaatattggggtcttctgtctaaactggggtcactgttgcatggaacattgttcttaatagttgagaattgcttttttgaaaattttcatgaaggaattttggtaatgactttgcttgcaggttttttggggtgttttgagaaagtggcatggaaacatgcagtagttaatgagtttctcttggtactgaacactattagaatatcattagtgatattttttctctttagagcatttttaatgcaactagcccctatattttaatgtaagagttactctgcaatctaagcaaagcacccaacaatggtaaatgttttttaaaaatgcagaactaagatttttgactctaaagagagaaaattacaagggtgttgccttatagcaaacccttgggacaatccttcatgtgagcaaagtgttgatcttaatattggttgtctgtggtgtgcttttttgtactgtaaaaatatgtggttcatgtctaactctgctgttttattgtggttgtggttcaagtttttaatgtttaaagttgatgctgttttcagaagagctttttactaatttatttgtcagtgttccctatttgttacttaaccatgatcctccagattttttggagtattcttttctaaccttaaccctgccaaaccttgatccattttgacatttgttatgcactatttttatatctctgtgagagatttttccaacagtcagctattttatggcacactttttttgactgatgacatctcctttgctatacctcaatttttggaatttagagaagaaatcagtagttttgcaatgttaattatttagatatttaatttcgcagatttttaaactttattttcataatttctgcttaatgtttaaaattgaagagccttttcatgtattaaataatgaacacaaattatataattaaaataattggagatgttgaaaatcattttcccttcttaaacagaaataaatatttggaatgaaggggaatgtactagaacaccctttttgccacgggtaaaaataacagaaatgtatggtttgttttaccttcatttctgtacaagtaaagcttattagtctaatgttttgttcctttcccacctcacccctacctcttttgttttgttttgtttttgccctttatgtactacattcttattttctaacttttaaacactgtattggaggtttttttttaatttacagatcatatttattttactatttttgtagaaaattattaattttgattgtatttttgtattttaaaagcttcttcacttgtgttccctaaatattcatattgctgcccaaaagtatgactgtggaggaaaaaaaaatactttaaaaatccacactttttgttaagaaggaaacatttagcatttatatatttgtgtatggaaaacacttgatattttatccctgttgcatctggctgcacagagcctctcctcaaagatgctacaaaacttgaatataacacattttggaaggctgactaacctcgattctgtgttgtgatgtgcaatactgtttctaatgtttgtataaaaaaaaacagtgtaaacctttttaatgcaaatttatttttttcattgcatattttgcagattttatccacagtgtcattttttactgtcagaaaagataccccttttgtcattgcaactattttttaaatccagaaatctttgtactgatgtaaatgattgtagttattttggatagtgttttgctaacaaaaggagagacttttttcatgcatatttctattttgtttttttgggttttattttattttaatagtagtaaaatacttggaataatttttcatattcttgtcattaatattattttgtatttttatgtggaaatatataattttatgacactaattgctaaagtttattttatgttgaattatttttggagctgaaatctttgtaatattaaagcaactagtttctaattcccagtttctgtatagaatcgcacaagtggtttatggagtgtttggattgtaattataaatggttctttgatatgcaaattaatattttcagttgattttattttatattcctaatggggtgttaaagccgttttttatttttttctaaataaaaagagaacccatgcttttatggacactaggtaaacaccttcagcttaaatttttcgttaaatattttagtttattttattgttatcttccaggtgtctaaatctccagtctgtctgttgtactggtaatttaactctgtaatggaatagtttgctgccaactatttatattaagtaatttttaaatatttgtaatattgttgactgactaataaactattaagttattggcat

SEQ ID NO: 4505 - protein, 559 aa, Homo sapiens; identical to SEQ ID NO: 484

SEQ ID NO: 4506 - DNA, 969 bp, Homo sapiens
ccccagcagccgccccagccgcagccgcagccgcccggctcgtctgccaccaccccgggcggcggcagcggcggctcgctcagcgccatgccgccgcccagccccgactcagagaacggcttctaccccgggctgccgtcgtccatgaacccggccttcttccctagcttctcgcccgtgtcgccgcacggctgcactgggctcagcgttccgacgagcggcggcggcggcggcggcttcggcggccccttctcggctaccgctgtgccccctccgccgccgcccgccatgaatatacctcaacagcagcccccgccgcccgcggcgccgcagcagccgcagagccggaggtcgcccgtcagcccgcagctccagcagcagcaccaggcggcggccgccgccttcctgcagcagaggaactcctataaccaccaccagcctcttctgaaacagtctccctggagcaaccatcagagcagtggctggggcactggaagtatgtcctggggagcaatgcatggcagagatcatcgtagaaccggaaacatgggaatcccaggaactatgaatcagatatctccattgaagaaaccgttttctggtaatgtcatagcaccaccgaaatttactcgctcaactccatcactgactccaaaatcttggattgaagataatgtgttcagaacagacaacaatagtaatacactcttacccttacaggatcgaagtagaatgtatgacagtttgaatatgcactctttggaaaattcccttatcgatattatgagagcagagcatgatcctcttaagggtaggtgactttttaaaaaaatatatgtttatattatacaccaatttgcttatcttactagtttttatatgaaagtgaaacctaagtagcacctatatccaatataaaactctcttacacatttattaatgagaatctttgtttttatgaaatgccat

SEQ ID NO: 4507 - protein, 243 aa, Homo sapiens
MPPPSPDSENGFYPGLPSSMNPAFFPSFSPVSPHGCTGLSVPTSGGGGGGFGGPFSATAVPPPPPPAMNIPQQQPPPPAAPQQPQSRRSPVSPQLQQQHQAAAAAFLQQRNSYNHHQPLLKQSPWSNHQSSGWGTGSMSWGAMHGRDHRRTGNMGIPGTMNQISPLKKPFSGNVIAPPKFTRSTPSLTPKSWIEDNVFRTDNNSNTLLPLQDRSRMYDSLNMHSLENSLIDIMRAEHDPLKGR

SEQ ID NO: 4508 - DNA, 1697 bp, Homo sapiens
ccccagcagccgccccagccgcagccgcagccgcccggctcgtctgccaccaccccgggcggcggcagcggcggctcgctcagcgccatgccgccgcccagccccgactcagagaacggcttctaccccgggctgccgtcgtccatgaacccggccttcttccctagcttctcgcccgtgtcgccgcacggctgcactgggctcagcgttccgacgagcggcggcggcggcggcggcttcggcggccccttctcggctaccgctgtgccccctccgccgccgcccgccatgaatatacctcaacagcagcccccgccgcccgcggcgccgcagcagccgcagagccggaggtcgcccgtcagcccgcagctccagcagcagcaccaggcggcggccgccgccttcctgcagcagaggaactcctataaccaccaccagcctcttctgaaacagtctccctggagcaaccatcagagcagtggctggggcactggaagtatgtcctggggagcaatgcatggcagagatcatcgtagaaccggaaacatgggaatcccaggaactatgaatcagatatctccattgaagaaaccgttttctggtaatgtcatagcaccaccgaaatttactcgctcaactccatcactgactccaaaatcttggattgaagataatgtgttcagaacagacaacaatagtaatacactcttacccttacaggatcgaagtagaatgtatgacagtttgaatatgcactctttggaaaattcccttatcgatattatgagagcagagcatgatcctcttaagggtcgattgagctatccacatccaggaactgacaatctgttgatgttaaatgcaaggagttatgggcgaagacgaggtcgttcttccctctttccaatagatgatggcttgcttgatgatggtcacagtgatcaagttggagttttaaattcacccacctgttattcagctcaccaaaatggagagcgaatagaacgcttctctcgaaaagtttttgttggtggtcttcctccagatattgatgaagatgaaataactgctagcttcagaagatttgggcctttggtagtagattggcctcataaagcagaaagcaagtcctattttccaccaaaaggctatgcatttcttctctttcaagaagagagctcagttcaggcactcattgatgcttgtattgaagaagatggaaaactctatctgtgtgtttctagccctactatcaaggacaaaccagttcaaatacgtccttggaatttaagtgatagtgattttgtaatggatggttctcagcctttggatccccgaaaaacaatttttgttggaggtgttcctaggccattaagggctgtggaacttgctatgatcatggaccggctgtatggtggagtttgttatgcaggaattgatacagatcctgagctaaaatacccaaaaggtgctgggcgagttgctttctccaatcagcagagctatattgctgccattagtgctcggtttgttcagcttcagcatggtgatattgataaacgttgaaggaccgattatttggagcagagtactgactcttaaagagcaactcagttgcagagcagatgaattgagatacatgtgccttcttaaaaaggcattgaaatacctgagggaaaagcttattttctaagata

SEQ ID NO: 4509 - protein, 492 aa, Homo sapiens
MPPPSPDSENGFYPGLPSSMNPAFFPSFSPVSPHGCTGLSVPTSGGGGGGFGGPFSATAVPPPPPPAMNIPQQQPPPPAAPQQPQSRRSPVSPQLQQQHQAAAAAFLQQRNSYNHHQPLLKQSPWSNHQSSGWGTGSMSWGAMHGRDHRRTGNMGIPGTMNQISPLKKPFSGNVIAPPKFTRSTPSLTPKSWIEDNVFRTDNNSNTLLPLQDRSRMYDSLNMHSLENSLIDIMRAEHDPLKGRLSYPHPGTDNLLMLNARSYGRRRGRSSLFPIDDGLLDDGHSDQVGVLNSPTCYSAHQNGERIERFSRKVFVGGLPPDIDEDEITASFRRFGPLVVDWPHKAESKSYFPPKGYAFLLFQEESSVQALIDACIEEDGKLYLCVSSPTIKDKPVQIRPWNLSDSDFVMDGSQPLDPRKTIFVGGVPRPLRAVELAMIMDRLYGGVCYAGIDTDPELKYPKGAGRVAFSNQQSYIAAISARFVQLQHGDIDKR

SEQ ID NO: 4510 - DNA, 1763 bp, Homo sapiens
ccccagcagccgccccagccgcagccgcagccgcccggctcgtctgccaccaccccgggcggcggcagcggcggctcgctcagcgccatgccgccgcccagccccgactcagagaacggcttctaccccgggctgccgtcgtccatgaacccggccttcttccctagcttctcgcccgtgtcgccgcacggctgcactgggctcagcgttccgacgagcggcggcggcggcggcggcttcggcggccccttctcggctaccgctgtgccccctccgccgccgcccgccatgaatatacctcaacagcagcccccgccgcccgcggcgccgcagcagccgcagagccggaggtcgcccgtcagcccgcagctccagcagcagcaccaggcggcggccgccgccttcctgcagcagaggaactcctataaccaccaccagcctcttctgaaacagtctccctggagcaaccatcagagcagtggctggggcactggaagtatgtcctggggagcaatgcatggcagagatcatcgtagaaccggaaacatgggaatcccaggaactatgaatcagatatctccattgaagaaaccgttttctggtaatgtcatagcaccaccgaaatttactcgctcaactccatcactgactccaaaatcttggattgaagataatgtgttcagaacagacaacaatagtaatacactcttacccttacaggtgagatctagtttgcagttgccagcttggggctcagattcactccaagatagttggtgcactgcagccggaacatccagaatagaccaggatcgaagtagaatgtatgacagtttgaatatgcactctttggaaaattcccttatcgatattatgagagcagagcatgatcctcttaagggtcgattgagctatccacatccaggaactgacaatctgttgatgttaaatggtcgttcttccctctttccaatagatgatggcttgcttgatgatggtcacagtgatcaagttggagttttaaattcacccacctgttattcagctcaccaaaatggagagcgaatagaacgcttctctcgaaaagtttttgttggtggtcttcctccagatattgatgaagatgaaataactgctagcttcagaagatttgggcctttggtagtagattggcctcataaagcagaaagcaagtcctattttccaccaaaaggctatgcatttcttctctttcaagaagagagctcagttcaggcactcattgatgcttgtattgaagaagatggaaaactctatctgtgtgtttctagccctactatcaaggacaaaccagttcaaatacgtccttggaatttaagtgatagtgattttgtaatggatggttctcagcctttggatccccgaaaaacaatttttgttggaggtgttcctaggccattaagggctgtggaacttgctatgatcatggaccggctgtatggtggagtttgttatgcaggaattgatacagatcctgagctaaaatacccaaaaggtgctgggcgagttgctttctccaatcagcagagctatattgctgccattagtgctcggtttgttcagcttcagcatggtgatattgataaacgttgaaggaccgattatttggagcagagtactgactcttaaagagcaactcagttgcagagcagatgaattgagatacatgtgccttcttaaaaaggcattgaaatacctgagggaaaagcttattttctaagata

SEQ ID NO: 4511 - protein, 514 aa, Homo sapiens
MPPPSPDSENGFYPGLPSSMNPAFFPSFSPVSPHGCTGLSVPTSGGGGGGFGGPFSATAVPPPPPPAMNIPQQQPPPPAAPQQPQSRRSPVSPQLQQQHQAAAAAFLQQRNSYNHHQPLLKQSPWSNHQSSGWGTGSMSWGAMHGRDHRRTGNMGIPGTMNQISPLKKPFSGNVIAPPKFTRSTPSLTPKSWIEDNVFRTDNNSNTLLPLQVRSSLQLPAWGSDSLQDSWCTAAGTSRIDQDRSRMYDSLNMHSLENSLIDIMRAEHDPLKGRLSYPHPGTDNLLMLNGRSSLFPIDDGLLDDGHSDQVGVLNSPTCYSAHQNGERIERFSRKVFVGGLPPDIDEDEITASFRRFGPLVVDWPHKAESKSYFPPKGYAFLLFQEESSVQALIDACIEEDGKLYLCVSSPTIKDKPVQIRPWNLSDSDFVMDGSQPLDPRKTIFVGGVPRPLRAVELAMIMDRLYGGVCYAGIDTDPELKYPKGAGRVAFSNQQSYIAAISARFVQLQHGDIDKR

SEQ ID NO: 4512 - DNA, 5459 bp, Homo sapiens
ctcgtctgccaccaccccgggcggcggcagcggcggctcgctcagcgccatgccgccgcccagccccgactcagagaacggcttctaccccgggctgccgtcgtccatgaacccggccttcttccctagcttctcgcccgtgtcgccgcacggctgcactgggctcagcgttccgccgcccgccatgaatatacctcaacagcagcccccgccgcccgcggcgccgcagcagccgcagagccggaggtcgcccgtcagcccgcagctccagcagcagcaccaggcggcggccgccgccttcctgcagcagaggaactcctataaccaccaccagcctcttctgaaacagtctccctggagcaaccatcagagcagtggctggggcactggaagtatgtcctggggagcaatgcatggcagagatcatcgtagaaccggaaacatgggaatcccaggaactatgaatcagatatctccattgaagaaaccgttttctggtaatgtcatagcaccaccgaaatttactcgctcaactccatcactgactccaaaatcttggattgaagataatgtgttcagaacagacaacaatagtaatacactcttacccttacaggatcgaagtagaatgtatgacagtttgaatatgcactctttggaaaattcccttatcgatattatgagagcagagcatgatcctcttaagggtcgattgagctatccacatccaggaactgacaatctgttgatgttaaatgcaaggagttatgggcgaagacgaggtcgttcttccctctttccaatagatgatggcttgcttgatgatggtcacagtgatcaagttggagttttaaattcacccacctgttattcagctcaccaaaatggagagcgaatagaacgcttctctcgaaaagtttttgttggtggtcttcctccagatattgatgaagatgaaataactgctagcttcagaagatttgggcctttggtagtagattggcctcataaagcagaaagcaagtcctattttccaccaaaaggctatgcatttcttctctttcaagaagagagctcagttcaggcactcattgatgcttgtattgaagaagatggaaaactctatctgtgtgtttctagccctactatcaaggacaaaccagttcaaatacgtccttggaatttaagtgatagtgattttgtaatggatggttctcagcctttggatccccgaaaaacaatttttgttggaggtgttcctaggccattaagggctgtggaacttgctatgatcatggaccggctgtatggtggagtttgttatgcaggaattgatacagatcctgagctaaaatacccaaaaggtgctgggcgagttgctttctccaatcagcagagctatattgctgccattagtgctcggtttgttcagcttcagcatggtgatattgataaacgtgtggaggtaaagccatatgtgctagatgaccagatgtgtgatgaatgccagggcgcacgctgtggtggaaaatttgctccctttttttgtgccaatgtcacttgcctgcagtattactgtgagttttgttgggcaaatatccactctcgtgctggacgtgagttccataagccattggtaaaggaaggtgctgatcgcccacgtcagatccacttccgctggaactaagaatagcaaactggcctctgtttaacaaggaaagaaagggtgcatgtggcttactgtgtctgaagatactgacatgcagaagaaataagtgcattcttctgcttttcaccccagctatcaatacatgcatctttatcagcagccaaaacactacaagcctcttgtttttcaccaaaaccctacatctcaggcttactaatttttgtgatattttcatgttcaaataaaatgtttttttgtattttctccaagttatttttatatgtaaagttaaaattagatatgagaatgttttgcgtaggggcaacacagtctgctgctatatagtgggggaagcgtgcacttatttctaaacatgggtttttaacttcaagatctgccccagtaatttaccaaaggtagcaaaataatagtgaagatggaatatgtctgctacaaatgcttatttttattgttgctattttcagtgtatacataaactaaaaattagggttgatttttttgctctccattttgacttgcaagaaataatacctcaagataatctgatttattagctatttttaaacatttttaatcacaagctgtattagctttgctgctatataggtgttatgtgtaaatgccacctattaatacgggactgaaaacgttagagacacactgcattgcagataaaatgcaggcagcacaatatggcctaaactgccatagttttagaatgtgaaaaaaatgcatgtttacttacctgtatacaccatatgcatgcactagaattattaactaacgaggtgaggtattgcaaatgttcaaaaaagctctcttgaatctaggtagcatgaacaaattataaaatttgtttaaaaaagcaaacttgcatgcattattgtgacttcaagtttaaaaaatcgtcttacatgtgtacaatatgcaaattagttttagattagagagtgcagccattttgtgatctggtcagtagtggaattcgattttatgcagactggatgtaatatttgtaatccctgtgcaattttgtgacgtgcggttctaattcatgtgcagtgatatagtatagataaaagaatgagtaaaagaaaatacaagaattctaaagaaagttggttttagcccctttgatagtccatggttaagacatcctttataaaccaaagatggccagcacactgctaaccagtcaccaaatgtaagacccataagaaacccatatttaaaaatctgaattttttagaagaatgcaaaactttagtaaaccctaagtaaagtcaaaatggagaaggggaaatatacagatggctagttgcataaaattaaattttacctttataagacaatggtgaaatctggcttgaacttgcttatgtgtttaacctataaatattggggtcttctgtctaaactggggtcactgttgcatggaacattgttcttaatagttgagaattgcttttttgaaaattttcatgaaggaattttggtaatgactttgcttgcaggttttttggggtgttttgagaaagtggcatggaaacatgcagtagttaatgagtttctcttggtactgaacactattagaatatcattagtgatattttttctctttagagcatttttaatgcaactagcccctatattttaatgtaagagttactctgcaatctaagcaaagcacccaacaatggtaaatgttttttaaaaatgcagaactaagatttttgactctaaagagagaaaattacaagggtgttgccttatagcaaacccttgggacaatccttcatgtgagcaaagtgttgatcttaatattggttgtctgtggtgtgcttttttgtactgtaaaaatatgtggttcatgtctaactctgctgttttattgtggttgtggttcaagtttttaatgtttaaagttgatgctgttttcagaagagctttttactaatttatttgtcagtgttccctatttgttacttaaccatgatcctccagattttttggagtattcttttctaaccttaaccctgccaaaccttgatccattttgacatttgttatgcactatttttatatctctgtgagagatttttccaacagtcagctattttatggcacactttttttgactgatgacatctcctttgctatacctcaatttttggaatttagagaagaaatcagtagttttgcaatgttaattatttagatatttaatttcgcagatttttaaactttattttcataatttctgcttaatgtttaaaattgaagagccttttcatgtattaaataatgaacacaaattatataattaaaataattggagatgttgaaaatcattttcccttcttaaacagaaataaatatttggaatgaaggggaatgtactagaacaccctttttgccacgggtaaaaataacagaaatgtatggtttgttttaccttcatttctgtacaagtaaagcttattagtctaatgttttgttcctttcccacctcacccctacctcttttgttttgttttgtttttgccctttatgtactacattcttattttctaacttttaaacactgtattggaggtttttttttaatttacagatcatatttattttactatttttgtagaaaattattaattttgattgtatttttgtattttaaaagcttcttcacttgtgttccctaaatattcatattgctgcccaaaagtatgactgtggaggaaaaaaaaatactttaaaaatccacactttttgttaagaaggaaacatttagcatttatatatttgtgtatggaaaacacttgatattttatccctgttgcatctggctgcacagagcctctcctcaaagatgctacaaaacttgaatataacacattttggaaggctgactaacctcgattctgtgttgtgatgtgcaatactgtttctaatgtttgtataaaaaaaaacagtgtaaacctttttaatgcaaatttatttttttcattgcatattttgcagattttatccacagtgtcattttttactgtcagaaaagataccccttttgtcattgcaactattttttaaatccagaaatctttgtactgatgtaaatgattgtagttattttggatagtgttttgctaacaaaaggagagacttttttcatgcatatttctattttgtttttttgggttttattttattttaatagtagtaaaatacttggaataatttttcatattcttgtcattaatattattttgtatttttatgtggaaatatataattttatgacactaattgctaaagtttattttatgttgaattatttttggagctgaaatctttgtaatattaaagcaactagtttctaattcccagtttctgtatagaatcgcacaagtggtttatggagtgtttggattgtaattataaatggttctttgatatgcaaattaatattttcagttgattttattttatattcctaatggggtgttaaagccgttttttatttttttctaaataaaaagagaacccatgcttttatggacactaggtaaacaccttcagcttaaatttttcgttaaatattttagtttattttattgttatcttccaggtgtctaaatctccagtctgtctgttgtactggtaatttaactctgtaatggaatagtttgctgccaactatttatattaagtaatttttaaatatttgtaatattgttgactgactaataaactattaagttattggcat

SEQ ID NO: 4513 - protein, 545 aa, Homo sapiens
MPPPSPDSENGFYPGLPSSMNPAFFPSFSPVSPHGCTGLSVPPPAMNIPQQQPPPPAAPQQPQSRRSPVSPQLQQQHQAAAAAFLQQRNSYNHHQPLLKQSPWSNHQSSGWGTGSMSWGAMHGRDHRRTGNMGIPGTMNQISPLKKPFSGNVIAPPKFTRSTPSLTPKSWIEDNVFRTDNNSNTLLPLQDRSRMYDSLNMHSLENSLIDIMRAEHDPLKGRLSYPHPGTDNLLMLNARSYGRRRGRSSLFPIDDGLLDDGHSDQVGVLNSPTCYSAHQNGERIERFSRKVFVGGLPPDIDEDEITASFRRFGPLVVDWPHKAESKSYFPPKGYAFLLFQEESSVQALIDACIEEDGKLYLCVSSPTIKDKPVQIRPWNLSDSDFVMDGSQPLDPRKTIFVGGVPRPLRAVELAMIMDRLYGGVCYAGIDTDPELKYPKGAGRVAFSNQQSYIAAISARFVQLQHGDIDKRVEVKPYVLDDQMCDECQGARCGGKFAPFFCANVTCLQYYCEFCWANIHSRAGREFHKPLVKEGADRPRQIHFRWN

SEQ ID NO: 4514 - DNA, 5549 bp, Homo sapiens
ctcgtctgccaccaccccgggcggcggcagcggcggctcgctcagcgccatgccgccgcccagccccgactcagagaacggcttctaccccgggctgccgtcgtccatgaacccggccttcttccctagcttctcgcccgtgtcgccgcacggctgcactgggctcagcgttccgccgcccgccatgaatatacctcaacagcagcccccgccgcccgcggcgccgcagcagccgcagagccggaggtcgcccgtcagcccgcagctccagcagcagcaccaggcggcggccgccgccttcctgcagcagaggaactcctataaccaccaccagcctcttctgaaacagtctccctggagcaaccatcagagcagtggctggggcactggaagtatgtcctggggagcaatgcatggcagagatcatcgtagaaccggaaacatgggaatcccaggaactatgaatcagatatctccattgaagaaaccgttttctggtaatgtcatagcaccaccgaaatttactcgctcaactccatcactgactccaaaatcttggattgaagataatgtgttcagaacagacaacaatagtaatacactcttacccttacaggtgagatctagtttgcagttgccagcttggggctcagattcactccaagatagttggtgcactgcagccggaacatccagaatagaccaggatcgaagtagaatgtatgacagtttgaatatgcactctttggaaaattcccttatcgatattatgagagcagagcatgatcctcttaagggtcgattgagctatccacatccaggaactgacaatctgttgatgttaaatgcaaggagttatgggcgaagacgaggtcgttcttccctctttccaatagatgatggcttgcttgatgatggtcacagtgatcaagttggagttttaaattcacccacctgttattcagctcaccaaaatggagagcgaatagaacgcttctctcgaaaagtttttgttggtggtcttcctccagatattgatgaagatgaaataactgctagcttcagaagatttgggcctttggtagtagattggcctcataaagcagaaagcaagtcctattttccaccaaaaggctatgcatttcttctctttcaagaagagagctcagttcaggcactcattgatgcttgtattgaagaagatggaaaactctatctgtgtgtttctagccctactatcaaggacaaaccagttcaaatacgtccttggaatttaagtgatagtgattttgtaatggatggttctcagcctttggatccccgaaaaacaatttttgttggaggtgttcctaggccattaagggctgtggaacttgctatgatcatggaccggctgtatggtggagtttgttatgcaggaattgatacagatcctgagctaaaatacccaaaaggtgctgggcgagttgctttctccaatcagcagagctatattgctgccattagtgctcggtttgttcagcttcagcatggtgatattgataaacgtgtggaggtaaagccatatgtgctagatgaccagatgtgtgatgaatgccagggcgcacgctgtggtggaaaatttgctccctttttttgtgccaatgtcacttgcctgcagtattactgtgagttttgttgggcaaatatccactctcgtgctggacgtgagttccataagccattggtaaaggaaggtgctgatcgcccacgtcagatccacttccgctggaactaagaatagcaaactggcctctgtttaacaaggaaagaaagggtgcatgtggcttactgtgtctgaagatactgacatgcagaagaaataagtgcattcttctgcttttcaccccagctatcaatacatgcatctttatcagcagccaaaacactacaagcctcttgtttttcaccaaaaccctacatctcaggcttactaatttttgtgatattttcatgttcaaataaaatgtttttttgtattttctccaagttatttttatatgtaaagttaaaattagatatgagaatgttttgcgtaggggcaacacagtctgctgctatatagtgggggaagcgtgcacttatttctaaacatgggtttttaacttcaagatctgccccagtaatttaccaaaggtagcaaaataatagtgaagatggaatatgtctgctacaaatgcttatttttattgttgctattttcagtgtatacataaactaaaaattagggttgatttttttgctctccattttgacttgcaagaaataatacctcaagataatctgatttattagctatttttaaacatttttaatcacaagctgtattagctttgctgctatataggtgttatgtgtaaatgccacctattaatacgggactgaaaacgttagagacacactgcattgcagataaaatgcaggcagcacaatatggcctaaactgccatagttttagaatgtgaaaaaaatgcatgtttacttacctgtatacaccatatgcatgcactagaattattaactaacgaggtgaggtattgcaaatgttcaaaaaagctctcttgaatctaggtagcatgaacaaattataaaatttgtttaaaaaagcaaacttgcatgcattattgtgacttcaagtttaaaaaatcgtcttacatgtgtacaatatgcaaattagttttagattagagagtgcagccattttgtgatctggtcagtagtggaattcgattttatgcagactggatgtaatatttgtaatccctgtgcaattttgtgacgtgcggttctaattcatgtgcagtgatatagtatagataaaagaatgagtaaaagaaaatacaagaattctaaagaaagttggttttagcccctttgatagtccatggttaagacatcctttataaaccaaagatggccagcacactgctaaccagtcaccaaatgtaagacccataagaaacccatatttaaaaatctgaattttttagaagaatgcaaaactttagtaaaccctaagtaaagtcaaaatggagaaggggaaatatacagatggctagttgcataaaattaaattttacctttataagacaatggtgaaatctggcttgaacttgcttatgtgtttaacctataaatattggggtcttctgtctaaactggggtcactgttgcatggaacattgttcttaatagttgagaattgcttttttgaaaattttcatgaaggaattttggtaatgactttgcttgcaggttttttggggtgttttgagaaagtggcatggaaacatgcagtagttaatgagtttctcttggtactgaacactattagaatatcattagtgatattttttctctttagagcatttttaatgcaactagcccctatattttaatgtaagagttactctgcaatctaagcaaagcacccaacaatggtaaatgttttttaaaaatgcagaactaagatttttgactctaaagagagaaaattacaagggtgttgccttatagcaaacccttgggacaatccttcatgtgagcaaagtgttgatcttaatattggttgtctgtggtgtgcttttttgtactgtaaaaatatgtggttcatgtctaactctgctgttttattgtggttgtggttcaagtttttaatgtttaaagttgatgctgttttcagaagagctttttactaatttatttgtcagtgttccctatttgttacttaaccatgatcctccagattttttggagtattcttttctaaccttaaccctgccaaaccttgatccattttgacatttgttatgcactatttttatatctctgtgagagatttttccaacagtcagctattttatggcacactttttttgactgatgacatctcctttgctatacctcaatttttggaatttagagaagaaatcagtagttttgcaatgttaattatttagatatttaatttcgcagatttttaaactttattttcataatttctgcttaatgtttaaaattgaagagccttttcatgtattaaataatgaacacaaattatataattaaaataattggagatgttgaaaatcattttcccttcttaaacagaaataaatatttggaatgaaggggaatgtactagaacaccctttttgccacgggtaaaaataacagaaatgtatggtttgttttaccttcatttctgtacaagtaaagcttattagtctaatgttttgttcctttcccacctcacccctacctcttttgttttgttttgtttttgccctttatgtactacattcttattttctaacttttaaacactgtattggaggtttttttttaatttacagatcatatttattttactatttttgtagaaaattattaattttgattgtatttttgtattttaaaagcttcttcacttgtgttccctaaatattcatattgctgcccaaaagtatgactgtggaggaaaaaaaaatactttaaaaatccacactttttgttaagaaggaaacatttagcatttatatatttgtgtatggaaaacacttgatattttatccctgttgcatctggctgcacagagcctctcctcaaagatgctacaaaacttgaatataacacattttggaaggctgactaacctcgattctgtgttgtgatgtgcaatactgtttctaatgtttgtataaaaaaaaacagtgtaaacctttttaatgcaaatttatttttttcattgcatattttgcagattttatccacagtgtcattttttactgtcagaaaagataccccttttgtcattgcaactattttttaaatccagaaatctttgtactgatgtaaatgattgtagttattttggatagtgttttgctaacaaaaggagagacttttttcatgcatatttctattttgtttttttgggttttattttattttaatagtagtaaaatacttggaataatttttcatattcttgtcattaatattattttgtatttttatgtggaaatatataattttatgacactaattgctaaagtttattttatgttgaattatttttggagctgaaatctttgtaatattaaagcaactagtttctaattcccagtttctgtatagaatcgcacaagtggtttatggagtgtttggattgtaattataaatggttctttgatatgcaaattaatattttcagttgattttattttatattcctaatggggtgttaaagccgttttttatttttttctaaataaaaagagaacccatgcttttatggacactaggtaaacaccttcagcttaaatttttcgttaaatattttagtttattttattgttatcttccaggtgtctaaatctccagtctgtctgttgtactggtaatttaactctgtaatggaatagtttgctgccaactatttatattaagtaatttttaaatatttgtaatattgttgactgactaataaactattaagttattggcat

SEQ ID NO: 4515 - protein, 575 aa, Homo sapiens
MPPPSPDSENGFYPGLPSSMNPAFFPSFSPVSPHGCTGLSVPPPAMNIPQQQPPPPAAPQQPQSRRSPVSPQLQQQHQAAAAAFLQQRNSYNHHQPLLKQSPWSNHQSSGWGTGSMSWGAMHGRDHRRTGNMGIPGTMNQISPLKKPFSGNVIAPPKFTRSTPSLTPKSWIEDNVFRTDNNSNTLLPLQVRSSLQLPAWGSDSLQDSWCTAAGTSRIDQDRSRMYDSLNMHSLENSLIDIMRAEHDPLKGRLSYPHPGTDNLLMLNARSYGRRRGRSSLFPIDDGLLDDGHSDQVGVLNSPTCYSAHQNGERIERFSRKVFVGGLPPDIDEDEITASFRRFGPLVVDWPHKAESKSYFPPKGYAFLLFQEESSVQALIDACIEEDGKLYLCVSSPTIKDKPVQIRPWNLSDSDFVMDGSQPLDPRKTIFVGGVPRPLRAVELAMIMDRLYGGVCYAGIDTDPELKYPKGAGRVAFSNQQSYIAAISARFVQLQHGDIDKRVEVKPYVLDDQMCDECQGARCGGKFAPFFCANVTCLQYYCEFCWANIHSRAGREFHKPLVKEGADRPRQIHFRWN

SEQ ID NO: 4516 - DNA, 436 bp, Homo sapiens
ctttccttgttaaacagaggccagtttgctattcttagttccagcggaagtggatctgacgtgggcgatcagcaccttcctttaccaatggcttatggaactcacgtccagcacgagagtggatatttgcccaacaaaactcacagtaatactgcagaatatgtacagacaaaaacaagtatgctaatgaaatttcttcaaatactacaaacaattagtgaagactgctactataggctgctgctgtatttttaagaggctcaacttcaaatacttcaaccttttatggaaagatggaaacacacaacaaactatgtagatcttgatacaagtctccatcaagttgattcattttcaaaagtaaattacatcctaatctcaaacctgtggcaagacaagtcaaatcatcaaagaatggtaaatccatcaaaacgct

SEQ ID NO: 4517 - protein, 55 aa, Homo sapiens
MAYGTHVQHESGYLPNKTHSNTAEYVQTKTSMLMKFLQILQTISEDCYYRLLLYF

SEQ ID NO: 4518 - DNA, 2168 bp, Homo sapiens
ggtttcctgtacgctcagaacagcaccaagcgcagcattaaagagcggctcatgaagctcttgccctgctcagctgccaaaacgtcgtctcctgctattcaaagcaacgtggaagatgaactggagatggccaccgtcaggcatcggcctgaagcccttgagcttctggaagcccagagcaaatttaccaagaaagagcttcagatcctttacagaggatttaagaatgaatgccccagtggtgttgttaatgaagaaaccttcaaagagatttactcgcagttctttccacagggagactctacaacatatgcacattttctgttcaatgcatttgatacagaccacaatggagctgtgagtttcgaggatttcatcaaaggtctttccattttgctccgggggacagtacaagaaaaactcaattgggcatttaatctgtatgacataaataaagatggctacatcactaaagaggaaatgcttgatataatgaaagcaatatacgatatgatgggtaaatgtacatatcctgtcctcaaagaagatgctcccagacaacacgttgaaacattttttcagaaaatggacaaaaataaagatggggttgttaccatagatgagttcattgaaagctgccaaaaagatgaaaacataatgcgctccatgcagctctttgaaaatgtgatttaacttgtcaaatagatcctgaatccaacagacaaatgtgaactattctaccacccttaaagttggagctaccacttttagcatagattgctcagcttgacactgaagcatattatgcaaacaagctttgttttaatataaagcaatccccaaaagatttgagctttcagttataaatttgcatccttttcataatgccactgagttcaggggatggtctaactcatttcatactctgtgaatattcaaaagtaatagaatctggcatatagttttattggttccttagccatgggattattgaggctttcacatatcagtgattttaaaatatcagtgttttttgctactcatttgtatgtattcagtcctaggattttgaatggttttctaatatagtgacatctgcatttaatttccagaaattaaattaattttcatgtttgaatgctgtaattccatttaaattccatttatatactttaaggaaacaagattacaacaattaaaaaaacacatagttccagtttctatggccttcccaccttctgttagaaattagttttatctggcatttttaaacatttaaaaattattaaacatttaaaaattagtttattatcagatatcagcatatgcctaataaaacttattttaataagcatttaattttccataatatgttacagccaaggcctatataataattttggatttgttcaatctttcttacaggctgttttctattgtatcaatcattagtatcaatcattaagtggaagttgaagaaggcatcaaacaaaacaaggatgtttacagacatatgcaaagggtcaggatatctatcctccagtatatagtaatgcttaataacaagtaatcctaacagcattaaaggccaaatctgtcctctttcccctgacttccttacagcatgtttatttatattacaagccattcagggacaaagaaagaaaccttgactaccccactgtctactaagaacaaacagcaagcaaaattagcaagcaaaattcactttgaaagcaccagtggttccattacattgacaactactaccaagatttagtagaaaataagtgctcaacaactaatccagattacagtatgatttagctcatcataattcagattatttttaatcatcttagccaaaactgtaaagttgccacattactaaagccacacacatcgtccctgttttgtagaaatatcacaaagaccaagaggctacagaaggaggaaatttgcaactgtctttgcaacaataaatcaggtatctattctggtgtagagataggatgttgaaagctgccctgctatcaccagtgtagaaattaagagtagtacaatacatgtacactgaaatttgccatcacgtgtttgtgtaaactcaatgtgcacattttgtatttcaaaaagaaaaaataaaagcaaaataaaatgtttataactct

SEQ ID NO: 4519 - protein, 213 aa, Homo sapiens [sequence omitted]

SEQ ID NO: 4520 - DNA, 2285 bp, Homo sapiens
gctctcctcctcccctttctccagcagtagccttcttaatgtagtttaatggctttacaaagaaagccaggcagaggagcacttctcagtggctgtggtcggaccatgacctagctgaccatgaacttggaagggcttgaaatgatagcagttctgatcgtcattgtgctttttgttaaattattggaacagtttgggctgattgaagcaggtttagaagacagcgtggaagatgaactggagatggccaccgtcaggcatcggcctgaagcccttgagcttctggaagcccagagcaaatttaccaagaaagagcttcagatcctttacagaggatttaagaatgaatgccccagtggtgttgttaatgaagaaaccttcaaagagatttactcgcagttctttccacagggagactctacaacatatgcacattttctgttcaatgcatttgatacagaccacaatggagctgtgagtttcgaggatttcatcaaaggtctttccattttgctccgggggacagtacaagaaaaactcaattgggcatttaatctgtatgacataaataaagatggctacatcactaaagaggaaatgcttgatataatgaaagcaatatacgatatgatgggtaaatgtacatatcctgtcctcaaagaagatgctcccagacaacacgttgaaacattttttcagaaaatggacaaaaataaagatggggttgttaccatagatgagttcattgaaagctgccaaaaagatgaaaacataatgcgctccatgcagctctttgaaaatgtgatttaacttgtcaaatagatcctgaatccaacagacaaatgtgaactattctaccacccttaaagttggagctaccacttttagcatagattgctcagcttgacactgaagcatattatgcaaacaagctttgttttaatataaagcaatccccaaaagatttgagctttcagttataaatttgcatccttttcataatgccactgagttcaggggatggtctaactcatttcatactctgtgaatattcaaaagtaatagaatctggcatatagttttattggttccttagccatgggattattgaggctttcacatatcagtgattttaaaatatcagtgttttttgctactcatttgtatgtattcagtcctaggattttgaatggttttctaatatagtgacatctgcatttaatttccagaaattaaattaattttcatgtttgaatgctgtaattccatttaaattccatttatatactttaaggaaacaagattacaacaattaaaaaaacacatagttccagtttctatggccttcccaccttctgttagaaattagttttatctggcatttttaaacatttaaaaattattaaacatttaaaaattagtttattatcagatatcagcatatgcctaataaaacttattttaataagcatttaattttccataatatgttacagccaaggcctatataataattttggatttgttcaatctttcttacaggctgttttctattgtatcaatcattagtatcaatcattaagtggaagttgaagaaggcatcaaacaaaacaaggatgtttacagacatatgcaaagggtcaggatatctatcctccagtatatagtaatgcttaataacaagtaatcctaacagcattaaaggccaaatctgtcctctttcccctgacttccttacagcatgtttatttatattacaagccattcagggacaaagaaagaaaccttgactaccccactgtctactaagaacaaacagcaagcaaaattagcaagcaaaattcactttgaaagcaccagtggttccattacattgacaactactaccaagatttagtagaaaataagtgctcaacaactaatccagattacagtatgatttagctcatcataattcagattatttttaatcatcttagccaaaactgtaaagttgccacattactaaagccacacacatcgtccctgttttgtagaaatatcacaaagaccaagaggctacagaaggaggaaatttgcaactgtctttgcaacaataaatcaggtatctattctggtgtagagataggatgttgaaagctgccctgctatcaccagtgtagaaattaagagtagtacaatacatgtacactgaaatttgccatcacgtgtttgtgtaaactcaatgtgcacattttgtatttcaaaaagaaaaaataaaagcaaaataaaatgtttataactct

SEQ ID NO: 4521 - protein, 229 aa, Homo sapiens; identical to SEQ ID NO: 496

SEQ ID NO: 4522 - DNA, 2332 bp, Homo sapiens
aagatggaggctctgtgtgagaaggaatgcagggcagcctctggttgcagagagcagcacccggtttgacagctagcaatgcaattgtgacctcagacctacaatgtcaaggaattggcttctgccaacaaccagaatgagcatgaaagtggattagtccttggaacttccagataagagcccagccagctatacttggatttcagcctgtgagattctcagcagagaacccagtcaagtgtgtccagacgtccaacctacagaactacagcgtggaagatgaactggagatggccaccgtcaggcatcggcctgaagcccttgagcttctggaagcccagagcaaatttaccaagaaagagcttcagatcctttacagaggatttaagaatgaatgccccagtggtgttgttaatgaagaaaccttcaaagagatttactcgcagttctttccacagggagactctacaacatatgcacattttctgttcaatgcatttgatacagaccacaatggagctgtgagtttcgaggatttcatcaaaggtctttccattttgctccgggggacagtacaagaaaaactcaattgggcatttaatctgtatgacataaataaagatggctacatcactaaagaggaaatgcttgatataatgaaagcaatatacgatatgatgggtaaatgtacatatcctgtcctcaaagaagatgctcccagacaacacgttgaaacattttttcagaaaatggacaaaaataaagatggggttgttaccatagatgagttcattgaaagctgccaaaaagatgaaaacataatgcgctccatgcagctctttgaaaatgtgatttaacttgtcaaatagatcctgaatccaacagacaaatgtgaactattctaccacccttaaagttggagctaccacttttagcatagattgctcagcttgacactgaagcatattatgcaaacaagctttgttttaatataaagcaatccccaaaagatttgagctttcagttataaatttgcatccttttcataatgccactgagttcaggggatggtctaactcatttcatactctgtgaatattcaaaagtaatagaatctggcatatagttttattggttccttagccatgggattattgaggctttcacatatcagtgattttaaaatatcagtgttttttgctactcatttgtatgtattcagtcctaggattttgaatggttttctaatatagtgacatctgcatttaatttccagaaattaaattaattttcatgtttgaatgctgtaattccatttaaattccatttatatactttaaggaaacaagattacaacaattaaaaaaacacatagttccagtttctatggccttcccaccttctgttagaaattagttttatctggcatttttaaacatttaaaaattattaaacatttaaaaattagtttattatcagatatcagcatatgcctaataaaacttattttaataagcatttaattttccataatatgttacagccaaggcctatataataattttggatttgttcaatctttcttacaggctgttttctattgtatcaatcattagtatcaatcattaagtggaagttgaagaaggcatcaaacaaaacaaggatgtttacagacatatgcaaagggtcaggatatctatcctccagtatatagtaatgcttaataacaagtaatcctaacagcattaaaggccaaatctgtcctctttcccctgacttccttacagcatgtttatttatattacaagccattcagggacaaagaaagaaaccttgactaccccactgtctactaagaacaaacagcaagcaaaattagcaagcaaaattcactttgaaagcaccagtggttccattacattgacaactactaccaagatttagtagaaaataagtgctcaacaactaatccagattacagtatgatttagctcatcataattcagattatttttaatcatcttagccaaaactgtaaagttgccacattactaaagccacacacatcgtccctgttttgtagaaatatcacaaagaccaagaggctacagaaggaggaaatttgcaactgtctttgcaacaataaatcaggtatctattctggtgtagagataggatgttgaaagctgccctgctatcaccagtgtagaaattaagagtagtacaatacatgtacactgaaatttgccatcacgtgtttgtgtaaactcaatgtgcacattttgtatttcaaaaagaaaaaataaaagcaaaataaaatgtttataactct

SEQ ID NO: 4523 - protein, 188 aa, Homo sapiens; identical to SEQ ID NO: 488

SEQ ID NO: 4524 - DNA, 1470 bp, Homo sapiens
gctctcctcctcccctttctccagcagtagccttcttaatgtagtttaatggctttacaaagaaagccaggcagaggagcacttctcagtggctgtggtcggaccatgacctagctgaccatgaacttggaagggcttgaaatgatagcagttctgatcgtcattgtgctttttgttaaattattggaacagtttgggctgattgaagcaggtttagaagacagcgtggaagatgaactggagatggccaccgtcaggcatcggcctgaagcccttgagcttctggaagcccagagcaaatttaccaagaaagagcttcagatcctttacagaggatttaagaatgaatgccccagtggtgttgttaatgaagaaaccttcaaagagatttactcgcagttctttccacagggagactctacaacatatgcacattttctgttcaatgcatttgatacagaccacaatggagctgtgagtttcgaggatttcatcaaaggtctttccattttgctccgggggacagtacaagaaaaactcaattgggcatttaatctgtatgacataaataaagatggctacatcactaaagaggaaatgcttgatataatgaaagcaatatacgatatgatgggtaaatgtacatatcctgtcctcaaagaagatgctcccagacaacacgttgaaacattttttcagaaaatggacaaaaataaagatggggttgttaccatagatgagttcattgaaagctgccaaaaagatgaaaacataatgcgctccatgcagctctttgaaaatgtgatttaacttgtcaaatagatcctgaatccaacagacaaatgtgaactattctaccacccttaaagttggagctaccacttttagcatagattgctcagcttgacactgaagcatattatgcaaacaagctttgttttaatataaagcaatccccaaaagatttgagctttcagttataaatttgcatccttttcataatgccactgagttcaggggatggtctaactcatttcatactctgtgaatattcaaaagtaatagaatctggcatatagttttattggttccttagccatgggattattgaggctttcacatatcagtgattttaaaatatcagtgttttttgctactcatttgtatgtattcagtcctaggattttgaatggttttctaatatagtgacatctgcatttaatttccagaaattaaattaattttcatgtttgaatgctgtaattccatttaaattccatttatatactttaaggaaacaagattacaacaattaaaaaaacacatagttccagtttctatggccttcccaccttctgttagaaattagttttatctggcatttttaaacatttaaaaattattaaacatttaaaaattagtttattatcagatatcagcatatgcctaataaaacttattttaataagc

SEQ ID NO: 4525 - protein, 229 aa, Homo sapiens; identical to SEQ ID NO: 496

SEQ ID NO: 4526 - DNA, 1517 bp, Homo sapiens
aagatggaggctctgtgtgagaaggaatgcagggcagcctctggttgcagagagcagcacccggtttgacagctagcaatgcaattgtgacctcagacctacaatgtcaaggaattggcttctgccaacaaccagaatgagcatgaaagtggattagtccttggaacttccagataagagcccagccagctatacttggatttcagcctgtgagattctcagcagagaacccagtcaagtgtgtccagacgtccaacctacagaactacagcgtggaagatgaactggagatggccaccgtcaggcatcggcctgaagcccttgagcttctggaagcccagagcaaatttaccaagaaagagcttcagatcctttacagaggatttaagaatgaatgccccagtggtgttgttaatgaagaaaccttcaaagagatttactcgcagttctttccacagggagactctacaacatatgcacattttctgttcaatgcatttgatacagaccacaatggagctgtgagtttcgaggatttcatcaaaggtctttccattttgctccgggggacagtacaagaaaaactcaattgggcatttaatctgtatgacataaataaagatggctacatcactaaagaggaaatgcttgatataatgaaagcaatatacgatatgatgggtaaatgtacatatcctgtcctcaaagaagatgctcccagacaacacgttgaaacattttttcagaaaatggacaaaaataaagatggggttgttaccatagatgagttcattgaaagctgccaaaaagatgaaaacataatgcgctccatgcagctctttgaaaatgtgatttaacttgtcaaatagatcctgaatccaacagacaaatgtgaactattctaccacccttaaagttggagctaccacttttagcatagattgctcagcttgacactgaagcatattatgcaaacaagctttgttttaatataaagcaatccccaaaagatttgagctttcagttataaatttgcatccttttcataatgccactgagttcaggggatggtctaactcatttcatactctgtgaatattcaaaagtaatagaatctggcatatagttttattggttccttagccatgggattattgaggctttcacatatcagtgattttaaaatatcagtgttttttgctactcatttgtatgtattcagtcctaggattttgaatggttttctaatatagtgacatctgcatttaatttccagaaattaaattaattttcatgtttgaatgctgtaattccatttaaattccatttatatactttaaggaaacaagattacaacaattaaaaaaacacatagttccagtttctatggccttcccaccttctgttagaaattagttttatctggcatttttaaacatttaaaaattattaaacatttaaaaattagtttattatcagatatcagcatatgcctaataaaacttattttaataagc

SEQ ID NO: 4527 - protein, 188 aa, Homo sapiens; identical to SEQ ID NO: 488

SEQ ID NO: 4528 - DNA, 4521 bp, Homo sapiens
cggcaggtggccccgcgcgcggcggccggcccggccgggggcgggcgggaaggtggcgcctcgggcgggggccggtccctgcaccaggtgacctgttccggcccggatccgggcggcctcgccatgcagcggcgcggcgcggggctcgggtggccgcggcagcagcagcagcaacccccgccgctcgcggtcggcccccgggccgcagccatggtcccgagtggcggcgtcccccagggcctcggcggccgctctgcctgcgcgctgctcctgctctgctacctgaatgttgtaccatctttgggtaggcagacttccctgacgacatcagtgatacccaaagctgagcagagcgtggcttacaaagactttatttattttactgtctttgaaggaaacgttcgcaacgtttctgaagtctcggttgagtatttatgctctcagccttgtgttgtcaatttggaagcagttgtttcatctgagttcagaagtagcattcccgtgtacaaaaaaaggtggaagaatgagaaacatcttcacaccagcaggacacaaatagtacatgtgaaatttccaagcattatggtttacagagatgattatttcatcagacattccatctctgtatctgcagtgatagtacgcgcctggattactcacaaatacagtggcagagactggaatgttaaatgggaggaaaacttgctccatgctgtagcaaagaattataccctcctgcagaccatcccgccttttgaacgccctttcaaagatcatcaagtgtgccttgagtggaacatgggttatatttggaaccttcgggcaaacaggattccacagtgtcctctggaaaatgatgtggttgccctgcttggctttccttatgcctccagtggagaaaacacaggcattgtcaagaagttcccgaggtttcggaaccgagagctggaggccactcgacgccagaggatggattacccagtgtttactgtttcattgtggctttatttactccattattgcaaggccaacctctgtgggattctgtactttgttgactctaatgagatgtacggcacaccttctgtatttcttacggaagagggctatttgcatattcagatgcatcttgtcaaaggggaagaccttgctgtaaaaactaaattcatcatacctttgaaggagtggtttcgactggatatctcttttaacggaggccagatagtagtaaccactagcattggacaggatttgaaaagctaccacaatcagaccattagcttccgggaggatttccattataatgacacagctgggtacttcattattggagggagcaggtatgtggctggcattgaagggttttttggacccctgaagtactatcgccttcgcagtctgcaccccgcccagatttttaatcccctccttgagaagcaacttgctgaacaaatcaagttatattatgaaaggtgtgctgaggttcaagaaatagtatctgtgtatgcatctgcagcaaagcacgggggcgagagacaagaagcatgccacctccacaactcctacctggacctccagcgcaggtatgggagaccctcgatgtgcagagccttcccctgggagaaggagctgaaagacaaacaccccagcttgttccaggcattgctggagatggatctgctgaccgtgccaaggaaccaaaatgaatctgtatcagaaatcggtgggaagatatttgagaaggctgtaaagagactctctagcattgatggtcttcaccaaattagctctatcgtcccctttctgacggattccagctgctgtggataccataaagcatcctactaccttgcagtcttttatgagactggattaaatgttcctcgggatcagctgcagggcatgttgtatagtttggttggaggccaggggagtgagaggctgtcttcaatgaatcttgggtataaacactaccagggtattgacaactaccccctggactgggaactgtcgtatgcctactacagcaacattgccaccaagacaccccttgaccagcacacactgcaaggagatcaggcatatgttgaaacaattagactaaaagatgatgaaatactcaaggtacaaaccaaagaagatggagatgtctttatgtggttgaagcatgaagctacccgaggcaatgcagcagctcagcaacgattggcccagatgctgttctgggggcagcaaggtgtggccaagaatcccgaagcagcaattgagtggtacgccaagggcgccctggagacggaggatcctgcgttaatctatgactatgccattgtgctattcaagggtcaaggagtaaaaaagaacagacggcttgccttagagctgatgaagaaagcagcttccaagggattgcatcaggcagtcaatggcctgggatggtattaccacaaattcaagaaaaattacgccaaagcagcaaagtactggttaaaagcagaagaaatggggaacccagatgcgtcatacaatcttggagtcctgcatttggatggcatcttccctggagttcctggaaggaatcaaactttagctggtgaatatttccataaggctgcgcaaggtggacacatggaagggaccttgtggtgttctctctactatatcacaggcaacctggagacattccctagagatcctgagaaagctgttgtatgggcaaaacatgtagctgagaaaaatggctacttgggccatgtcatccgcaaaggcctcaatgcctacctggaaggttcatggcatgaagctttgctgtattatgttttagcagcagaaactggaattgaagtgtcacagacaaatttagcacacatctgtgaggagaggccagacctggccaggagatacttgggtgttaactgtgtttggagatactataatttctctgtttttcaaatcgatgctccttcctttgcatatttgaagatgggagacctttactactatggccaccaaaaccagtcacaagacctggagttgtctgtgcagatgtacgcccaagccgccctggatggagactcccagggattttttaacctggccctgctaatcgaggaaggtacgataatcccacaccatatcttggatttcttggaaattgactcaactctccattctaataacatctccattctccaggaactgtacgaaaggtgctggagccacagtaacgaggagtccttcagcccctgctccttggcctggctttacctgcacttgcggcttctctggggtgctatcctgcactcagccctgatctactttctgggaacctttctgctatccatattgatcgcctggactgtgcagtatttccagtctgtctcagcaagcgatccccctccaagaccatcccaggcctccccagacactgccacgtccactgcaagtccagctgtgactccagctgcagatgcctctgaccaagaccagcccacagtaactaataacccggagccacgtgggtgaactgtgcactccagttctctccagatgagagagaatcttttcaacagctggtattgggaagctggggccagggcatgatcctgataaacaccttaaatgtcttgtcaactggatgcaaattttgcaattggtgtcattttttttaaagtcaaattacaaggaagtacccagatcaggcagtggtaataccaaaggtcatcaaacacatacaaggaacatcttgatcatagggcatgtggggaagtttactgggccatcacagacttttgttctagtgattgtatgtattaggagtcatagcatgccctacggcagatctggattcttatacactaagatgtgtcttaagaatcacagtgcgtgcttcatccctttattgaagaacagaaaattatgactactctacaaggtggataatattttggtacctgtgcttgccacagccctgttcctcaaagctgaattgatagatttctctttgacttccaagacctagcagttataaggcaccttgaaataaattgtttgtgcctggaaatgcagggagggcaatagctttgtaaattggtttacatttttctccttgaatttttctagggtcctagtgcttccgaatcatttaatggcattgtcggatatcttttacatttcaattgcaatccatgaaattacatttagaagattcttagtacttaactgtagtcttctccatgaattacacgttagaatagactggcagcaacggaatatgcagcaagtaagcctctagcttatagtttcatccctacccctcatgcctgcgtgagtctgtacagggatatgtgtgtgtgtgtgtgtgtgtgtgtgttagagaggaagaggaagagcagaatgtctgtatactacatgctgctaaggtagtgaataaatcagtaatgcaatattgtgggtccaaactactctttgcactactttatttacagtagtaaataaaattatttttatacaattgactaccag

SEQ ID NO: 4529 - protein, 1132 aa, Homo sapiens; identical to SEQ ID NO: 498

SEQ ID NO: 4530 - DNA, 4376 bp, Homo sapiens
tcaaaatccatcctgaaggcctgggagccgggcagctgcgcggcacaactccagggggcacactcgccctgcgccctgcgggaatggcgccccggccaaaaaagcaaccagacaaaaacccattgcacgggcgggaactgaatgttgtaccatctttgggtaggcagacttccctgacgacatcagtgatacccaaagctgagcagagcgtggcttacaaagactttatttattttactgtctttgaaggaaacgttcgcaacgtttctgaagtctcggttgagtatttatgctctcagccttgtgttgtcaatttggaagcagttgtttcatctgagttcagaagtagcattcccgtgtacaaaaaaaggtggaagaatgagaaacatcttcacaccagcaggacacaaatagtacatgtgaaatttccaagcattatggtttacagagatgattatttcatcagacattccatctctgtatctgcagtgatagtacgcgcctggattactcacaaatacagtggcagagactggaatgttaaatgggaggaaaacttgctccatgctgtagcaaagaattataccctcctgcagaccatcccgccttttgaacgccctttcaaagatcatcaagtgtgccttgagtggaacatgggttatatttggaaccttcgggcaaacaggattccacagtgtcctctggaaaatgatgtggttgccctgcttggctttccttatgcctccagtggagaaaacacaggcattgtcaagaagttcccgaggtttcggaaccgagagctggaggccactcgacgccagaggatggattacccagtgtttactgtttcattgtggctttatttactccattattgcaaggccaacctctgtgggattctgtactttgttgactctaatgagatgtacggcacaccttctgtatttcttacggaagagggctatttgcatattcagatgcatcttgtcaaaggggaagaccttgctgtaaaaactaaattcatcatacctttgaaggagtggtttcgactggatatctcttttaacggaggccagatagtagtaaccactagcattggacaggatttgaaaagctaccacaatcagaccattagcttccgggaggatttccattataatgacacagctgggtacttcattattggagggagcaggtatgtggctggcattgaagggttttttggacccctgaagtactatcgccttcgcagtctgcaccccgcccagatttttaatcccctccttgagaagcaacttgctgaacaaatcaagttatattatgaaaggtgtgctgaggttcaagaaatagtatctgtgtatgcatctgcagcaaagcacgggggcgagagacaagaagcatgccacctccacaactcctacctggacctccagcgcaggtatgggagaccctcgatgtgcagagccttcccctgggagaaggagctgaaagacaaacaccccagcttgttccaggcattgctggagatggatctgctgaccgtgccaaggaaccaaaatgaatctgtatcagaaatcggtgggaagatatttgagaaggctgtaaagagactctctagcattgatggtcttcaccaaattagctctatcgtcccctttctgacggattccagctgctgtggataccataaagcatcctactaccttgcagtcttttatgagactggattaaatgttcctcgggatcagctgcagggcatgttgtatagtttggttggaggccaggggagtgagaggctgtcttcaatgaatcttgggtataaacactaccagggtattgacaactaccccctggactgggaactgtcgtatgcctactacagcaacattgccaccaagacaccccttgaccagcacacactgcaaggagatcaggcatatgttgaaacaattagactaaaagatgatgaaatactcaaggtacaaaccaaagaagatggagatgtctttatgtggttgaagcatgaagctacccgaggcaatgcagcagctcagcaacgattggcccagatgctgttctgggggcagcaaggtgtggccaagaatcccgaagcagcaattgagtggtacgccaagggcgccctggagacggaggatcctgcgttaatctatgactatgccattgtgctattcaagggtcaaggagtaaaaaagaacagacggcttgccttagagctgatgaagaaagcagcttccaagggattgcatcaggcagtcaatggcctgggatggtattaccacaaattcaagaaaaattacgccaaagcagcaaagtactggttaaaagcagaagaaatggggaacccagatgcgtcatacaatcttggagtcctgcatttggatggcatcttccctggagttcctggaaggaatcaaactttagctggtgaatatttccataaggctgcgcaaggtggacacatggaagggaccttgtggtgttctctctactatatcacaggcaacctggagacattccctagagatcctgagaaagctgttgtatgggcaaaacatgtagctgagaaaaatggctacttgggccatgtcatccgcaaaggcctcaatgcctacctggaaggttcatggcatgaagctttgctgtattatgttttagcagcagaaactggaattgaagtgtcacagacaaatttagcacacatctgtgaggagaggccagacctggccaggagatacttgggtgttaactgtgtttggagatactataatttctctgtttttcaaatcgatgctccttcctttgcatatttgaagatgggagacctttactactatggccaccaaaaccagtcacaagacctggagttgtctgtgcagatgtacgcccaagccgccctggatggagactcccagggattttttaacctggccctgctaatcgaggaaggtacgataatcccacaccatatcttggatttcttggaaattgactcaactctccattctaataacatctccattctccaggaactgtacgaaaggtgctggagccacagtaacgaggagtccttcagcccctgctccttggcctggctttacctgcacttgcggcttctctggggtgctatcctgcactcagccctgatctactttctgggaacctttctgctatccatattgatcgcctggactgtgcagtatttccagtctgtctcagcaagcgatccccctccaagaccatcccaggcctccccagacactgccacgtccactgcaagtccagctgtgactccagctgcagatgcctctgaccaagaccagcccacagtaactaataacccggagccacgtgggtgaactgtgcactccagttctctccagatgagagagaatcttttcaacagctggtattgggaagctggggccagggcatgatcctgataaacaccttaaatgtcttgtcaactggatgcaaattttgcaattggtgtcattttttttaaagtcaaattacaaggaagtacccagatcaggcagtggtaataccaaaggtcatcaaacacatacaaggaacatcttgatcatagggcatgtggggaagtttactgggccatcacagacttttgttctagtgattgtatgtattaggagtcatagcatgccctacggcagatctggattcttatacactaagatgtgtcttaagaatcacagtgcgtgcttcatccctttattgaagaacagaaaattatgactactctacaaggtggataatattttggtacctgtgcttgccacagccctgttcctcaaagctgaattgatagatttctctttgacttccaagacctagcagttataaggcaccttgaaataaattgtttgtgcctggaaatgcagggagggcaatagctttgtaaattggtttacatttttctccttgaatttttctagggtcctagtgcttccgaatcatttaatggcattgtcggatatcttttacatttcaattgcaatccatgaaattacatttagaagattcttagtacttaactgtagtcttctccatgaattacacgttagaatagactggcagcaacggaatatgcagcaagtaagcctctagcttatagtttcatccctacccctcatgcctgcgtgagtctgtacagggatatgtgtgtgtgtgtgtgtgtgtgtgtgttagagaggaagaggaagagcagaatgtctgtatactacatgctgctaaggtagtgaataaatcagtaatgcaatattgtgggtccaaactactctttgcactactttatttacagtagtaaataaaattatttttatacaattgactaccag

SEQ ID NO: 4531 - protein, 1097 aa, Homo sapiens
MAPRPKKQPDKNPLHGRELNVVPSLGRQTSLTTSVIPKAEQSVAYKDFIYFTVFEGNVRNVSEVSVEYLCSQPCVVNLEAVVSSEFRSSIPVYKKRWKNEKHLHTSRTQIVHVKFPSIMVYRDDYFIRHSISVSAVIVRAWITHKYSGRDWNVKWEENLLHAVAKNYTLLQTIPPFERPFKDHQVCLEWNMGYIWNLRANRIPQCPLENDVVALLGFPYASSGENTGIVKKFPRFRNRELEATRRQRMDYPVFTVSLWLYLLHYCKANLCGILYFVDSNEMYGTPSVFLTEEGYLHIQMHLVKGEDLAVKTKFIIPLKEWFRLDISFNGGQIVVTTSIGQDLKSYHNQTISFREDFHYNDTAGYFIIGGSRYVAGIEGFFGPLKYYRLRSLHPAQIFNPLLEKQLAEQIKLYYERCAEVQEIVSVYASAAKHGGERQEACHLHNSYLDLQRRYGRPSMCRAFPWEKELKDKHPSLFQALLEMDLLTVPRNQNESVSEIGGKIFEKAVKRLSSIDGLHQISSIVPFLTDSSCCGYHKASYYLAVFYETGLNVPRDQLQGMLYSLVGGQGSERLSSMNLGYKHYQGIDNYPLDWELSYAYYSNIATKTPLDQHTLQGDQAYVETIRLKDDEILKVQTKEDGDVFMWLKHEATRGNAAAQQRLAQMLFWGQQGVAKNPEAAIEWYAKGALETEDPALIYDYAIVLFKGQGVKKNRRLALELMKKAASKGLHQAVNGLGWYYHKFKKNYAKAAKYWLKAEEMGNPDASYNLGVLHLDGIFPGVPGRNQTLAGEYFHKAAQGGHMEGTLWCSLYYITGNLETFPRDPEKAVVWAKHVAEKNGYLGHVIRKGLNAYLEGSWHEALLYYVLAAETGIEVSQTNLAHICEERPDLARRYLGVNCVWRYYNFSVFQIDAPSFAYLKMGDLYYYGHQNQSQDLELSVQMYAQAALDGDSQGFFNLALLIEEGTIIPHHILDFLEIDSTLHSNNISILQELYERCWSHSNEESFSPCSLAWLYLHLRLLWGAILHSALIYFLGTFLLSILIAWTVQYFQSVSASDPPPRPSQASPDTATSTASPAVTPAADASDQDQPTVTNNPEPRG

SEQ ID NO: 4532 - DNA, 462 bp, Homo sapiens
ggaaggaagggaggaacaagttttatagacttctatcgtccaatcattgtgtaaaccaggaggaagtgttacagaattctcaaacatttccattgaggaaacactgaaatccatcagaaagagatgtctaaaaaggcatgtgagatccatagaaacactgaacagaaatctacctctgggccgagcacagtggctcatgcctgtaatcctagcactttgggagggacagcaggggcttcactagcactggccatgtttatttttttaagtagagtgatagctttatggctgttcattttattgtcactctttggaggttatgtatgtatcatatatacttcatacatatcaatgattacatgataaaagaagagaaaagccaccctactgactcatgccacatcttccgttcaaatgctcggctccttttgaactaactcccctttcaggctctcccttcta

SEQ ID NO: 4533 - protein, 79 aa, Homo sapiens
MSKKACEIHRNTEQKSTSGPSTVAHACNPSTLGGTAGASLALAMFIFLSRVIALWLFILLSLFGGYVCIIYTSYISMIT

SEQ ID NO: 4534 - DNA, 344 bp, Homo sapiens
aatctgggcacagaccactctatctggtccacgcttggccaagcttatggccagtgtgtatggagggcaacccatgagcgggtgcttcagcttaaactccagaggacactgtcctgggtggggagcctggaattgtgctgaagcctgagctgccctgagaaggagttctcagctgaaggttttctgttcatctgtttggcaaatgagtggtggagcctagttttgaacctagaaccagaaataacatttgacccagcaatcccattaccgggtatatatccaaaggaatataaatcattctattacaaagatacatgtgtgcatatgttcactgtagcaatagc

SEQ ID NO: 4535 - protein, 33 aa, Homo sapiens
MASVYGGQPMSGCFSLNSRGHCPGWGAWNCAEA

SEQ ID NO: 4536 - DNA, 8403 bp, Homo sapiens
gcgggccgaatgcaggtgagaaaaggcacggactctgcggctgcgaacccaaacttgggcaccgcacggtgcgcactgctcagccttcgcccccgtgggcgaaaggctgctgcggtttcaggcggctgcttcgtgactaatgaccttgcgcagagttgttaagaaaaaagagaaacccgcgctctccggggtgagaagggactgactctgggcgtctctgaagatggctcgggcttctctttggcgcgccggggggaccctgacactgaccgctctgtgacgcgagtagtctcccctgcaccgtgcccgaagcgacgtgccgggggatttttcattctcgatctgttgactggctcccccgctgcatgagcagagtcggagttgagactggcttgttgctggccccagcgcctggtgcaggaagcgactcacgtttgtctgggtggccggagccggagcagagcctgggtttggagtgagtgcctggaacgtgaattggactcaactcgagtagcagcaaagaccagcgggctggcaggcgggggaggctgcaggctcattccccacctcttcccagccccactgcccgtctgccggagcggttctggccccttccgacagagcggggactagagccggggattctccgcccgctgaggggatgactctgggttgggggagcgccgaacccgcggcgcgcagtgtcccgtgaactgtgagtactgcgactgaacggcggcaggcgagcgggcgattagcacccattgcatgaattatgaaacaataactttcggaagaagcaggaggaaaaaaagaagcatctatcgctgccctcccacccccattcccggccaactctccacgccgcttttgccccctccctcccctccctctcgctccttcctttccgggagaggggagaggactcgggggagggcaggcggccggccccggaggaggggggcgccgagggggctgtggttagaaggagcagtagcagcagcagcaggagaagatgctgaggatgcggaccgcgggatgggcgcgcggctggtgcttgggctgctgcctcctcctgccgctctcgctcagcctggcggccgccaagcagctcctccggtaccggctggccgaggagggccccgccgacgtccgcatcggcaacgtggcttcagacctgggcatcgtgaccggatcgggtgaggtgactttcagcctggagtccggttccgagtacctgaagatcgacaacctcactggcgagctgagcacgagcgagcggcgcatcgaccgcgagaagctgccccagtgtcagatgatcttcgacgagaacgagtgcttcctggacttcgaggtgtcggtgatcgggccctcgcagagctgggtggacctgtttgagggtcaggtcatcgtgcttgacatcaacgacaacacgcccaccttcccgtcgcccgtgctcacgctcacggtggaggagaatcggccggtgggcacactttacctgctgcccacagccaccgaccgcgacttcggccgcaacggcatcgagcgctacgagctgctccaggagcctgttcgagctgcaggtggcggacaccccggacggcgagaagcagccgcagctgatcgtgaagagcgtgtacgaggccgacttggctgagaacagcgccccggggacccccatcctgcaactgcgcgcagccgacttggacgtgggggtcaacgggcagatcgaatacgtgttcggggcggccaccgagtcggtgaggcggctgctgcgccttgacgagacgtccggctggctcagcgtcctgcaccggatcgaccgcgaggaggtgaaccagctgcgcttcacggtcatggcccgcgaccgcgggcagccccccaagaccgacaaggccaccgtggtccttaacatcaaagacgagaacgacaacgtgccgtccattgaaatccgcaagattgggcgcatccccctcaaggacggggtggccaacgtggccgaggacgttctggtcgacacccccatcgctctggtgcaggtgtccgaccgagaccaaggcgagaacggggtggtcacctgcaccgtggtgggcgacgtgcccttccagctcaagccagccagcgacaccgagggcgaccagaacaagaaaaagtacttcttgcacacctcgacccctctggactatgaggccacccgggagttcaacgtggtcatcgtggcggtggactcaggcagccccagcctctcgagcaacaactccctgattgtcaaggtgggagacaccaacgacaacccgcccatgttcggccagtcggtggtggaggtttacttccctgagaacaacatcccgggcgagagggtggccacggtgctggcgacagacgcagacagcggtaagaacgccgagatcgcctactcgctggactcctctgtgatggggatctttgccatcgatcccgattctggggacatcctggtcaataccgtgctggaccgcgagcagactgacaggtatgagtttaaagttaacgccaaagacaaaggcatccccgtgctgcagggcagcactacggtgattgtgcaggtggctgataaaaatgacaatgaccctaagtttatgcaggacgtcttcaccttttatgtgaaagaaaacttgcagcccaacagccctgtggggatggtcaccgtgatggatgctgacaaggggcggaatgcagagatgagcctgtacatagaggagaacaataacattttttctattgaaaatgacacggggaccatttactccacaatgtcttttgaccgggaacatcagaccacatacactttcagagtcaaggctgtggatgggggagatcctcccagatctgccacagctacagtctcgctttttgtgatggatgaaaatgacaatgctcccacagttacccttcccaaaaacatttcctacactttactgccaccttcgagtaatgtcaggacagtagtagctacagtgttggcaacagacagtgatgatggcatcaatgcagacctgaactacagcattgtgggaggaaatcccttcaagctgtttgaaattgatcccactagtggtgtggtttccttagtgggaaaactcacccaaaagcattatggcttgcacaggttggtggtgcaagtgaatgacagtgggcagccttcccagtccaccacgactctggtgcacgtgtttgtcaatgaaagtgtttctaatgcaactgcgattgactcccagatagctagaagtttgcacatcccactcacccaggatatagctggtgacccaagctatgaaattagcaaacagagactcagtattgtcattggcgtggttgctggcattatgacggtgattctaatcatcttaattgtagtgatggcaaggtactgcaggtccaaaaataaaaatggctatgaagccggcaaaaaagatcacgaagacttttttacaccccaacagcatgacaaatctaaaaagcctaaaaaggacaagaaaaacaaaaaatctaagcagcctctctacagcagcattgtcactgtggaggcttctaagccaaatggacagaggtatgatagtgtcaatgagaagctgtcagacagcccaagcatggggcgatacaggtccgttaatggtgggcccggcagtcctgacctggcaaggcattacaaatctagttccccattgcctactgttcagcttcatccccagtcaccaactgcaggaaaaaaacaccaggccgtacaagatctaccaccagccaacacatttgtgggagcaggagacaacatttcaattggatcagatcactgctctgagtacagctgtcaaaccaataacaagtacagcaaacagccatttcgtagagtgacgttttctgttgtgagtcagcctcaggacccacatcaggggtcactgcagagttgctatgacagcgggctggaggagtcagaaacaccaagcagtaagagttcatcagggccaagactgggtgcgcttccactcccagaggacaactatgaaaggaccacgccggatggcagtgttgattcaaggcctcttccagatgtagccctgactgggaagtgcactcgtgagtgtgatgagtatggccactcagactcctgctggatgccggtccgcacttctccggagaggaagaagagccagcctaaactgtccactttcatgcctgttgatgaacgaggaagccaggaaaagctggccaatggggaggccgccatcatgggtgaccgcaacagaaacctcctgaacaaaaagttgacctcatcctatgagaccttcagtgcagctagtttcagcaaaaatgaggaagccaaccctgaggatattccccttacaaaaacaggggaatataagccatctcctgtcaatactctcactagaagagaagtttacctgtaggctataaaggagcaacagcaaagttctttacatgtatgaaaaggagaataaggggcaaaaaccttacaaagcaaaacgtttaatcacaaagagggggctaccaaagagacaaagctttgcctgccacttctgcctccagatcaggcctttagtgatactgttagcctgattctactgtacaatgtagaaaccatccttgttacttgcatgtctaaccccttcactgattcccaacactcactttctcttccccacccctctccaaaaaaaaaaaaacaaaaagaaaagaaaaaaaaagggggatagttgcaagtttctttcacagtaactgtacgaagcctgattagcagaacacaacacaccctcattatccctaagctgaagcatgattttagtcactttgattttgttcgagtgtcatctggctggtcaaaaataagcaggacagataaaatgtatttcagacataccatcagaaaatggtttatcaccatcaaaggcaatcctttgaaagtgatagagtccctctaaaggtacagtccttagaaagagggactgtattaaaaagtattttgggaatatcaaagctttaatattccaacaaagactaagagaaaaacaatactcagtgggtgattgcagtcctaaattgtcatatgttgttattttcaggtcaagagcatcaacttcaattccatacattcaccaaatattctcagtatacacacagtcttgattacatgtatcaatttcaccagttatgacttctaaaaattatatatattttttcagaacaagaccactattattaactaacttgaacaattgtatcatccaaaggccaaagatcatatggcagatcagggaagtcatgaagttgatttggtcttgacgtggaaaaccattaaacaacaaaagcaactgaacccatgtatgcacagaaacaatcaaacactagttcattttatagtgcccaggaaaatgttccttcttttaaaatggattttatttgaaagcgcagaaaatgaaaactagtgagatatatttttggtattataataggcaattggttgaggttcaagtttagtttcaggtaatattatcagggaagattccatgttttaaaatagtatttatggatcatgggtaggttaagaaagatgcattggcatatagtcttgatagttaagtccacgattatcattttagaatccaggctatgcttgctgctctttttatccacattttaaattacaattgcattttttacttgttcagtgcacactttgatgcaccacaagtgcattaattttgaatcgtgtgcaatatagaaatattttgagactcacaacattgaaacaaggtgacaccctagttgactttatcactaatgtgatttgaacattatttaaacaaatctagactgaacatgaaagaaaggagttttgggcagtgacatttttcacagaatgtatatctcaaaggtgaaagcagagtttttccagtgcaataaaaagaaacagaatatgcagattttgagctactcactctatagaggataacctaacacggctgaaaattgagctgggacattcagacgaaagtgacaatccatggacagaatagggaataacaggtgtgaagagaacaaacttatcactgaatgtttgcaagctggttaaggcatagccttgatggctctctagcaaactgtagaaacaatgtagctttgggtagtttcatgctttgcagaatttcttagactataaagtgacacagcctggaatataggttgataattcactataggtcttcaaaatacttatctttgaaaaccgcttctctgtttggtggggtacaatttgggggtcatttccttatgctctttcttaaatggagttttcattttgatgttagtttatgtataataggtaggatgcaaaaagatatgtaattgaaacaaaaaacattggactaaaatatcagtaattgaacatgtttatgtttgattattatttacactatggaaagatgcaattctagtactttgttaggaaactgcattaaagcagttctgccttgtataatctgtaagtacctattaagacaaaatacttctaaagatacttatgaaatgtatacacattttttcttgcacgttacaaagaaaatactcaattgcataacacggatgtttgacaaacttttttttttttaatgcatttctttctttcatgagacattgaaaccactgatagctcatttcaccctatcttaaacccttctcttgtctataaaactaatacgggtcacaccggaccttcggattaattggatccacattccccaatgatgtttgcaccccattcaagatagccatgccattgtcatttaactcgtgaacctctctttaaaactaaaatggatgtgaaagaataaaattcagtgtactgtaagtattcacagtaattctagtagaattagctgtcataacatgtttattatataatgagctggcatgacacagaaatatattttgtgtttgtatgacttttattttaaataggttaaatctggtgccactccatatatagagtgcttttgaaaaaaaatcaataaaaagaaacaaaaaaaataaatgagtgaatgcaaaataagcaactgtgccttttatacctgttgttacggtaaaaaaacggttgttgggtttggacaatgaggggaaatgggctattcccaacttttttgatcctgtatatttgtccatgtttattttctgaacataataaataatatattaaaaatttgccttctgacaaactcagataatggaccagtcttaaatattgttatgtcataaagcaaagttaaggcattaatatgggctgcttaaatctgactagaagatgaaagcgtttattgtaagtgtaacacagagatactatcaggagtgaaatcagtccatttggcaaggtaaaatactgatttagagttttattctttatttcttttttgttgtgtttctttcagctatggtttcattttggttgtacagtatataaaccatatttgttttctgtacacaagactctcaagtgaattttgcatgcattatacattaggacacatttataaattaatgagtaactatataaatttatgtgtattaaaacgtctgtagcttcaatctaaaatctactgctctttctgaatctccagatatcatttctgtatggtttctgactggcctgctgcctgagtttcagaaaacaagggaggcattatttttatgggaggaggaactaagatggtactgaggatgtctgactgaaacactaccctaggaagctgtcttgtaggaaaatagaataaaacacacagaccagaagaaattgtcaagaagcaaacagccatccaaaaacagtcatgagaaatctaaagacctaaataatcttaggtatatgctctcagtgagaaataagaaaatgtgtccttaagcaaaaataaataaataaataaataaataaataaataataaaaagtgagcatgatcatgaatatagtaaatcttgtgagttgtgacctaggtgaaggtgtaatgataacatctggaggaagcatcatttgttcagctacctagggtttactttcagacttttcctacagtttaaagcacttgcgttcagtgtggtacgatctgtttgtaatgttaatcattgactattgttctgctacttggatgttgatagtgaagcagagaacaatttatcatcgtttattatgagtcactatgcacgcaactatgcttaacatggcgaaatgtattaaacactcgtccaactatttatgaaatactttgcataatttaatttgcttttgtacagttttatgtaaataaattgcttgtcatttttgtctctgcaaattaaaatataacatggtcaaatggtttcac

SEQ ID NO: 4537 - protein, 862 aa, Homo sapiens
MARDRGQPPKTDKATVVLNIKDENDNVPSIEIRKIGRIPLKDGVANVAEDVLVDTPIALVQVSDRDQGENGVVTCTVVGDVPFQLKPASDTEGDQNKKKYFLHTSTPLDYEATREFNVVIVAVDSGSPSLSSNNSLIVKVGDTNDNPPMFGQSVVEVYFPENNIPGERVATVLATDADSGKNAEIAYSLDSSVMGIFAIDPDSGDILVNTVLDREQTDRYEFKVNAKDKGIPVLQGSTTVIVQVADKNDNDPKFMQDVFTFYVKENLQPNSPVGMVTVMDADKGRNAEMSLYIEENNNIFSIENDTGTIYSTMSFDREHQTTYTFRVKAVDGGDPPRSATATVSLFVMDENDNAPTVTLPKNISYTLLPPSSNVRTVVATVLATDSDDGINADLNYSIVGGNPFKLFEIDPTSGVVSLVGKLTQKHYGLHRLVVQVNDSGQPSQSTTTLVHVFVNESVSNATAIDSQIARSLHIPLTQDIAGDPSYEISKQRLSIVIGVVAGIMTVILIILIVVMARYCRSKNKNGYEAGKKDHEDFFTPQQHDKSKKPKKDKKNKKSKQPLYSSIVTVEASKPNGQRYDSVNEKLSDSPSMGRYRSVNGGPGSPDLARHYKSSSPLPTVQLHPQSPTAGKKHQAVQDLPPANTFVGAGDNISIGSDHCSEYSCQTNNKYSKQPFRRVTFSVVSQPQDPHQGSLQSCYDSGLEESETPSSKSSSGPRLGALPLPEDNYERTTPDGSVDSRPLPDVALTGKCTRECDEYGHSDSCWMPVRTSPERKKSQPKLSTFMPVDERGSQEKLANGEAAIMGDRNRNLLNKKLTSSYETFSAASFSKNEEANPEDIPLTKTGEYKPSPVNTLTRREVYL

SEQ ID NO: 4538 - DNA, 4971 bp, Homo sapiens
gcaactgcgattgactcccagatagctagaagtttgcacatcccactcacccaggatatagctggtgacccaagctatgaaattagcaaacagagactcagtattgtcattggcgtggttgctggcattatgacggtgattctaatcatcttaattgtagtgatggcaaggtactgcaggtccaaaaataaaaatggctatgaagccggcaaaaaagatcacgaagacttttttacaccccaacagcatgacaaatctaaaaagcctaaaaaggacaagaaaaacaaaaaatctaagcagcctctctacagcagcattgtcactgtggaggcttctaagccaaatggacagaggtatgatagtgtcaatgagaagctgtcagacagcccaagcatggggcgatacaggtccgttaatggtgggcccggcagtcctgacctggcaaggcattacaaatctagttccccattgcctactgttcagcttcatccccagtcaccaactgcaggaaaaaaacaccaggccgtacaagatctaccaccagccaacacatttgtgggagcaggagacaacatttcaattggatcagatcactgctctgagtacagctgtcaaaccaataacaagtacagcaaacagattcaaggcctcttccagatgtagccctgactgggaagtgcactcgtgagtgtgatgagtatggccactcagactcctgctggatgccggtccgcacttctccggagaggaagaagagccagcctaaactgtccactttcatgcctgttgatgaacgaggaagccaggaaaagctggccaatggggaggccgccatcatgggtgaccgcaacagaaacctcctgaacaaaaagttgacctcatcctatgagaccttcagtgcagctagtttcagcaaaaatgaggaagccaaccctgaggatattccccttacaaaaacaggggaatataagccatctcctgtcaatactctcactagaagagaagtttacctgtaggctataaaggagcaacagcaaagttctttacatgtatgaaaaggagaataaggggcaaaaaccttacaaagcaaaacgtttaatcacaaagagggggctaccaaagagacaaagctttgcctgccacttctgcctccagatcaggcctttagtgatactgttagcctgattctactgtacaatgtagaaaccatccttgttacttgcatgtctaaccccttcactgattcccaacactcactttctcttccccacccctctccaaaaaaaaaaaaacaaaaagaaaagaaaaaaaaagggggatagttgcaagtttctttcacagtaactgtacgaagcctgattagcagaacacaacacaccctcattatccctaagctgaagcatgattttagtcactttgattttgttcgagtgtcatctggctggtcaaaaataagcaggacagataaaatgtatttcagacataccatcagaaaatggtttatcaccatcaaaggcaatcctttgaaagtgatagagtccctctaaaggtacagtccttagaaagagggactgtattaaaaagtattttgggaatatcaaagctttaatattccaacaaagactaagagaaaaacaatactcagtgggtgattgcagtcctaaattgtcatatgttgttattttcaggtcaagagcatcaacttcaattccatacattcaccaaatattctcagtatacacacagtcttgattacatgtatcaatttcaccagttatgacttctaaaaattatatatattttttcagaacaagaccactattattaactaacttgaacaattgtatcatccaaaggccaaagatcatatggcagatcagggaagtcatgaagttgatttggtcttgacgtggaaaaccattaaacaacaaaagcaactgaacccatgtatgcacagaaacaatcaaacactagttcattttatagtgcccaggaaaatgttccttcttttaaaatggattttatttgaaagcgcagaaaatgaaaactagtgagatatatttttggtattataataggcaattggttgaggttcaagtttagtttcaggtaatattatcagggaagattccatgttttaaaatagtatttatggatcatgggtaggttaagaaagatgcattggcatatagtcttgatagttaagtccacgattatcattttagaatccaggctatgcttgctgctctttttatccacattttaaattacaattgcattttttacttgttcagtgcacactttgatgcaccacaagtgcattaattttgaatcgtgtgcaatatagaaatattttgagactcacaacattgaaacaaggtgacaccctagttgactttatcactaatgtgatttgaacattatttaaacaaatctagactgaacatgaaagaaaggagttttgggcagtgacatttttcacagaatgtatatctcaaaggtgaaagcagagtttttccagtgcaataaaaagaaacagaatatgcagattttgagctactcactctatagaggataacctaacacggctgaaaattgagctgggacattcagacgaaagtgacaatccatggacagaatagggaataacaggtgtgaagagaacaaacttatcactgaatgtttgcaagctggttaaggcatagccttgatggctctctagcaaactgtagaaacaatgtagctttgggtagtttcatgctttgcagaatttcttagactataaagtgacacagcctggaatataggttgataattcactataggtcttcaaaatacttatctttgaaaaccgcttctctgtttggtggggtacaatttgggggtcatttccttatgctctttcttaaatggagttttcattttgatgttagtttatgtataataggtaggatgcaaaaagatatgtaattgaaacaaaaaacattggactaaaatatcagtaattgaacatgtttatgtttgattattatttacactatggaaagatgcaattctagtactttgttaggaaactgcattaaagcagttctgccttgtataatctgtaagtacctattaagacaaaatacttctaaagatacttatgaaatgtatacacattttttcttgcacgttacaaagaaaatactcaattgcataacacggatgtttgacaaacttttttttttttaatgcatttctttctttcatgagacattgaaaccactgatagctcatttcaccctatcttaaacccttctcttgtctataaaactaatacgggtcacaccggaccttcggattaattggatccacattccccaatgatgtttgcaccccattcaagatagccatgccattgtcatttaactcgtgaacctctctttaaaactaaaatggatgtgaaagaataaaattcagtgtactgtaagtattcacagtaattctagtagaattagctgtcataacatgtttattatataatgagctggcatgacacagaaatatattttgtgtttgtatgacttttattttaaataggttaaatctggtgccactccatatatagagtgcttttgaaaaaaaatcaataaaaagaaacaaaaaaaataaatgagtgaatgcaaaataagcaactgtgccttttatacctgttgttacggtaaaaaaacggttgttgggtttggacaatgaggggaaatgggctattcccaacttttttgatcctgtatatttgtccatgtttattttctgaacataataaataatatattaaaaatttgccttctgacaaactcagataatggaccagtcttaaatattgttatgtcataaagcaaagttaaggcattaatatgggctgcttaaatctgactagaagatgaaagcgtttattgtaagtgtaacacagagatactatcaggagtgaaatcagtccatttggcaaggtaaaatactgatttagagttttattctttatttcttttttgttgtgtttctttcagctatggtttcattttggttgtacagtatataaaccatatttgttttctgtacacaagactctcaagtgaattttgcatgcattatacattaggacacatttataaattaatgagtaactatataaatttatgtgtattaaaacgtctgtagcttcaatctaaaatctactgctctttctgaatctccagatatcatttctgtatggtttctgactggcctgctgcctgagtttcagaaaacaagggaggcattatttttatgggaggaggaactaagatggtactgaggatgtctgactgaaacactaccctaggaagctgtcttgtaggaaaatagaataaaacacacagaccagaagaaattgtcaagaagcaaacagccatccaaaaacagtcatgagaaatctaaagacctaaataatcttaggtatatgctctcagtgagaaataagaaaatgtgtccttaagcaaaaataaataaataaataaataaataaataaataataaaaagtgagcatgatcatgaatatagtaaatcttgtgagttgtgacctaggtgaaggtgtaatgataacatctggaggaagcatcatttgttcagctacctagggtttactttcagacttttcctacagtttaaagcacttgcgttcagtgtggtacgatctgtttgtaatgttaatcattgactattgttctgctacttggatgttgatagtgaagcagagaacaatttatcatcgtttattatgagtcactatgcacgcaactatgcttaacatggcgaaatgtattaaacactcgtccaactatttatgaaatactttgcataatttaatttgcttttgtacagttttatgtaaataaattgcttgtcatttttgtctctgcaaattaaaatataacatggtcaaatggtttcac

SEQ ID NO: 4539 - protein, 177 aa, Homo sapiens
MTVILIILIVVMARYCRSKNKNGYEAGKKDHEDFFTPQQHDKSKKPKKDKKNKKSKQPLYSSIVTVEASKPNGQRYDSVNEKLSDSPSMGRYRSVNGGPGSPDLARHYKSSSPLPTVQLHPQSPTAGKKHQAVQDLPPANTFVGAGDNISIGSDHCSEYSCQTNNKYSKQIQGLFQM

SEQ ID NO: 4540 - DNA, 492 bp, Homo sapiens
ccatttcgtagagtgacgttttctgttgtgagtcagcctcaggacccacatcaggggtcactgcagagttgctatgacagcgggctggaggagtcagaaacaccaagcagtaagagttcatcagggccaagactgggtgcgcttccactcccagaggacaactatgaaaggaccacgccggatggcagtgttggtgaggcagagcatatggaaaatggtgttgctgccatcactacctttcccttcctcccctttcctcatggcaagacgcatggaagaagagtgctgttaaggcctctccattaatcaacaggtggctgaggcaggaggaacgcttgaatccagaagttctagtccagcctggggaacatagtgagaacttatctccaaaaaaaatcagttttcttttttctaggggcctatatagaattaaaataaatgtgaatacatttatttctgatatatttttggaaatattttgagacataatag

SEQ ID NO: 4541 - protein, 72 aa, Homo sapiens
MTAGWRSQKHQAVRVHQGQDWVRFHSQRTTMKGPRRMAVLVRQSIWKMVLLPSLPFPSSPFLMARRMEEECC

SEQ ID NO: 4542 - DNA, 1220 bp, Homo sapiens
agtgaggcattctgaaattttactgaagctctaaaacttaacagctatggaaatgggaaagagccgaggtcagaatgagaaacacatccccacaggatttctgaccatcagtaacatgaattagctggtgtgcactctgctctgtaaccctggaatctcctttctactcggagggaaccagatgtacagcatgaagaagtatgccctttggaaatgtaaatgaatacagttaagaggctacaccgccctttaaaggagttcttctgatctcttaggagctttacattttgaagaacatggatggatgagaaacttgatgtggattagagaaggactccttctgtcacccaggctgaggtgcaatggcctgatcacagttcactgcagccttgaattcttagactcaagctactcatccacctcagcctcccaagtagctgggactacaggctcacaccacctcacctgggtactttctctcttttaaaaattttatttgttatctttttcaattttaatgaaaattttatacatatatatgtaacccatcagttaatatactttgcttgtatatgttatataaaaggtcacttcctcttgaatttgcaaaatagttgtttgcttagcacgaatgccaacaatatttttttaaatttaaagatagcctactctcatatagagcagatttttttaatatataaaaataattccaaattttattttattttctgttgcaaaggcaaataatcttggaagtctcttttaaaagttaaatcaatgccataatatactcaaattgtcacaaagaacagtctattgtaacaccctgtgatttactgatagcaatgaagagtgtggactttggggccaggaatccttgcttcaattattagttctactacacactaaccacacgatcttaggctaatgtcttaacctcatttcctatctgcgtaattgcataagaatgctatcaactcatgagtcagtgctcctcaagtgtttatgacagcgataatgtataatacaataagaactcaccaaacgtctaagacactatttcttaaaaatcaagacagtgaaaacttcttccttagctgtccgtttttctgctacagtaggttcaaaattatttttcaggtagccctacccctgtataagctattcatctgacctctctcagaggagctggaatagtcctctcttcagaacatgtccat

SEQ ID NO: 4543 - protein, 60 aa, Homo sapiens
MRNLMWIREGLLLSPRLRCNGLITVHCSLEFLDSSYSSTSASQVAGTTGSHHLTWVLSLF

SEQ ID NO: 4544 - DNA, 4816 bp, Homo sapiens; identical to SEQ ID NO: 507

SEQ ID NO: 4545 - protein, 876 aa, Homo sapiens; identical to SEQ ID NO: 508

SEQ ID NO: 4546 - DNA, 7762 bp, Homo sapiens
gaaggtgggtaatgcccctgtcgctctgggctccagggcgcgcccccgcagcttccccagcggggtctgacgcctccgggccgaggtgcgccaggtggcgagggtgccaggcgcggccaagtcgcggcggtctgagtcagtcacccaactatgctgcggaaccagggaggccggctgggccgcccccgccgttgagctccggcttcccccgcgcggggcgcctgctccccgcccccgcgggcggagaggaagcggcggccgaggcgaggcgcgggagcacctgagcaaggcgcgggcgccgggctcggcgtttccggagctgagcgcgggtccgcggcccgcgctccccgcctccaggtgcggcggccgcgacacgccggccccactaacagcgccgcccgcgcggccgccgccaggcagcagaggcgactgcggacagccggcggggaccgggaaagaggaggcctggcgcctccggcagaggggcgaggaccgagcgcccaaggctgggagagacgccggcgctgagcttcccagcgccgcctcacctcgcttttcgaactccgcgacccgagcgcaaggcttaagcaggtaaagcagtcactgtgaagaaaataacattttaagaaacttttctgtcacaattgatagaggaaaagccagtagagaagtacatcttcttgtgtgtgtgtctcatcgtgccactttttgtaactcagcttagtaatgaagccaccattatgtcctcagtcagtgaagtaaatgtggatataaaagatttcctaatgagcattaatttggagcagtatctcttacatttccatgagtctggttttactactgtgaaggactgtgcagcaataaatgacagcctgctgcagaaaattggaatatcacctacaggtcaccgtaggaggatacttaaacagttacagataatcttgtcaaaaatgcaagatattccaatatatgcaaatgttcataaaactaagaagaatgatgacccttcaaaggattaccatgttccatcttctgatcagaatatctgcatagaactttccaattctggtagtgttcagacatctagcccaccgcagttggagactgttagaaaaaatcttgaagacagtgatgcaagtgtggaaagaagccagtatcctcaatcagatgataagctgtctcctcctaaacgcgacttccccactgcagaggaaccacacctgaatttgggttctttgaatgattctttatttggtagtgacaatattaaaatagaatcattgattacaaagaagactgtggatcacacagttgaagaacaacaaacagaaaaagttaaattgatcacagaaaatctcagtaagctccctaatgcagactctgaatgcctttcttttgttggctgttcaacatcaggaacaaattctggaaatggaacaaatggtttattagaaggatcaccaccatccccattctttaagtttcaaggagaaatgattgtaaatgacttgtatgttccatcatcaccaatcctagcacctgtgagaagtcgtagcaagttggtttcaagaccatctcgatcttttctgctaagacatcgacctgtaccagagattccagggtcaacaaaaggagtttctgggagctatttccgtgaaagaagaaatgttgctacctcaactgaaaaatctgtggcatggcaaaattcaaatgaggagaattcatcttccatctttccttatggagagacctttctcttccagagactagaaaattccaagaagcgatctataaagaatgaatttttgacccagggagaagcactcaaaggggaagcagctactgcaacaaactcttttatcatcaaatcaagcatatacgataacagaaaggagaaaataagcgaggacaaggtggaagatatttggatacctcgagaggacaaaaacaattttttgatagacactgcttctgaatcagaatactcaacagtagaagaatgctttcagagtttaagaagaaaaaattcaaaggcatctaaatctaggactcaaaaagccttgattttggactccgttaataggcacagttatccgttaagctcaacaagtggaaatgctgattcatcagccgtttcttcacaggcaatatctccctatgcctgcttttatggagcatctgcaaagaaggttaaatcaggatggctggataaactctctcctcaaggaaaacgcatgtttcaaaagagatgggtgaaatttgatggccttagcatttcttactacaataatgagaaggagatgtattcgaaaggaataattcccctttctgctatatcaacagtacgagttcaaggagacaacaaatttgaagttgttacaacacaaagaacttttgtttttagagtagaaaaagaagaggagagaaatgactggatcagcatactattaaatgcactgaaatcacaatcccttacctcgcagtctcaagctgttgttacacctgagaaatgtggatatcttgaattgagaggctataaggcaaaaatttttactgtgttaagtggaaacagtgtgtggctttgcaaaaacgaacaggattttaagagtggacttggtattaccataattcctatgaatgtagcaaatgtaaagcaagtggaccgaactgtgaaacaatcttttgaaataatcactccctacaggagtttcagctttacagccgagactgaaaaggagaaacaagactggattgaagctgtgcagcaatcaatagcagaaactctctctgattatgaagtagctgagaagatttggttcaatgaatccaacaggagctgtgcagattgtaaagccccagatcctgactgggcatccatcaatctctgtgttgtcatctgtaagaagtgtgcaggacagcatagatctttaggaccaaaagattccaaggttagaagtctaaaaatggatgctagcatttggagcaatgaactcatcgagctttttattgtcattggaaacaaaagagcaaatgacttttgggctggtaatcttcaaaaggatgaagaattacatatggactcaccagtagaaaagagaaaaaactttattactcagaaatataaagaaggaaaattcagaaaaactcttttggcatctctcaccaaagaagaattaaataaggctctatgtgctgctgtagtgaaaccggatgttctagaaacaatggctttgctgttcagtggagcagatgtcatgtgtgccaccggagaccccgtgcatagcaccccctatctgctagccaagaaagctgggcaaagtctgcaaatggaatttctctaccataacaaattctcagatttccctcaacatgatattcattccgagggtgtattaagtcaagagtcttcccagtccacattcctctgtgactttttatatcaagctccttctgctgcttctaaactctcttcagagaaaaaactgcttgaagagacaaataaaaaatggtgtgttttggaaggaggcttcttgagttactatgaaaatgataagtctaccacacctaatggcaccattaatatcaatgaagttatctgcctggctatacacaaagaggacttctatttaaatactgggcccatctttatctttgagatctacttaccctccgaacgtgtgtttttatttggagctgaaacatctcaagctcaaagaaaatggacagaggcaatagccaagcattttgttcccttatttgctgaaaacttaacagaagctgactatgatttgattggtcaactcttctacaaagactgccatgccctggatcagtggagaaaaggctggtttgctatggacaaatccagcttgcatttttgccttcaaatgcaagaagttcagggagatagaatgcacttaagaagactgcaagagctaacaatcagcacaatggttcaaaatggggaaaaactggatgttttactcttggtagaaaaagggagaacattatacatccatgggcataccaagttggatttcacagtctggcatactgcaattgaaaaagcagcaggtacagatggtaatgctttacaagatcagcagctcagcaaaaatgacgttcccattatagtgaacagctgtatagcatttgttacacagtatggtttaggatgcaaatatatctatcaaaagaatggtgatcctttgcatataagtgaactcctggagagtttcaaaaaggatgcaagaagctttaaattgagggctggaaaacatcagcttgaagatgtgacggctgtgttgaaaagttttctctctgacattgatgatgcactgcttactaaggagctctacccatattggatctctgctttagatacgcaagatgacaaggaaagaattaaaaaatatggagcatttatacgttctcttccaggggtcaaccgagcaacactagcagctatcattgaacacctgtatagggttcagaaatgctcagaaatcaatcacatgaatgcccataatttggccttggtcttttcatcctgtttgtttcaaacgaagggacaaactagtgaagaagtgaatgtaattgaggacctaattaataattatgtagaaatatttgaggttaaagaagatcaagtcaaacaaatggacatagaaaatagctttattaccaagtggaaagacacccaagtttcccaggctggagatttgttaattgaagtatatgtagaaaggaaggaacccgactgtagtattataattcggatatctcctgtgatggaagcagaagaattaactaatgatatattagcgataaaaaatattattcctacaaaaggtgatatttgggccacatttgaagtcattgaaaatgaagagctagagcgtcctcttcactacaaggaaaatgtactggagcaggtgcttcggtggagttcattagctgaacctggctctgcttacctggtggtgaagagattcttaaccgctgacacaattaaacactgcagtgaccggagtacactgggaagcatcaaagaaggaatcttgaaaatcaaagaagaaccatccaaaatactatctggaaataagtttcaagaccggtattttgttttacgagatgggtttctctttctttacaaggatgtgaagagtagtaaacatgacaagatgttttctctcagttccatgaagttttatcgtggagtgaaaaagaaaatgaagcctccaacaagctggggattgaccgcatattctgagaaacatcactggcacctgtgttgtgatagttcacgaactcagacggagtggatgaccagtatctttattgcccagcatgaatatgatatatggccaccagctggaaaggaacgaaaacgttcaataaccaaaaatcccaaaattggaggtttgcctctgattcctatacagcatgaggggaatgcaaccttggcccggaaaaatattgagagtgcaagagcagaacttgaaaggctgcggctcagtgaaaagtgtgataaagagtccgtggactctagcttaaaggagagagcttccatggtggcccactgcctggagcacaaggacgataaacttcgaaatcgaccccgaaaacatcggagtttcaactgcctggaggacacagagcctgaagccccacttgggcaaccaaaaggccataaaggcctaaagacattgaggaagactgaggacaggaatagcaaagctactttggactctgatcataagttaccatcaagggtaattgaagaacttaatgtggttctacaacggtcaagaacccttccaaaagaattacaggatgagcagattttgaagtaggaaataaaatgaattgctccccagattatttttttaatattgtatgcaatctttatgtgtaactccaaaactgaactataagataattcataagaatttgcctattgataggcaaatttgtctatgcttaggcatttaaggagcatttaaaaatatgtatatatgtgactgaatgtaagattaactttattttggtctgaacaaaccttgtaaagttccattgtattaacgtgtgtaagaagacattgggttacttaggtggtcagtccttttaaagtagttgtctgttaagtggtataatttatgagcagaaatctcaaactgtactgtattgtataaaatgctgtgtttaaatgaagcctaagaaactatctgtaacatattttgcactttgagaaaccttgtatattaaattaccatatgtttttaggtttacagaagttctaccttagggaaaagaaagggaagtaaattgaaaaaggggggagaatttattgtagtggctgcctaaaaaccactggagtttttaaaagaagcaaggagttaaatgtcctgcaaaacaaggaagtgagctaagattcattctagttcactaatgaccagaacttgtcaatgagaaaccacttgttaagaaaaagtccagtgtttatttctcaagagtaatattcggccaacagatgtaaataatagcactagccactcttattaatatttatagtgttagaaaaccagccacattacagattcactacgtttgagctcattgttggtggctgctaagaggaaacttacactgcattggagaggttgtgtacacaggacctggcctggatgctgattgcactgtcattgtatgcaagcattttgtcttttttcagaatttctgactatacttttggtacgaacaaaattcatcaccacagggtcctgttgttttgtttgatttttagatttttttaaattattattaaggttgtaatgtttttctccgagttgtcagaaataactggaagaatacaatatatggccattatggagccaggggctagttggtggtttactatacatttgggggctacctggtcacatttaatctaggtttttttttctttttttaagtaaaggtgtggtctcttccctgtacttatgaataaggacaaagccctatttttgtttccacataaagatcagctactgaattggtgaatttcctgacagacaatgctatctaaccatagttcatgttaggggaagcatttttccatcagtttctttaaaattggattgtctggtgagttttgatattaaacattatgtagctaagttttttttttttagcatttcttttttatttttcaatctatattcacaggcccatacttcagtcagtccaatcatagtacagtgatgtggtggtagatgctatgaatttcttcattgtaaaatacggatcatttgtattttggggtgataaaatagttcaccatgggtatgagatatttattctttaaatcaaagtaaattagaatttttaaaaagcacaaaactgcaggacagtttatgaaataggtggcactattagggaatcttcctttaaagcaagaaatcatgttatttagaaagaaaaactaatcttaaacatactatttctaataaatatttatatttttatgaaataaagaggtatgtggaaattaatatttggtgatgttggacagtggaaaagtatctagagtttttacctgccttatctgaattcttcttgaaacttgagcttaaactctaatagctgtttccctttctattctgaacaactgtctccatttttcaagtgtgagagataagggctaatgatgacatctcatttattttgagtaaacattaaaattgttttacaagtctacttg

SEQ ID NO: 4547 - protein, 1704 aa, Homo sapiens; identical to SEQ ID NO: 506

SEQ ID NO: 4548 - DNA, 471 bp, Homo sapiens
tgtaaaacaattttaatgtttactcaaaataaatgagatgtcatcattagcccttatctctcacacttgaaaaatggagaagcttatcatctgattgaggatactggcttctttccacacttgcatcactgtcttcaagattttttctaacagtctccaactgcggtgggctagatgtctgaacactaccagaattggaaagttctatgcagatattctgatcagaagatggaacatggtaatcctttgaagggtcatcattcttcttagttttatgaacatttgcatatattggaatatcttgcatttttgacaagattatctgtaactgtttaagtatcctcctacggtgacctgtaggtgatattccaattttctgcagcaggctgtcatttattgctgcacagtccttcacagtagtaaaaccagactcatggaaatgtaagagatactgctccaaattaatgctca

SEQ ID NO: 4549 - protein, 31 aa, Homo sapiens
MSEHYQNWKVLCRYSDQKMEHGNPLKGHHSS

SEQ ID NO: 4550 - DNA, 2884 bp, Homo sapiens
tacttaccccgccagccccgggaggctcgcagagcgagcggcgccggcgtcatgtgactgcccggagttggtgccaggagccagaggggagccaggagcggagccgcgcggagccggggcccgagccggagcgcagcgagagcgcccgccgcacgcgcgcccgtccccgtcccctgcggccgccaacgccgcccggactggagccctgacattgctgcgctcggggggctccaggcagcccgtatcggggcctttatttctcgtcggcggcgccctgcaccgcgcctcgcaaagccaaacaccagagcaccctagaaggtttaactaaaagaatgctcatgtttgacccagttcctgtcaagcaagaggccatggaccctgtctcagtgtcatacccatctaattacatggaatccatgaagcctaacaagtatggggtcatctactccacaccattgcctgagaagttctttcagaccccagaaggtctgtcgcacggaatacagatggagccagtggacctcacggtgaacaagcggagttcacccccttcggctgggaattcgccctcctctctgaagttcccgtcctcacaccggagagcctcgcctgggttgagcatgccttcttccagcccaccgataaaaaaatactcacccccttctccaggcgtgcagcccttcggcgtgccgctgtccatgccaccagtgatggcagctgccctctcgcggcatggaatacggagcccggggatcctgcccgtcatccagccggtggtggtgcagcccgtcccctttatgtacacaagtcacctccagcagcctctcatggtctccttatcggaggagatggaaaattccagtagtagcatgcaagtacctgtaattgaatcatatgagaagcctatatcacagaaaaaaattaaaatagaacctgggatcgaaccacagaggacagattattatcctgaagaaatgtcaccccccttaatgaactcagtgtcccccccgcaagcattgttgcaagagaatcacccttcggtcatcgtgcagcctgggaagagacctttacctgtggaatccccggatactcaaaggaagcggaggatacacagatgtgattatgatggatgcaacaaagtgtacactaaaagctcccacttgaaagcacacagaagaacacacacaggagaaaaaccctacaaatgtacatgggaagggtgcacatggaagtttgctcggtctgatgaactaacaagacatttccgaaaacatactggaatcaaacctttccagtgcccggactgtgaccgcagcttctcccgttctgaccatcttgccctccataggaaacgccacatgctagtctgattgcctctgtgtcctgcctcagcgtgactccccactcacctggctctctctctgtcctgcctcccattatctaacacattttttacatgtacattttaatttgattcagctggtctgaatctctgaatttatatcatccaaaacttccatatggtcagtagtagatgttctctaatcctccctctccttaccacgggtcagacctaaagaatgtgaacacttttttttttttttctggggatgctaagcaaacccttcttacagatacgtttaatgtaataagaacaagggaacatgtaaactaacataaccaattgtcagttctccatgtattcctcaaaagaatgtcagagtaaatgtattagaaatacagtatccagactgctagtccttgccagagacattcttacctctgccctgtgataatattttatgcttgacagtgaaaacaagtgtggccccttgcaccggttagctagaagtacagccagatttcaagctagtgcagtcacctcttccgtcattcttcacaaatcttgtcaacctggatcttagacttcatctgaatcgagttctttgccctcctttgtgcctgcagctcatatggaggtctttgccaccaatgggagatgagcccaaactttcgatctaggtgggtgatgtgtagcagttcaagggaagggtgctgtgttttcatagcatggagtcggaggagagggccatttagcagggggagcagaagaggcaattcctcctgggctaggggttgtcagtgaggtttcaacattttgttagctgtgtgcagcattcccagagcttcagtctctgtgcatactcagctttgtagaaccatgctgcaaagccatataccgatggggttatccatgcaactatctccattcctacaatgtccttaatatgagatcatcaaacattgatagtagggactccatggaatatttgcccagtaatggtaagaaatctttcgggtaagagtatggatggttcttcttttacccaatctgcttatagctttttttgtaaacagggaaatgttgagtggtacttgtattcccttatcaaattaatcacatagcttttatacagaaactcttcctgtgtgagctgttaaggtgccaaattggctgtcatttgtattcatgacacataccataaagcatctgctaatgctttaatggattgattcaattaagacctgagtgacactatttgtaaatataactagttgtgaagcacacatacctttattttgggaatttatgagaaaatatagaaaaccacagatcagggattcatatatgtagctcaaaaattcccaaaagtttactgttagagttggcaatttcctatcactatttcagtgtcagaacaaactgaaaataatggctcgtgtttatgttgaagataaatagcaccattattgggggaagttattcaaaagcaggcttttgagcaccatagtctaaatgccaataaaaataattcatacatag

SEQ ID NO: 4551 - protein, 345 aa, Homo sapiens; identical to SEQ ID NO: 510

SEQ ID NO: 4552 - DNA, 4888 bp, Homo sapiens
tacttaccccgccagccccgggaggctcgcagagcgagcggcgccggcgtcatgtgactgcccggagttggtgccaggagccagaggggagccaggagcggagccgcgcggagccggggcccgagccggagcgcagcgagagcgcccgccgcacgcgcgcccgtccccgtcccctgcggccgccaacgccgcccggactggagccctgacattgctgcgctcggggggctccaggcagcccgtatcggggcctttatttctcgtcggcggcgccctgcaccgcgcctcgcaaagccaaacaccagagcaccctagaaggtttaactaaaagaatgctcatgtttgacccagttcctgtcaagcaagaggccatggaccctgtctcagtgtcatacccatctaattacatggaatccatgaagcctaacaagtatggggtcatctactccacaccattgcctgagaagttctttcagaccccagaaggtctgtcgcacggaatacagatggagccagtggacctcacggtgaacaagcggagttcacccccttcggctgggaattcgccctcctctctgaagttcccgtcctcacaccggagagcctcgcctgggttgagcatgccttcttccagcccaccgataaaaaaatactcacccccttctccaggcgtgcagcccttcggcgtgccgctgtccatgccaccagtgatggcagctgccctctcgcggcatggaatacggagcccggggatcctgcccgtcatccagccggtggtggtgcagcccgtcccctttatgtacacaagtcacctccagcagcctctcatggtctccttatcggaggagatggaaaattccagtagtagcatgcaagtacctgtaattgaatcatatgagaagcctatatcacagaaaaaaattaaaatagaacctgggatcgaaccacagaggacagattattatcctgaagaaatgtcaccccccttaatgaactcagtgtcccccccgcaagcattgttgcaagagaatcacccttcggtcatcgtgcagcctgggaagagacctttacctgtggaatccccggatactcaaaggaagcggaggatacacagatgtgattatgatggatgcaacaaagtgtacactaaaagctcccacttgaaagcacacagaagaacacacacaggagaaaaaccctacaaatgtacatgggaagggtgcacatggaagtttgctcggtctgatgaactaacaagacatttccgaaaacatactggaatcaaacctttccagtgcccggactgtgaccgcagcttctcccgttctgaccatcttgccctccataggaaacgccacatgctagtctgattgcctctgtgtcctgcctcagcgtgactccccactcacctggctctctctctgtcctgcctcccattatctaacacattttttacatgtacattttaatttgattcagctggtctgaatctctgaatttatatcatccaaaacttccatatggtcagtagtagatgttctctaatcctccctctccttaccacgggtcagacctaaagaatgtgaacacttttttttttttttctggggatgctaagcaaacccttcttacagatacgtttaatgtaataagaacaagggaacatgtaaactaacataaccaattgtcagttctccatgtattcctcaaaagaatgtcagagtaaatgtattagaaatacagtatccagactgctagtccttgccagagacattcttacctctgccctgtgataatattttatgcttgacagtgaaaacaagtgtggccccttgcaccggttagctagaagtacagccagatttcaagctagtgcagtcacctcttccgtcattcttcacaaatcttgtcaacctggatcttagacttcatctgaatcgagttctttgccctcctttgtgcctgcagctcatatggaggtctttgccaccaatgggagatgagcccaaactttcgatctaggtgggtgatgtgtagcagttcaagggaagggtgctgtgttttcatagcatggagtcggaggagagggccatttagcagggggagcagaagaggcaattcctcctgggctaggggttgtcagtgaggtttcaacattttgttagctgtgtgcagcattcccagagcttcagtctctgtgcatactcagctttgtagaaccatgctgcaaagccatataccgatggggttatccatgcaactatctccattcctacaatgtccttaatatgagatcatcaaacattgatagtagggactccatggaatatttgcccagtaatggtaagaaatctttcgggtaagagtatggatggttcttcttttacccaatctgcttatagctttttttgtaaacagggaaatgttgagtggtacttgtattcccttatcaaattaatcacatagcttttatacagaaactcttcctgtgtgagctgttaaggtgccaaattggctgtcatttgtattcatgacacataccataaagcatctgctaatgctttaatggattgattcaattaagacctgagtgacactatttgtaaatataactagttgtgaagcacacatacctttattttgggaatttatgagaaaatatagaaaaccacagatcagggattcatatatgtagctcaaaaattcccaaaagtttactgttagagttggcaatttcctatcactatttcagtgtcagaacaaactgaaaataatggctcgtgtttatgttgaagataaatagcaccattattgggggaagttattcaaaagcaggcttttgagcaccatagtctaaatgccaataaaaataattcatacatagaaatgtcattggtcctgaatttgaagaaagtgagcaacagtagttaaatgtgggtgcatataaccaaattccccttcatcaagaatggaggagaagagagaagaatgaaatcctgaagattcatcccagccgcaactcaggatccaacacaactttaactgggaggaatacattgtttgatcatttttaaaacatctgtgaatgagtgattccggaggcctgtgaattgtgtggggagcttgctttgatggcactgtgttaataaaagttgtagggactgtgcacctaagaggctaagaggtcccactcatccgccctgtgaaccagctgtaaagaaatgtagttaagaaatgcaaagaaatgtgttatcttggcacttgggtttgattttcctttttttaaagcactgcaaaacttctttaggatactaaaacatcctaattgggctgtttttttgttttgttttgtttttcagctaaaggcaaagataatttttttttcagctgaagtttttcttttttgcaactatgacatgaattgagtgataaaatggctctttgaaaagtagatattgtctgtattgtaaatgcttagtcatattcatggcaaagtgttcatttcttgagatggttctttcacaacacacaagaatcaagatggaacgcaaggaaaatctttttgttttgaccgaggtaaccagtttatgtgtgttccaatccatagagaagtgggggaaagggcgagaaaggatcagattgatctgggatcagctttgagcctgagttcagtgaatagcctcatgggcatctcatggaattgatgcatttgctgtggcatatttaaattttgttcaaaagatttgaagcaagaccttgcaaagactcttaacattactgttcagcttgcttagattgtgttaacagttcatttaacaaagatccgttttaactctgaacaaaagcaacccagagcggccattctctattcccatgctggtcaatacgctttcattaccaattggcccttaccaaacttttcttatatatatatttgtattttactatgatagttgagaaatttagcctcttagtcatttttagctgttattgtggaagacctcaaatacaagattagatgcccttgaacatgttttaatgatgtgtgtcatgttactatcaatggtgatttcaatcgcaatattttaaattgatgagaatgatttgtaaacatgaagttactattacgtaaattctgtttgttatagagtttcttcagttgttacccaagtgtcatcctagagaagtcagaagaatcagaatccatcgtattttagagttatgtgaatctacatcataaatgggcattaacattctaaattgcttggtttggagaatgtgttagcagcatagctatattcaactagggagatgctaaatacacagaagtttcaagagccttggaacagaattacaggggaactatatatgtatatgtatattttattaaacacccatctgcactatcagtattgcactaatgtggaatttgaaagactattttgctgatactgtatatatgcgcatcattcctgattagattgttgtaaagacaatctgaaagatctaaggttttaaaataatttggtttgaaaatatacagttgtcttgaaggaattgctgtcatacatgaagttgctccgagctgtctttattctcttcttggtcaaggttaacaattgctaaatgatcgcaaattcacctaaacaatacatttacaaagccatctttacatgcattaaacgagggctacaacaatattgttttacaaatactagcacttttttttctgttatgtacttagtgttagagggtcaaaataatctttctgcttagcatctcttaaaccatacctgcaaatatagcaggattattacatttacagtactttaatacttgtataaactatgcagaaatttttaataaagtgtaatatattttataagct

SEQ ID NO: 4553 - protein, 345 aa, Homo sapiens; identical to SEQ ID NO: 510

SEQ ID NO: 4554 - DNA, 5146 bp, Homo sapiens
tacttaccccgccagccccgggaggctcgcagagcgagcggcgccggcgtcatgtgactgcccggagttggtgccaggagccagaggggagccaggagcggagccgcgcggagccggggcccgagccggagcgcagcgagagcgcccgccgcacgcgcgcccgtccccgtcccctgcggccgccaacgccgcccggactggagccctgacattgctgcgctcggggggctccaggcagcccgtatcggggcctttatttctcgtcggcggcgccctgcaccgcgcctcgcaaagccaaacaccagagcaccctagaaggtttaactaaaagaatgctcatgtttgacccagttcctgtcaagcaagaggccatggaccctgtctcagtgtcatacccatctaattacatggaatccatgaagcctaacaagtatggggtcatctactccacaccattgcctgagaagttctttcagaccccagaaggtctgtcgcacggaatacagatggagccagtggacctcacggtgaacaagcggagttcacccccttcggctgggaattcgccctcctctctgaagttcccgtcctcacaccggagagcctcgcctgggttgagcatgccttcttccagcccaccgataaaaaaatactcacccccttctccaggcgtgcagcccttcggcgtgccgctgtccatgccaccagtgatggcagctgccctctcgcggcatggaatacggagcccggggatcctgcccgtcatccagccggtggtggtgcagcccgtcccctttatgtacacaagtcacctccagcagcctctcatggtctccttatcggaggagatggaaaattccagtagtagcatgcaagtacctgtaattgaatcatatgagaagcctatatcacagaaaaaaattaaaatagaacctgggatcgaaccacagaggacagattattatcctgaagaaatgtcaccccccttaatgaactcagtgtcccccccgcaagcattgttgcaagagaatcacccttcggtcatcgtgcagcctgggaagagacctttacctgtggaatccccggatactcaaaggaagcggaggatacacagatgtgattatgatggatgcaacaaagtgtacactaaaagctcccacttgaaagcacacagaagaacacacacaggagaaaaaccctacaaatgtacatgggaagggtgcacatggaagtttgctcggtctgatgaactaacaagacatttccgaaaacatactggaatcaaacctttccagtgcccggactgtgaccgcagcttctcccgttctgaccatcttgccctccataggaaacgccacatgctagtctgattgcctctgtgtcctgcctcagcgtgactccccactcacctggctctctctctgtcctgcctcccattatctaacacattttttacatgtacattttaatttgattcagctggtctgaatctctgaatttatatcatccaaaacttccatatggtcagtagtagatgttctctaatcctccctctccttaccacgggtcagacctaaagaatgtgaacacttttttttttttttctggggatgctaagcaaacccttcttacagatacgtttaatgtaataagaacaagggaacatgtaaactaacataaccaattgtcagttctccatgtattcctcaaaagaatgtcagagtaaatgtattagaaatacagtatccagactgctagtccttgccagagacattcttacctctgccctgtgataatattttatgcttgacagtgaaaacaagtgtggccccttgcaccggttagctagaagtacagccagatttcaagctagtgcagtcacctcttccgtcattcttcacaaatcttgtcaacctggatcttagacttcatctgaatcgagttctttgccctcctttgtgcctgcagctcatatggaggtctttgccaccaatgggagatgagcccaaactttcgatctaggtgggtgatgtgtagcagttcaagggaagggtgctgtgttttcatagcatggagtcggaggagagggccatttagcagggggagcagaagaggcaattcctcctgggctaggggttgtcagtgaggtttcaacattttgttagctgtgtgcagcattcccagagcttcagtctctgtgcatactcagctttgtagaaccatgctgcaaagccatataccgatggggttatccatgcaactatctccattcctacaatgtccttaatatgagatcatcaaacattgatagtagggactccatggaatatttgcccagtaatggtaagaaatctttcgggtaagagtatggatggttcttcttttacccaatctgcttatagctttttttgtaaacagggaaatgttgagtggtacttgtattcccttatcaaattaatcacatagcttttatacagaaactcttcctgtgtgagctgttaaggtgccaaattggctgtcatttgtattcatgacacataccataaagcatctgctaatgctttaatggattgattcaattaagacctgagtgacactatttgtaaatataactagttgtgaagcacacatacctttattttgggaatttatgagaaaatatagaaaaccacagatcagggattcatatatgtagctcaaaaattcccaaaagtttactgttagagttggcaatttcctatcactatttcagtgtcagaacaaactgaaaataatggctcgtgtttatgttgaagataaatagcaccattattgggggaagttattcaaaagcaggcttttgagcaccatagtctaaatgccaataaaaataattcatacatagaaatgtcattggtcctgaatttgaagaaagtgagcaacagtagttaaatgtgggtgcatataaccaaattccccttcatcaagaatggaggagaagagagaagaatgaaatcctgaagattcatcccagccgcaactcaggatccaacacaactttaactgggaggaatacattgtttgatcatttttaaaacatctgtgaatgagtgattccggaggcctgtgaattgtgtggggagcttgctttgatggcactgtgttaataaaagttgtagggactgtgcacctaagaggctaagaggtcccactcatccgccctgtgaaccagctgtaaagaaatgtagttaagaaatgcaaagaaatgtgttatcttggcacttgggtttgattttcctttttttaaagcactgcaaaacttctttaggatactaaaacatcctaattgggctgtttttttgttttgttttgtttttcagctaaaggcaaagataatttttttttcagctgaagtttttcttttttgcaactatgacatgaattgagtgataaaatggctctttgaaaagtagatattgtctgtattgtaaatgcttagtcatattcatggcaaagtgttcatttcttgagatggttctttcacaacacacaagaatcaagatggaacgcaaggaaaatctttttgttttgaccgaggtaaccagtttatgtgtgttccaatccatagagaagtgggggaaagggcgagaaaggatcagattgatctgggatcagctttgagcctgagttcagtgaatagcctcatgggcatctcatggaattgatgcatttgctgtggcatatttaaattttgttcaaaagatttgaagcaagaccttgcaaagactcttaacattactgttcagcttgcttagattgtgttaacagttcatttaacaaagatccgttttaactctgaacaaaagcaacccagagcggccattctctattcccatgctggtcaatacgctttcattaccaattggcccttaccaaacttttcttatatatatatttgtattttactatgatagttgagaaatttagcctcttagtcatttttagctgttattgtggaagacctcaaatacaagattagatgcccttgaacatgttttaatgatgtgtgtcatgttactatcaatggtgatttcaatcgcaatattttaaattgatgagaatgatttgtaaacatgaagttactattacgtaaattctgtttgttatagagtttcttcagttgttacccaagtgtcatcctagagaagtcagaagaatcagaatccatcgtattttagagttatgtgaatctacatcataaatgggcattaacattctaaattgcttggtttggagaatgtgttagcagcatagctatattcaactagggagatgctaaatacacagaagtttcaagagccttggaacagaattacaggggaactatatatgtatatgtatattttattaaacacccatctgcactatcagtattgcactaatgtggaatttgaaagactattttgctgatactgtatatatgcgcatcattcctgattagattgttgtaaagacaatctgaaagatctaaggttttaaaataatttggtttgaaaatatacagttgtcttgaaggaattgctgtcatacatgaagttgctccgagctgtctttattctcttcttggtcaaggttaacaattgctaaatgatcgcaaattcacctaaacaatacatttacaaagccatctttacatgcattaaacgagggctacaacaatattgttttacaaatactagcacttttttttctgttatgtacttagtgttagagggtcaaaataatctttctgcttagcatctcttaaaccatacctgcaaatatagcaggattattacatttacagtactttaatacttgtataaactatgcagaaatttttaataaagtgtaatatattttataagctaataagactgaatgggtaaaggtttttagcatgcattagtatacttgcagatactgaaacattttggtaatctttcttactaaagatgtgaatgtttaatgtaccttctctgtttctactctgtagtccaatgggaattcagtaatgacattttgtcatgtcaaactgtgaacataaatttgtactgtacagtcctcatatactatatacagtatgcaatatatattatatacttgttaataaaaccatcagaatatt

SEQ ID NO: 4555 - protein, 345 aa, Homo sapiens; identical to SEQ ID NO: 510

SEQ ID NO: 4556 - DNA, 5622 bp, Homo sapiens
tacttaccccgccagccccgggaggctcgcagagcgagcggcgccggcgtcatgtgactgcccggagttggtgccaggagccagaggggagccaggagcggagccgcgcggagccggggcccgagccggagcgcagcgagagcgcccgccgcacgcgcgcccgtccccgtcccctgcggccgccaacgccgcccggactggagccctgacattgctgcgctcggggggctccaggcagcccgtatcggggcctttatttctcgtcggcggcgccctgcaccgcgcctcgcaaagccaaacaccagagcaccctagaaggtttaactaaaagaatgctcatgtttgacccagttcctgtcaagcaagaggccatggaccctgtctcagtgtcatacccatctaattacatggaatccatgaagcctaacaagtatggggtcatctactccacaccattgcctgagaagttctttcagaccccagaaggtctgtcgcacggaatacagatggagccagtggacctcacggtgaacaagcggagttcacccccttcggctgggaattcgccctcctctctgaagttcccgtcctcacaccggagagcctcgcctgggttgagcatgccttcttccagcccaccgataaaaaaatactcacccccttctccaggcgtgcagcccttcggcgtgccgctgtccatgccaccagtgatggcagctgccctctcgcggcatggaatacggagcccggggatcctgcccgtcatccagccggtggtggtgcagcccgtcccctttatgtacacaagtcacctccagcagcctctcatggtctccttatcggaggagatggaaaattccagtagtagcatgcaagtacctgtaattgaatcatatgagaagcctatatcacagaaaaaaattaaaatagaacctgggatcgaaccacagaggacagattattatcctgaagaaatgtcaccccccttaatgaactcagtgtcccccccgcaagcattgttgcaagagaatcacccttcggtcatcgtgcagcctgggaagagacctttacctgtggaatccccggatactcaaaggaagcggaggatacacagatgtgattatgatggatgcaacaaagtgtacactaaaagctcccacttgaaagcacacagaagaacacacacaggagaaaaaccctacaaatgtacatgggaagggtgcacatggaagtttgctcggtctgatgaactaacaagacatttccgaaaacatactggaatcaaacctttccagtgcccggactgtgaccgcagcttctcccgttctgaccatcttgccctccataggaaacgccacatgctagtctgattgcctctgtgtcctgcctcagcgtgactccccactcacctggctctctctctgtcctgcctcccattatctaacacattttttacatgtacattttaatttgattcagctggtctgaatctctgaatttatatcatccaaaacttccatatggtcagtagtagatgttctctaatcctccctctccttaccacgggtcagacctaaagaatgtgaacacttttttttttttttctggggatgctaagcaaacccttcttacagatacgtttaatgtaataagaacaagggaacatgtaaactaacataaccaattgtcagttctccatgtattcctcaaaagaatgtcagagtaaatgtattagaaatacagtatccagactgctagtccttgccagagacattcttacctctgccctgtgataatattttatgcttgacagtgaaaacaagtgtggccccttgcaccggttagctagaagtacagccagatttcaagctagtgcagtcacctcttccgtcattcttcacaaatcttgtcaacctggatcttagacttcatctgaatcgagttctttgccctcctttgtgcctgcagctcatatggaggtctttgccaccaatgggagatgagcccaaactttcgatctaggtgggtgatgtgtagcagttcaagggaagggtgctgtgttttcatagcatggagtcggaggagagggccatttagcagggggagcagaagaggcaattcctcctgggctaggggttgtcagtgaggtttcaacattttgttagctgtgtgcagcattcccagagcttcagtctctgtgcatactcagctttgtagaaccatgctgcaaagccatataccgatggggttatccatgcaactatctccattcctacaatgtccttaatatgagatcatcaaacattgatagtagggactccatggaatatttgcccagtaatggtaagaaatctttcgggtaagagtatggatggttcttcttttacccaatctgcttatagctttttttgtaaacagggaaatgttgagtggtacttgtattcccttatcaaattaatcacatagcttttatacagaaactcttcctgtgtgagctgttaaggtgccaaattggctgtcatttgtattcatgacacataccataaagcatctgctaatgctttaatggattgattcaattaagacctgagtgacactatttgtaaatataactagttgtgaagcacacatacctttattttgggaatttatgagaaaatatagaaaaccacagatcagggattcatatatgtagctcaaaaattcccaaaagtttactgttagagttggcaatttcctatcactatttcagtgtcagaacaaactgaaaataatggctcgtgtttatgttgaagataaatagcaccattattgggggaagttattcaaaagcaggcttttgagcaccatagtctaaatgccaataaaaataattcatacatagaaatgtcattggtcctgaatttgaagaaagtgagcaacagtagttaaatgtgggtgcatataaccaaattccccttcatcaagaatggaggagaagagagaagaatgaaatcctgaagattcatcccagccgcaactcaggatccaacacaactttaactgggaggaatacattgtttgatcatttttaaaacatctgtgaatgagtgattccggaggcctgtgaattgtgtggggagcttgctttgatggcactgtgttaataaaagttgtagggactgtgcacctaagaggctaagaggtcccactcatccgccctgtgaaccagctgtaaagaaatgtagttaagaaatgcaaagaaatgtgttatcttggcacttgggtttgattttcctttttttaaagcactgcaaaacttctttaggatactaaaacatcctaattgggctgtttttttgttttgttttgtttttcagctaaaggcaaagataatttttttttcagctgaagtttttcttttttgcaactatgacatgaattgagtgataaaatggctctttgaaaagtagatattgtctgtattgtaaatgcttagtcatattcatggcaaagtgttcatttcttgagatggttctttcacaacacacaagaatcaagatggaacgcaaggaaaatctttttgttttgaccgaggtaaccagtttatgtgtgttccaatccatagagaagtgggggaaagggcgagaaaggatcagattgatctgggatcagctttgagcctgagttcagtgaatagcctcatgggcatctcatggaattgatgcatttgctgtggcatatttaaattttgttcaaaagatttgaagcaagaccttgcaaagactcttaacattactgttcagcttgcttagattgtgttaacagttcatttaacaaagatccgttttaactctgaacaaaagcaacccagagcggccattctctattcccatgctggtcaatacgctttcattaccaattggcccttaccaaacttttcttatatatatatttgtattttactatgatagttgagaaatttagcctcttagtcatttttagctgttattgtggaagacctcaaatacaagattagatgcccttgaacatgttttaatgatgtgtgtcatgttactatcaatggtgatttcaatcgcaatattttaaattgatgagaatgatttgtaaacatgaagttactattacgtaaattctgtttgttatagagtttcttcagttgttacccaagtgtcatcctagagaagtcagaagaatcagaatccatcgtattttagagttatgtgaatctacatcataaatgggcattaacattctaaattgcttggtttggagaatgtgttagcagcatagctatattcaactagggagatgctaaatacacagaagtttcaagagccttggaacagaattacaggggaactatatatgtatatgtatattttattaaacacccatctgcactatcagtattgcactaatgtggaatttgaaagactattttgctgatactgtatatatgcgcatcattcctgattagattgttgtaaagacaatctgaaagatctaaggttttaaaataatttggtttgaaaatatacagttgtcttgaaggaattgctgtcatacatgaagttgctccgagctgtctttattctcttcttggtcaaggttaacaattgctaaatgatcgcaaattcacctaaacaatacatttacaaagccatctttacatgcattaaacgagggctacaacaatattgttttacaaatactagcacttttttttctgttatgtacttagtgttagagggtcaaaataatctttctgcttagcatctcttaaaccatacctgcaaatatagcaggattattacatttacagtactttaatacttgtataaactatgcagaaatttttaataaagtgtaatatattttataagctaataagactgaatgggtaaaggtttttagcatgcattagtatacttgcagatactgaaacattttggtaatctttcttactaaagatgtgaatgtttaatgtaccttctctgtttctactctgtagtccaatgggaattcagtaatgacattttgtcatgtcaaactgtgaacataaatttgtactgtacagtcctcatatactatatacagtatgcaatatatattatatacttgttaataaaaccatcagaatattaaatgtgatcatgtgattacttcatatgcagtgatcactagagcaaaacttacagagcaatgtaagaacccttgcttagaacattacttactctgatgggcagttattgttgatggagggacagaaaaatagatctaactggaagatgaactaccggaattaactcagccctcaagctatgtccctggttttctgaaaacagccaacaggaagtctcctaggctgaaatcataaaactgcagacaatccagcaaaaatctacaaactcacctagttcattcttgaaatacttcttgtatttgttatttatgaacccctgcctgcttccaaaaagaacttgcagcattttgtattaaaagacgcatgtgtataatactttaaacttttagagtaaaatatcaagactctcatgttggggagtggggaacgaggaacagaacaataacgcattaaagtaaataactctggataaaagt

SEQ ID NO: 4557 - protein, 345 aa, Homo sapiens; identical to SEQ ID NO: 510

SEQ ID NO: 4558 - DNA, 1600 bp, Homo sapiens
aaaaaaagcttagattgtaagatttttaacaggatttggtttctaatccacccagggaaggtgcaaactcaggaatgagagagaaatcaggaaggtagggagaacgtcaggcatgccatgggggagccggcaccacgtgagccagcatcatgggtgaccacaacactacattgaaattctccctcatacaggaatcacagtgacagtggaggtttgagtttgtgaagacagcaatgccaacttttttgttgttttttggaagagctggcatttgaaaattgcacatgaattggcagtctctaagggactccaattaaatgccaattacataaaggataaaaacgtagatataccctacaatgtggtttcctgagacttaggagtttgatcttttccatttttccctagccaacaataatgaaaatcagagcagcctgtgaaaaaatatagtgttcagcattgcctagaaccacaagattctataagtaggcagaagttgactgaggaaaagagcctccccagcacttggtgcctgcctctagcatagcacttaacccttcttactgtcattacttatctccatgtctgtctccccctagagtgtgagctcctcgagggcaggaaccctgtttttattcatctttgtgtcccggtgccaagcacagtgcctggctcatggtaggtgctcactcaatgtttgttgaatgaatatagcagtgcttcttgggttgatcagctaatttctttttgtttattttgttgggattttttgtttgtttgtttttgcccagtgttgttaatgcttttagtagactgatgaaaaaggaagagcgtgctctcaacatttggcctgtaaccttggctttcacaggaatcacccttcggtcatcgtgcagcctgggaagagacctttacctgtggaatccccggatactcaaaggaagcggaggatacacagatgtgattatgatggatgcaacaaagtgtacactaaaagctcccacttgaaagcacacagaagaacacacacaggagaaaaaccctacaaatgtacatgggaagggtgcacatggaagtttgctcggtctgatgaactaacaagacatttccgaaaacatactggaatcaaacctttccagtgcccggactgtgaccgcagcttctcccgttctgaccatcttgccctccataggaaacgccacatgctagtctgattgcctctgtgtcctgcctcagcgtgactccccactcacctggctctctctctgtcctgcctcccattatctaacacattttttacatgtacattttaatttgattcagctggtctgaatctctgaatttatatcatccaaaacttccatatggtcagtagtagatgttctctaatcctccctctccttaccacgggtcagacctaaagaatgtgaacacttttttttttttttctggggatgctaagcaaacccttcttacagatacgtttaatgtaataagaacaagggaacatgtaaactaacataaccaattgtcagttctccatgtattcctcaaaagaatgtcagagtaaatgtattagaaatacagtatccagactgct

SEQ ID NO: 4559 - protein, 63 aa, Homo sapiens
MKKEERALNIWPVTLAFTGITLRSSCSLGRDLYLWNPRILKGSGGYTDVIMMDATKCTLKAPT

SEQ ID NO: 4560 - DNA, 2728 bp, Homo sapiens
aaaaaaagcttagattgtaagatttttaacaggatttggtttctaatccacccagggaaggtgcaaactcaggaatgagagagaaatcaggaaggtagggagaacgtcaggcatgccatgggggagccggcaccacgtgagccagcatcatgggtgaccacaacactacattgaaattctccctcatacaggaatcacagtgacagtggaggtttgagtttgtgaagacagcaatgccaacttttttgttgttttttggaagagctggcatttgaaaattgcacatgaattggcagtctctaagggactccaattaaatgccaattacataaaggataaaaacgtagatataccctacaatgtggtttcctgagacttaggagtttgatcttttccatttttccctagccaacaataatgaaaatcagagcagcctgtgaaaaaatatagtgttcagcattgcctagaaccacaagattctataagtaggcagaagttgactgaggaaaagagcctccccagcacttggtgcctgcctctagcatagcacttaacccttcttactgtcattacttatctccatgtctgtctccccctagagtgtgagctcctcgagggcaggaaccctgtttttattcatctttgtgtcccggtgccaagcacagtgcctggctcatggtaggtgctcactcaatgtttgttgaatgaatatagcagtgcttcttgggttgatcagctaatttctttttgtttattttgttgggattttttgtttgtttgtttttgcccagtgttgttaatgcttttagtagactgatgaaaaaggaagagcgtgctctcaacatttggcctgtaaccttggctttcacaggaatcacccttcggtcatcgtgcagcctgggaagagacctttacctgtggaatccccggatactcaaaggaagcggaggatacacagatgtgattatgatggatgcaacaaagtgtacactaaaagctcccacttgaaagcacacagaagaacacacacaggagaaaaaccctacaaatgtacatgggaagggtgcacatggaagtttgctcggtctgatgaactaacaagacatttccgaaaacatactggaatcaaacctttccagtgcccggactgtgaccgcagcttctcccgttctgaccatcttgccctccataggaaacgccacatgctagtctgattgcctctgtgtcctgcctcagcgtgactccccactcacctggctctctctctgtcctgcctcccattatctaacacattttttacatgtacattttaatttgattcagctggtctgaatctctgaatttatatcatccaaaacttccatatggtcagtagtagatgttctctaatcctccctctccttaccacgggtcagacctaaagaatgtgaacacttttttttttttttctggggatgctaagcaaacccttcttacagatacgtttaatgtaataagaacaagggaacatgtaaactaacataaccaattgtcagttctccatgtattcctcaaaagaatgtcagagtaaatgtattagaaatacagtatccagactgctagtccttgccagagacattcttacctctgccctgtgataatattttatgcttgacagtgaaaacaagtgtggccccttgcaccggttagctagaagtacagccagatttcaagctagtgcagtcacctcttccgtcattcttcacaaatcttgtcaacctggatcttagacttcatctgaatcgagttctttgccctcctttgtgcctgcagctcatatggaggtctttgccaccaatgggagatgagcccaaactttcgatctaggtgggtgatgtgtagcagttcaagggaagggtgctgtgttttcatagcatggagtcggaggagagggccatttagcagggggagcagaagaggcaattcctcctgggctaggggttgtcagtgaggtttcaacattttgttagctgtgtgcagcattcccagagcttcagtctctgtgcatactcagctttgtagaaccatgctgcaaagccatataccgatggggttatccatgcaactatctccattcctacaatgtccttaatatgagatcatcaaacattgatagtagggactccatggaatatttgcccagtaatggtaagaaatctttcgggtaagagtatggatggttcttcttttacccaatctgcttatagctttttttgtaaacagggaaatgttgagtggtacttgtattcccttatcaaattaatcacatagcttttatacagaaactcttcctgtgtgagctgttaaggtgccaaattggctgtcatttgtattcatgacacataccataaagcatctgctaatgctttaatggattgattcaattaagacctgagtgacactatttgtaaatataactagttgtgaagcacacatacctttattttgggaatttatgagaaaatatagaaaaccacagatcagggattcatatatgtagctcaaaaattcccaaaagtttactgttagagttggcaatttcctatcactatttcagtgtcagaacaaactgaaaataatggctcgtgtttatgttgaagataaatagcaccattattgggggaagttattcaaaagcaggcttttgagcaccatagtctaaatgccaataaaaataattcatacatag

SEQ ID NO: 4561 - protein, 63 aa, Homo sapiens; identical to SEQ ID NO: 4559

SEQ ID NO: 4562 - DNA, 4732 bp, Homo sapiens
aaaaaaagcttagattgtaagatttttaacaggatttggtttctaatccacccagggaaggtgcaaactcaggaatgagagagaaatcaggaaggtagggagaacgtcaggcatgccatgggggagccggcaccacgtgagccagcatcatgggtgaccacaacactacattgaaattctccctcatacaggaatcacagtgacagtggaggtttgagtttgtgaagacagcaatgccaacttttttgttgttttttggaagagctggcatttgaaaattgcacatgaattggcagtctctaagggactccaattaaatgccaattacataaaggataaaaacgtagatataccctacaatgtggtttcctgagacttaggagtttgatcttttccatttttccctagccaacaataatgaaaatcagagcagcctgtgaaaaaatatagtgttcagcattgcctagaaccacaagattctataagtaggcagaagttgactgaggaaaagagcctccccagcacttggtgcctgcctctagcatagcacttaacccttcttactgtcattacttatctccatgtctgtctccccctagagtgtgagctcctcgagggcaggaaccctgtttttattcatctttgtgtcccggtgccaagcacagtgcctggctcatggtaggtgctcactcaatgtttgttgaatgaatatagcagtgcttcttgggttgatcagctaatttctttttgtttattttgttgggattttttgtttgtttgtttttgcccagtgttgttaatgcttttagtagactgatgaaaaaggaagagcgtgctctcaacatttggcctgtaaccttggctttcacaggaatcacccttcggtcatcgtgcagcctgggaagagacctttacctgtggaatccccggatactcaaaggaagcggaggatacacagatgtgattatgatggatgcaacaaagtgtacactaaaagctcccacttgaaagcacacagaagaacacacacaggagaaaaaccctacaaatgtacatgggaagggtgcacatggaagtttgctcggtctgatgaactaacaagacatttccgaaaacatactggaatcaaacctttccagtgcccggactgtgaccgcagcttctcccgttctgaccatcttgccctccataggaaacgccacatgctagtctgattgcctctgtgtcctgcctcagcgtgactccccactcacctggctctctctctgtcctgcctcccattatctaacacattttttacatgtacattttaatttgattcagctggtctgaatctctgaatttatatcatccaaaacttccatatggtcagtagtagatgttctctaatcctccctctccttaccacgggtcagacctaaagaatgtgaacacttttttttttttttctggggatgctaagcaaacccttcttacagatacgtttaatgtaataagaacaagggaacatgtaaactaacataaccaattgtcagttctccatgtattcctcaaaagaatgtcagagtaaatgtattagaaatacagtatccagactgctagtccttgccagagacattcttacctctgccctgtgataatattttatgcttgacagtgaaaacaagtgtggccccttgcaccggttagctagaagtacagccagatttcaagctagtgcagtcacctcttccgtcattcttcacaaatcttgtcaacctggatcttagacttcatctgaatcgagttctttgccctcctttgtgcctgcagctcatatggaggtctttgccaccaatgggagatgagcccaaactttcgatctaggtgggtgatgtgtagcagttcaagggaagggtgctgtgttttcatagcatggagtcggaggagagggccatttagcagggggagcagaagaggcaattcctcctgggctaggggttgtcagtgaggtttcaacattttgttagctgtgtgcagcattcccagagcttcagtctctgtgcatactcagctttgtagaaccatgctgcaaagccatataccgatggggttatccatgcaactatctccattcctacaatgtccttaatatgagatcatcaaacattgatagtagggactccatggaatatttgcccagtaatggtaagaaatctttcgggtaagagtatggatggttcttcttttacccaatctgcttatagctttttttgtaaacagggaaatgttgagtggtacttgtattcccttatcaaattaatcacatagcttttatacagaaactcttcctgtgtgagctgttaaggtgccaaattggctgtcatttgtattcatgacacataccataaagcatctgctaatgctttaatggattgattcaattaagacctgagtgacactatttgtaaatataactagttgtgaagcacacatacctttattttgggaatttatgagaaaatatagaaaaccacagatcagggattcatatatgtagctcaaaaattcccaaaagtttactgttagagttggcaatttcctatcactatttcagtgtcagaacaaactgaaaataatggctcgtgtttatgttgaagataaatagcaccattattgggggaagttattcaaaagcaggcttttgagcaccatagtctaaatgccaataaaaataattcatacatagaaatgtcattggtcctgaatttgaagaaagtgagcaacagtagttaaatgtgggtgcatataaccaaattccccttcatcaagaatggaggagaagagagaagaatgaaatcctgaagattcatcccagccgcaactcaggatccaacacaactttaactgggaggaatacattgtttgatcatttttaaaacatctgtgaatgagtgattccggaggcctgtgaattgtgtggggagcttgctttgatggcactgtgttaataaaagttgtagggactgtgcacctaagaggctaagaggtcccactcatccgccctgtgaaccagctgtaaagaaatgtagttaagaaatgcaaagaaatgtgttatcttggcacttgggtttgattttcctttttttaaagcactgcaaaacttctttaggatactaaaacatcctaattgggctgtttttttgttttgttttgtttttcagctaaaggcaaagataatttttttttcagctgaagtttttcttttttgcaactatgacatgaattgagtgataaaatggctctttgaaaagtagatattgtctgtattgtaaatgcttagtcatattcatggcaaagtgttcatttcttgagatggttctttcacaacacacaagaatcaagatggaacgcaaggaaaatctttttgttttgaccgaggtaaccagtttatgtgtgttccaatccatagagaagtgggggaaagggcgagaaaggatcagattgatctgggatcagctttgagcctgagttcagtgaatagcctcatgggcatctcatggaattgatgcatttgctgtggcatatttaaattttgttcaaaagatttgaagcaagaccttgcaaagactcttaacattactgttcagcttgcttagattgtgttaacagttcatttaacaaagatccgttttaactctgaacaaaagcaacccagagcggccattctctattcccatgctggtcaatacgctttcattaccaattggcccttaccaaacttttcttatatatatatttgtattttactatgatagttgagaaatttagcctcttagtcatttttagctgttattgtggaagacctcaaatacaagattagatgcccttgaacatgttttaatgatgtgtgtcatgttactatcaatggtgatttcaatcgcaatattttaaattgatgagaatgatttgtaaacatgaagttactattacgtaaattctgtttgttatagagtttcttcagttgttacccaagtgtcatcctagagaagtcagaagaatcagaatccatcgtattttagagttatgtgaatctacatcataaatgggcattaacattctaaattgcttggtttggagaatgtgttagcagcatagctatattcaactagggagatgctaaatacacagaagtttcaagagccttggaacagaattacaggggaactatatatgtatatgtatattttattaaacacccatctgcactatcagtattgcactaatgtggaatttgaaagactattttgctgatactgtatatatgcgcatcattcctgattagattgttgtaaagacaatctgaaagatctaaggttttaaaataatttggtttgaaaatatacagttgtcttgaaggaattgctgtcatacatgaagttgctccgagctgtctttattctcttcttggtcaaggttaacaattgctaaatgatcgcaaattcacctaaacaatacatttacaaagccatctttacatgcattaaacgagggctacaacaatattgttttacaaatactagcacttttttttctgttatgtacttagtgttagagggtcaaaataatctttctgcttagcatctcttaaaccatacctgcaaatatagcaggattattacatttacagtactttaatacttgtataaactatgcagaaatttttaataaagtgtaatatattttataagct

SEQ ID NO: 4563 - protein, 63 aa, Homo sapiens; identical to SEQ ID NO: 4559

SEQ ID NO: 4564 - DNA, 4990 bp, Homo sapiens
aaaaaaagcttagattgtaagatttttaacaggatttggtttctaatccacccagggaaggtgcaaactcaggaatgagagagaaatcaggaaggtagggagaacgtcaggcatgccatgggggagccggcaccacgtgagccagcatcatgggtgaccacaacactacattgaaattctccctcatacaggaatcacagtgacagtggaggtttgagtttgtgaagacagcaatgccaacttttttgttgttttttggaagagctggcatttgaaaattgcacatgaattggcagtctctaagggactccaattaaatgccaattacataaaggataaaaacgtagatataccctacaatgtggtttcctgagacttaggagtttgatcttttccatttttccctagccaacaataatgaaaatcagagcagcctgtgaaaaaatatagtgttcagcattgcctagaaccacaagattctataagtaggcagaagttgactgaggaaaagagcctccccagcacttggtgcctgcctctagcatagcacttaacccttcttactgtcattacttatctccatgtctgtctccccctagagtgtgagctcctcgagggcaggaaccctgtttttattcatctttgtgtcccggtgccaagcacagtgcctggctcatggtaggtgctcactcaatgtttgttgaatgaatatagcagtgcttcttgggttgatcagctaatttctttttgtttattttgttgggattttttgtttgtttgtttttgcccagtgttgttaatgcttttagtagactgatgaaaaaggaagagcgtgctctcaacatttggcctgtaaccttggctttcacaggaatcacccttcggtcatcgtgcagcctgggaagagacctttacctgtggaatccccggatactcaaaggaagcggaggatacacagatgtgattatgatggatgcaacaaagtgtacactaaaagctcccacttgaaagcacacagaagaacacacacaggagaaaaaccctacaaatgtacatgggaagggtgcacatggaagtttgctcggtctgatgaactaacaagacatttccgaaaacatactggaatcaaacctttccagtgcccggactgtgaccgcagcttctcccgttctgaccatcttgccctccataggaaacgccacatgctagtctgattgcctctgtgtcctgcctcagcgtgactccccactcacctggctctctctctgtcctgcctcccattatctaacacattttttacatgtacattttaatttgattcagctggtctgaatctctgaatttatatcatccaaaacttccatatggtcagtagtagatgttctctaatcctccctctccttaccacgggtcagacctaaagaatgtgaacacttttttttttttttctggggatgctaagcaaacccttcttacagatacgtttaatgtaataagaacaagggaacatgtaaactaacataaccaattgtcagttctccatgtattcctcaaaagaatgtcagagtaaatgtattagaaatacagtatccagactgctagtccttgccagagacattcttacctctgccctgtgataatattttatgcttgacagtgaaaacaagtgtggccccttgcaccggttagctagaagtacagccagatttcaagctagtgcagtcacctcttccgtcattcttcacaaatcttgtcaacctggatcttagacttcatctgaatcgagttctttgccctcctttgtgcctgcagctcatatggaggtctttgccaccaatgggagatgagcccaaactttcgatctaggtgggtgatgtgtagcagttcaagggaagggtgctgtgttttcatagcatggagtcggaggagagggccatttagcagggggagcagaagaggcaattcctcctgggctaggggttgtcagtgaggtttcaacattttgttagctgtgtgcagcattcccagagcttcagtctctgtgcatactcagctttgtagaaccatgctgcaaagccatataccgatggggttatccatgcaactatctccattcctacaatgtccttaatatgagatcatcaaacattgatagtagggactccatggaatatttgcccagtaatggtaagaaatctttcgggtaagagtatggatggttcttcttttacccaatctgcttatagctttttttgtaaacagggaaatgttgagtggtacttgtattcccttatcaaattaatcacatagcttttatacagaaactcttcctgtgtgagctgttaaggtgccaaattggctgtcatttgtattcatgacacataccataaagcatctgctaatgctttaatggattgattcaattaagacctgagtgacactatttgtaaatataactagttgtgaagcacacatacctttattttgggaatttatgagaaaatatagaaaaccacagatcagggattcatatatgtagctcaaaaattcccaaaagtttactgttagagttggcaatttcctatcactatttcagtgtcagaacaaactgaaaataatggctcgtgtttatgttgaagataaatagcaccattattgggggaagttattcaaaagcaggcttttgagcaccatagtctaaatgccaataaaaataattcatacatagaaatgtcattggtcctgaatttgaagaaagtgagcaacagtagttaaatgtgggtgcatataaccaaattccccttcatcaagaatggaggagaagagagaagaatgaaatcctgaagattcatcccagccgcaactcaggatccaacacaactttaactgggaggaatacattgtttgatcatttttaaaacatctgtgaatgagtgattccggaggcctgtgaattgtgtggggagcttgctttgatggcactgtgttaataaaagttgtagggactgtgcacctaagaggctaagaggtcccactcatccgccctgtgaaccagctgtaaagaaatgtagttaagaaatgcaaagaaatgtgttatcttggcacttgggtttgattttcctttttttaaagcactgcaaaacttctttaggatactaaaacatcctaattgggctgtttttttgttttgttttgtttttcagctaaaggcaaagataatttttttttcagctgaagtttttcttttttgcaactatgacatgaattgagtgataaaatggctctttgaaaagtagatattgtctgtattgtaaatgcttagtcatattcatggcaaagtgttcatttcttgagatggttctttcacaacacacaagaatcaagatggaacgcaaggaaaatctttttgttttgaccgaggtaaccagtttatgtgtgttccaatccatagagaagtgggggaaagggcgagaaaggatcagattgatctgggatcagctttgagcctgagttcagtgaatagcctcatgggcatctcatggaattgatgcatttgctgtggcatatttaaattttgttcaaaagatttgaagcaagaccttgcaaagactcttaacattactgttcagcttgcttagattgtgttaacagttcatttaacaaagatccgttttaactctgaacaaaagcaacccagagcggccattctctattcccatgctggtcaatacgctttcattaccaattggcccttaccaaacttttcttatatatatatttgtattttactatgatagttgagaaatttagcctcttagtcatttttagctgttattgtggaagacctcaaatacaagattagatgcccttgaacatgttttaatgatgtgtgtcatgttactatcaatggtgatttcaatcgcaatattttaaattgatgagaatgatttgtaaacatgaagttactattacgtaaattctgtttgttatagagtttcttcagttgttacccaagtgtcatcctagagaagtcagaagaatcagaatccatcgtattttagagttatgtgaatctacatcataaatgggcattaacattctaaattgcttggtttggagaatgtgttagcagcatagctatattcaactagggagatgctaaatacacagaagtttcaagagccttggaacagaattacaggggaactatatatgtatatgtatattttattaaacacccatctgcactatcagtattgcactaatgtggaatttgaaagactattttgctgatactgtatatatgcgcatcattcctgattagattgttgtaaagacaatctgaaagatctaaggttttaaaataatttggtttgaaaatatacagttgtcttgaaggaattgctgtcatacatgaagttgctccgagctgtctttattctcttcttggtcaaggttaacaattgctaaatgatcgcaaattcacctaaacaatacatttacaaagccatctttacatgcattaaacgagggctacaacaatattgttttacaaatactagcacttttttttctgttatgtacttagtgttagagggtcaaaataatctttctgcttagcatctcttaaaccatacctgcaaatatagcaggattattacatttacagtactttaatacttgtataaactatgcagaaatttttaataaagtgtaatatattttataagctaataagactgaatgggtaaaggtttttagcatgcattagtatacttgcagatactgaaacattttggtaatctttcttactaaagatgtgaatgtttaatgtaccttctctgtttctactctgtagtccaatgggaattcagtaatgacattttgtcatgtcaaactgtgaacataaatttgtactgtacagtcctcatatactatatacagtatgcaatatatattatatacttgttaataaaaccatcagaatatt

SEQ ID NO: 4565 - protein, 63 aa, Homo sapiens; identical to SEQ ID NO: 4559

SEQ ID NO: 4566 - DNA, 5466 bp, Homo sapiens
aaaaaaagcttagattgtaagatttttaacaggatttggtttctaatccacccagggaaggtgcaaactcaggaatgagagagaaatcaggaaggtagggagaacgtcaggcatgccatgggggagccggcaccacgtgagccagcatcatgggtgaccacaacactacattgaaattctccctcatacaggaatcacagtgacagtggaggtttgagtttgtgaagacagcaatgccaacttttttgttgttttttggaagagctggcatttgaaaattgcacatgaattggcagtctctaagggactccaattaaatgccaattacataaaggataaaaacgtagatataccctacaatgtggtttcctgagacttaggagtttgatcttttccatttttccctagccaacaataatgaaaatcagagcagcctgtgaaaaaatatagtgttcagcattgcctagaaccacaagattctataagtaggcagaagttgactgaggaaaagagcctccccagcacttggtgcctgcctctagcatagcacttaacccttcttactgtcattacttatctccatgtctgtctccccctagagtgtgagctcctcgagggcaggaaccctgtttttattcatctttgtgtcccggtgccaagcacagtgcctggctcatggtaggtgctcactcaatgtttgttgaatgaatatagcagtgcttcttgggttgatcagctaatttctttttgtttattttgttgggattttttgtttgtttgtttttgcccagtgttgttaatgcttttagtagactgatgaaaaaggaagagcgtgctctcaacatttggcctgtaaccttggctttcacaggaatcacccttcggtcatcgtgcagcctgggaagagacctttacctgtggaatccccggatactcaaaggaagcggaggatacacagatgtgattatgatggatgcaacaaagtgtacactaaaagctcccacttgaaagcacacagaagaacacacacaggagaaaaaccctacaaatgtacatgggaagggtgcacatggaagtttgctcggtctgatgaactaacaagacatttccgaaaacatactggaatcaaacctttccagtgcccggactgtgaccgcagcttctcccgttctgaccatcttgccctccataggaaacgccacatgctagtctgattgcctctgtgtcctgcctcagcgtgactccccactcacctggctctctctctgtcctgcctcccattatctaacacattttttacatgtacattttaatttgattcagctggtctgaatctctgaatttatatcatccaaaacttccatatggtcagtagtagatgttctctaatcctccctctccttaccacgggtcagacctaaagaatgtgaacacttttttttttttttctggggatgctaagcaaacccttcttacagatacgtttaatgtaataagaacaagggaacatgtaaactaacataaccaattgtcagttctccatgtattcctcaaaagaatgtcagagtaaatgtattagaaatacagtatccagactgctagtccttgccagagacattcttacctctgccctgtgataatattttatgcttgacagtgaaaacaagtgtggccccttgcaccggttagctagaagtacagccagatttcaagctagtgcagtcacctcttccgtcattcttcacaaatcttgtcaacctggatcttagacttcatctgaatcgagttctttgccctcctttgtgcctgcagctcatatggaggtctttgccaccaatgggagatgagcccaaactttcgatctaggtgggtgatgtgtagcagttcaagggaagggtgctgtgttttcatagcatggagtcggaggagagggccatttagcagggggagcagaagaggcaattcctcctgggctaggggttgtcagtgaggtttcaacattttgttagctgtgtgcagcattcccagagcttcagtctctgtgcatactcagctttgtagaaccatgctgcaaagccatataccgatggggttatccatgcaactatctccattcctacaatgtccttaatatgagatcatcaaacattgatagtagggactccatggaatatttgcccagtaatggtaagaaatctttcgggtaagagtatggatggttcttcttttacccaatctgcttatagctttttttgtaaacagggaaatgttgagtggtacttgtattcccttatcaaattaatcacatagcttttatacagaaactcttcctgtgtgagctgttaaggtgccaaattggctgtcatttgtattcatgacacataccataaagcatctgctaatgctttaatggattgattcaattaagacctgagtgacactatttgtaaatataactagttgtgaagcacacatacctttattttgggaatttatgagaaaatatagaaaaccacagatcagggattcatatatgtagctcaaaaattcccaaaagtttactgttagagttggcaatttcctatcactatttcagtgtcagaacaaactgaaaataatggctcgtgtttatgttgaagataaatagcaccattattgggggaagttattcaaaagcaggcttttgagcaccatagtctaaatgccaataaaaataattcatacatagaaatgtcattggtcctgaatttgaagaaagtgagcaacagtagttaaatgtgggtgcatataaccaaattccccttcatcaagaatggaggagaagagagaagaatgaaatcctgaagattcatcccagccgcaactcaggatccaacacaactttaactgggaggaatacattgtttgatcatttttaaaacatctgtgaatgagtgattccggaggcctgtgaattgtgtggggagcttgctttgatggcactgtgttaataaaagttgtagggactgtgcacctaagaggctaagaggtcccactcatccgccctgtgaaccagctgtaaagaaatgtagttaagaaatgcaaagaaatgtgttatcttggcacttgggtttgattttcctttttttaaagcactgcaaaacttctttaggatactaaaacatcctaattgggctgtttttttgttttgttttgtttttcagctaaaggcaaagataatttttttttcagctgaagtttttcttttttgcaactatgacatgaattgagtgataaaatggctctttgaaaagtagatattgtctgtattgtaaatgcttagtcatattcatggcaaagtgttcatttcttgagatggttctttcacaacacacaagaatcaagatggaacgcaaggaaaatctttttgttttgaccgaggtaaccagtttatgtgtgttccaatccatagagaagtgggggaaagggcgagaaaggatcagattgatctgggatcagctttgagcctgagttcagtgaatagcctcatgggcatctcatggaattgatgcatttgctgtggcatatttaaattttgttcaaaagatttgaagcaagaccttgcaaagactcttaacattactgttcagcttgcttagattgtgttaacagttcatttaacaaagatccgttttaactctgaacaaaagcaacccagagcggccattctctattcccatgctggtcaatacgctttcattaccaattggcccttaccaaacttttcttatatatatatttgtattttactatgatagttgagaaatttagcctcttagtcatttttagctgttattgtggaagacctcaaatacaagattagatgcccttgaacatgttttaatgatgtgtgtcatgttactatcaatggtgatttcaatcgcaatattttaaattgatgagaatgatttgtaaacatgaagttactattacgtaaattctgtttgttatagagtttcttcagttgttacccaagtgtcatcctagagaagtcagaagaatcagaatccatcgtattttagagttatgtgaatctacatcataaatgggcattaacattctaaattgcttggtttggagaatgtgttagcagcatagctatattcaactagggagatgctaaatacacagaagtttcaagagccttggaacagaattacaggggaactatatatgtatatgtatattttattaaacacccatctgcactatcagtattgcactaatgtggaatttgaaagactattttgctgatactgtatatatgcgcatcattcctgattagattgttgtaaagacaatctgaaagatctaaggttttaaaataatttggtttgaaaatatacagttgtcttgaaggaattgctgtcatacatgaagttgctccgagctgtctttattctcttcttggtcaaggttaacaattgctaaatgatcgcaaattcacctaaacaatacatttacaaagccatctttacatgcattaaacgagggctacaacaatattgttttacaaatactagcacttttttttctgttatgtacttagtgttagagggtcaaaataatctttctgcttagcatctcttaaaccatacctgcaaatatagcaggattattacatttacagtactttaatacttgtataaactatgcagaaatttttaataaagtgtaatatattttataagctaataagactgaatgggtaaaggtttttagcatgcattagtatacttgcagatactgaaacattttggtaatctttcttactaaagatgtgaatgtttaatgtaccttctctgtttctactctgtagtccaatgggaattcagtaatgacattttgtcatgtcaaactgtgaacataaatttgtactgtacagtcctcatatactatatacagtatgcaatatatattatatacttgttaataaaaccatcagaatattaaatgtgatcatgtgattacttcatatgcagtgatcactagagcaaaacttacagagcaatgtaagaacccttgcttagaacattacttactctgatgggcagttattgttgatggagggacagaaaaatagatctaactggaagatgaactaccggaattaactcagccctcaagctatgtccctggttttctgaaaacagccaacaggaagtctcctaggctgaaatcataaaactgcagacaatccagcaaaaatctacaaactcacctagttcattcttgaaatacttcttgtatttgttatttatgaacccctgcctgcttccaaaaagaacttgcagcattttgtattaaaagacgcatgtgtataatactttaaacttttagagtaaaatatcaagactctcatgttggggagtggggaacgaggaacagaacaataacgcattaaagtaaataactctggataaaagt

SEQ ID NO: 4567 - protein, 63 aa, Homo sapiens; identical to SEQ ID NO: 4559

SEQ ID NO: 4568 - DNA, 3484 bp, Homo sapiens
agccaattctgaccgtgtcaacgaatcatccacgcacctgcagctctgctgagagagtgcaagccgtgggggttttgagctcatcttcatcattcatatgaggaaataagtggtaaaatccttggaaatacaatgagactcatcagaaacatttacatattttgtagtattgttatgacagcagagggtgatgctccagagctgccagaagaaagggaactgatgaccaactgctccaacatgtctctaagaaaggttcccgcagacttgaccccagccacaacgacactggatttatcctataacctcctttttcaactccagagttcagattttcattctgtctccaaactgagagttttgattctatgccataacagaattcaacagctggatctcaaaacctttgaattcaacaaggagttaagatatttagatttgtctaataacagactgaagagtgtaacttggtatttactggcaggtctcaggtatttagatctttcttttaatgactttgacaccatgcctatctgtgaggaagctggcaacatgtcacacctggaaatcctaggtttgagtggggcaaaaatacaaaaatcagatttccagaaaattgctcatctgcatctaaatactgtcttcttaggattcagaactcttcctcattatgaagaaggtagcctgcccatcttaaacacaacaaaactgcacattgttttaccaatggacacaaatttctgggttcttttgcgtgatggaatcaagacttcaaaaatattagaaatgacaaatatagatggcaaaagccaatttgtaagttatgaaatgcaacgaaatcttagtttagaaaatgctaagacatcggttctattgcttaataaagttgatttactctgggacgaccttttccttatcttacaatttgtttggcatacatcagtggaacactttcagatccgaaatgtgacttttggtggtaaggcttatcttgaccacaattcatttgactactcaaatactgtaatgagaactataaaattggagcatgtacatttcagagtgttttacattcaacaggataaaatctatttgcttttgaccaaaatggacatagaaaacctgacaatatcaaatgcacaaatgccacacatgcttttcccgaattatcctacgaaattccaatatttaaattttgccaataatatcttaacagacgagttgtttaaaagaactatccaactgcctcacttgaaaactctcattttgaatggcaataaactggagacactttctttagtaagttgctttgctaacaacacacccttggaacacttggatctgagtcaaaatctattacaacataaaaatgatgaaaattgctcatggccagaaactgtggtcaatatgaatctgtcatacaataaattgtctgattctgtcttcaggtgcttgcccaaaagtattcaaatacttgacctaaataataaccaaatccaaactgtacctaaagagactattcatctgatggccttacgagaactaaatattgcatttaattttctaactgatctccctggatgcagtcatttcagtagactttcagttctgaacattgaaatgaacttcattctcagcccatctctggattttgttcagagctgccaggaagttaaaactctaaatgcgggaagaaatccattccggtgtacctgtgaattaaaaaatttcattcagcttgaaacatattcagaggtcatgatggttggatggtcagattcatacacctgtgaataccctttaaacctaaggggaactaggttaaaagacgttcatctccacgaattatcttgcaacacagctctgttgattgtcaccattgtggttattatgctagttctggggttggctgtggccttctgctgtctccactttgatctgccctggtatctcaggatgctaggtcaatgcacacaaacatggcacagggttaggaaaacaacccaagaacaactcaagagaaatgtccgattccacgcatttatttcatacagtgaacatgattctctgtgggtgaagaatgaattgatccccaatctagagaaggaagatggttctatcttgatttgcctttatgaaagctactttgaccctggcaaaagcattagtgaaaatattgtaagcttcattgagaaaagctataagtccatctttgttttgtctcccaactttgtccagaatgagtggtgccattatgaattctactttgcccaccacaatctcttccatgaaaattctgatcatataattcttatcttactggaacccattccattctattgcattcccaccaggtatcataaactgaaagctctcctggaaaaaaaagcatacttggaatggcccaaggataggcgtaaatgtgggcttttctgggcaaaccttcgagctgctattaatgttaatgtattagccaccagagaaatgtatgaactgcagacattcacagagttaaatgaagagtctcgaggttctacaatctctctgatgagaacagattgtctataaaatcccacagtccttgggaagttggggaccacatacactgttgggatgtacattgatacaacctttatgatggcaatttgacaatatttattaaaataaaaaatggttattcccttcatatcagtttctagaaggatttctaagaatgtatcctatagaaacaccttcacaagtttataagggcttatggaaaaaggtgttcatcccaggattgtttataatcatgaaaaatgtggccaggtgcagtggctcactcttgtaatcccagcactatgggaggccaaggtgggtgacccacgaggtcaagagatggagaccatcctggccaacatggtgaaaccctgtctctactaaaaatacaaaaattagctgggcgtgatggtgcacgcctgtagtcccagctacttgggaggctgaggcaggagaatcgcttgaacccgggaggtggcagttgcagtgagctgagatcgagccactgcactccagcctggtgacagagcgagactccatctcaaaaaaaagaaaaaaaaaaaagaaaaaaatggaaaacatcctcatggccacaaaataaggtctaattcaataaattatagtacattaatgtaatataatattacatgccactaaaaagaataaggtagctgtatatttcctggtatggaaaaaacatattaatatgttataaactattaggttggtgcaaaactaattgtggtttttgccattgaaatggcattgaaataaaagtgtaaagaaatctataccagatgtagtaacagtggtttgggtctgggaggttggattacagggagcatttgatttctatgttgtgtatttctataatgtttgaattgtttagaatgaatctgtatttcttttataagtagaaaaaaaataaagatagtttttacagcct

SEQ ID NO: 4569 - protein, 811 aa, Homo sapiens; identical to SEQ ID NO: 514

SEQ ID NO: 4570 - DNA, 3780 bp, Homo sapiens
agtacttccctcacagagtatggtgataaataaatgagataatatacatgaagcaattagtatgtatcttggcacattgaaatctaacctgaaagctttgattctatgccataacagaattcagcagctgaatatcaagacctttgaattcaacaagaagttaagacatttatagttgtctaacaacagactgaagattgtggcttggtattcactggcaggtttcagacatttagatctttcttttaatgactaacaccatgcctatctgtggagaagctggcaacatgtcacacctggaaattgtttttcaacattaatactattatttggcagtaatccagattgcttttgccaccaacctgaagacatatagaggcagaaggacaggaataattctatttgtttcctgttttgaaacttccatctgtaaggtaagtgttgaaagtcagatattggctccagggactttctatatccacaaatacaaaaattgaggggtaactccttgatatcaagtcaaaggctcacaatgtctggtaataaaacaaattactttcaattttcttgaaatcttcaggctatcaaaaggagatgtgagagagggtattgagtctggcctgacaatgcagttcttaaaccaaaggtccattatgcttctcctctctgagaatcctgacttacctcaacaacggagacatggcacagtagccagcttggagacttctcagccaatgctctgagatcaagtcgaagacccaatatacagggttttgagctcatcttcatcattcatatgaggaaataagtggtaaaatccttggaaatacaatgagactcatcagaaacatttacatattttgtagtattgttatgacagcagagggtgatgctccagagctgccagaagaaagggaactgatgaccaactgctccaacatgtctctaagaaaggttcccgcagacttgaccccagccacaacgacactggatttatcctataacctcctttttcaactccagagttcagattttcattctgtctccaaactgagagttttgattctatgccataacagaattcaacagctggatctcaaaacctttgaattcaacaaggagttaagatatttagatttgtctaataacagactgaagagtgtaacttggtatttactggcaggtctcaggtatttagatctttcttttaatgactttgacaccatgcctatctgtgaggaagctggcaacatgtcacacctggaaatcctaggtttgagtggggcaaaaatacaaaaatcagatttccagaaaattgctcatctgcatctaaatactgtcttcttaggattcagaactcttcctcattatgaagaaggtagcctgcccatcttaaacacaacaaaactgcacattgttttaccaatggacacaaatttctgggttcttttgcgtgatggaatcaagacttcaaaaatattagaaatgacaaatatagatggcaaaagccaatttgtaagttatgaaatgcaacgaaatcttagtttagaaaatgctaagacatcggttctattgcttaataaagttgatttactctgggacgaccttttccttatcttacaatttgtttggcatacatcagtggaacactttcagatccgaaatgtgacttttggtggtaaggcttatcttgaccacaattcatttgactactcaaatactgtaatgagaactataaaattggagcatgtacatttcagagtgttttacattcaacaggataaaatctatttgcttttgaccaaaatggacatagaaaacctgacaatatcaaatgcacaaatgccacacatgcttttcccgaattatcctacgaaattccaatatttaaattttgccaataatatcttaacagacgagttgtttaaaagaactatccaactgcctcacttgaaaactctcattttgaatggcaataaactggagacactttctttagtaagttgctttgctaacaacacacccttggaacacttggatctgagtcaaaatctattacaacataaaaatgatgaaaattgctcatggccagaaactgtggtcaatatgaatctgtcatacaataaattgtctgattctgtcttcaggtgcttgcccaaaagtattcaaatacttgacctaaataataaccaaatccaaactgtacctaaagagactattcatctgatggccttacgagaactaaatattgcatttaattttctaactgatctccctggatgcagtcatttcagtagactttcagttctgaacattgaaatgaacttcattctcagcccatctctggattttgttcagagctgccaggaagttaaaactctaaatgcgggaagaaatccattccggtgtacctgtgaattaaaaaatttcattcagcttgaaacatattcagaggtcatgatggttggatggtcagattcatacacctgtgaataccctttaaacctaaggggaactaggttaaaagacgttcatctccacgaattatcttgcaacacagctctgttgattgtcaccattgtggttattatgctagttctggggttggctgtggccttctgctgtctccactttgatctgccctggtatctcaggatgctaggtcaatgcacacaaacatggcacagggttaggaaaacaacccaagaacaactcaagagaaatgtccgattccacgcatttatttcatacagtgaacatgattctctgtgggtgaagaatgaattgatccccaatctagagaaggaagatggttctatcttgatttgcctttatgaaagctactttgaccctggcaaaagcattagtgaaaatattgtaagcttcattgagaaaagctataagtccatctttgttttgtctcccaactttgtccagaatgagtggtgccattatgaattctactttgcccaccacaatctcttccatgaaaattctgatcatataattcttatcttactggaacccattccattctattgcattcccaccaggtatcataaactgaaagctctcctggaaaaaaaagcatacttggaatggcccaaggataggcgtaaatgtgggcttttctgggcaaaccttcgagctgctattaatgttaatgtattagccaccagagaaatgtatgaactgcagacattcacagagttaaatgaagagtctcgaggttctacaatctctctgatgagaacagattgtctataaaatcccacagtccttgggaagttggggaccacatacactgttgggatgtacattgatacaacctttatgatggcaatttgacaatatttattaaaataaaaaatggttattcccttcatatcagtttctagaaggatttctaagaatgtatcctatagaaacaccttcacaagtttataagggcttatggaaaaaggtgttcatcccaggattgtttataatcatgaaaaatgtggccaggtgcagtggctcactcttgtaatcccagcactatgggaggccaaggtgggtgacccacgaggtcaagagatggagaccatcctggccaacatggtgaaaccctgtctctactaaaaatacaaaaattagctgggcgtgatggtgcacgcctgtagtcccagctacttgggaggctgaggcaggagaatcgcttgaacccgggaggtggcagttgcagtgagctgagatcgagccactgcactccagcctggtgacagagcgagactccatctc

SEQ ID NO: 4571 - protein, 811 aa, Homo sapiens; identical to SEQ ID NO: 514

SEQ ID NO: 4572 - DNA, 3266 bp, Homo sapiens
aattctgaccgtgtcaacgaatcatccacgcacctgcagctctgctgagagagtgcaagccgtggggctatcaaaaggagatgtgagagagggtattgagtctggcctgacaatgcagttcttaaaccaaaggtccattatgcttctcctctctgagaatcctgacttacctcaacaacggagacatggcacagtagccagcttggagacttctcagccaatgctctgagatcaagtcgaagacccaatatacagggttttgagctcatcttcatcattcatatgaggaaataagtggtaaaatccttggaaatacaatgagactcatcagaaacatttacatattttgtagtattgttatgacagcagagggtgatgctccagagctgccagaagaaagggaactgatgaccaactgctccaacatgtctctaagaaaggttcccgcagacttgaccccagccacaacgacactggatttatcctataacctcctttttcaactccagagttcagattttcattctgtctccaaactgagagttttgattctatgccataacagaattcaacagctggatctcaaaacctttgaattcaacaaggagttaagatatttagatttgtctaataacagactgaagagtgtaacttggtatttactggcaggtctcaggtatttagatctttcttttaatgactttgacaccatgcctatctgtgaggaagctggcaacatgtcacacctggaaatcctaggtttgagtggggcaaaaatacaaaaatcagatttccagaaaattgctcatctgcatctaaatactgtcttcttaggattcagaactcttcctcattatgaagaaggtagcctgcccatcttaaacacaacaaaactgcacattgttttaccaatggacacaaatttctgggttcttttgcgtgatggaatcaagacttcaaaaatattagaaatgacaaatatagatggcaaaagccaatttgtaagttatgaaatgcaacgaaatcttagtttagaaaatgctaagacatcggttctattgcttaataaagttgatttactctgggacgaccttttccttatcttacaatttgtttggcatacatcagtggaacactttcagatccgaaatgtgacttttggtggtaaggcttatcttgaccacaattcatttgactactcaaatactgtaatgagaactataaaattggagcatgtacatttcagagtgttttacattcaacaggataaaatctatttgcttttgaccaaaatggacatagaaaacctgacaatatcaaatgcacaaatgccacacatgcttttcccgaattatcctacgaaattccaatatttaaattttgccaataatatcttaacagacgagttgtttaaaagaactatccaactgcctcacttgaaaactctcattttgaatggcaataaactggagacactttctttagtaagttgctttgctaacaacacacccttggaacacttggatctgagtcaaaatctattacaacataaaaatgatgaaaattgctcatggccagaaactgtggtcaatatgaatctgtcatacaataaattgtctgattctgtcttcaggtgcttgcccaaaagtattcaaatacttgacctaaataataaccaaatccaaactgtacctaaagagactattcatctgatggccttacgagaactaaatattgcatttaattttctaactgatctccctggatgcagtcatttcagtagactttcagttctgaacattgaaatgaacttcattctcagcccatctctggattttgttcagagctgccaggaagttaaaactctaaatgcgggaagaaatccattccggtgtacctgtgaattaaaaaatttcattcagcttgaaacatattcagaggtcatgatggttggatggtcagattcatacacctgtgaataccctttaaacctaaggggaactaggttaaaagacgttcatctccacgaattatcttgcaacacagctctgttgattgtcaccattgtggttattatgctagttctggggttggctgtggccttctgctgtctccactttgatctgccctggtatctcaggatgctaggtcaatgcacacaaacatggcacagggttaggaaaacaacccaagaacaactcaagagaaatgtccgattccacgcatttatttcatacagtgaacatgattctctgtgggtgaagaatgaattgatccccaatctagagaaggaagatggttctatcttgatttgcctttatgaaagctactttgaccctggcaaaagcattagtgaaaatattgtaagcttcattgagaaaagctataagtccatctttgttttgtctcccaactttgtccagaatgagtggtgccattatgaattctactttgcccaccacaatctcttccatgaaaattctgatcatataattcttatcttactggaacccattccattctattgcattcccaccaggtatcataaactgaaagctctcctggaaaaaaaagcatacttggaatggcccaaggataggcgtaaatgtgggcttttctgggcaaaccttcgagctgctattaatgttaatgtattagccaccagagaaatgtatgaactgcagacattcacagagttaaatgaagagtctcgaggttctacaatctctctgatgagaacagattgtctataaaatcccacagtccttgggaagttggggaccacatacactgttgggatgtacattgatacaacctttatgatggcaatttgacaatatttattaaaataaaaaatggttattcccttcatatcagtttctagaaggatttctaagaatgtatcctatagaaacaccttcacaagtttataagggcttatggaaaaaggtgttcatcccaggattgtttataatcatgaaaaatgtggccaggtgcagtggctcactcttgtaatcccagcactatgggaggccaaggtgggtgacccacgaggtcaagagatggagaccatcctggccaacatggtgaaaccctgtctctactaaaaatacaaaaattagctgggcgtgatggtgcacgcctgtagtcccagctacttgggaggctgaggcaggagaatcgcttgaacccgggaggtggcagttgcagtgagctgagatcgagccactgcactccagcctggtgacagagcgagactccatctc

SEQ ID NO: 4573 - protein, 811 aa, Homo sapiens; identical to SEQ ID NO: 514

SEQ ID NO: 4574 - DNA, 3394 bp, Homo sapiens
aattctgaccgtgtcaacgaatcatccacgcacctgcagctctgctgagagagtgcaagccgtgggaattcagcagctgaatatcaagacctttgaattcaacaagaagttaagacatttatagttgtctaacaacagactgaagattgtggcttggtattcactggcaggtttcagacatttagatctttcttttaatgactaacaccatgcctatctgtggagaagctggcaacatgtcacacctggaaattgtttttcaacattaatactattatttggcagtaatccagattgcttttgccaccaacctgaagacatatagaggcagaaggacaggaataattctatttgtttcctgttttgaaacttccatctgtaagggttttgagctcatcttcatcattcatatgaggaaataagtggtaaaatccttggaaatacaatgagactcatcagaaacatttacatattttgtagtattgttatgacagcagagggtgatgctccagagctgccagaagaaagggaactgatgaccaactgctccaacatgtctctaagaaaggttcccgcagacttgaccccagccacaacgacactggatttatcctataacctcctttttcaactccagagttcagattttcattctgtctccaaactgagagttttgattctatgccataacagaattcaacagctggatctcaaaacctttgaattcaacaaggagttaagatatttagatttgtctaataacagactgaagagtgtaacttggtatttactggcaggtctcaggtatttagatctttcttttaatgactttgacaccatgcctatctgtgaggaagctggcaacatgtcacacctggaaatcctaggtttgagtggggcaaaaatacaaaaatcagatttccagaaaattgctcatctgcatctaaatactgtcttcttaggattcagaactcttcctcattatgaagaaggtagcctgcccatcttaaacacaacaaaactgcacattgttttaccaatggacacaaatttctgggttcttttgcgtgatggaatcaagacttcaaaaatattagaaatgacaaatatagatggcaaaagccaatttgtaagttatgaaatgcaacgaaatcttagtttagaaaatgctaagacatcggttctattgcttaataaagttgatttactctgggacgaccttttccttatcttacaatttgtttggcatacatcagtggaacactttcagatccgaaatgtgacttttggtggtaaggcttatcttgaccacaattcatttgactactcaaatactgtaatgagaactataaaattggagcatgtacatttcagagtgttttacattcaacaggataaaatctatttgcttttgaccaaaatggacatagaaaacctgacaatatcaaatgcacaaatgccacacatgcttttcccgaattatcctacgaaattccaatatttaaattttgccaataatatcttaacagacgagttgtttaaaagaactatccaactgcctcacttgaaaactctcattttgaatggcaataaactggagacactttctttagtaagttgctttgctaacaacacacccttggaacacttggatctgagtcaaaatctattacaacataaaaatgatgaaaattgctcatggccagaaactgtggtcaatatgaatctgtcatacaataaattgtctgattctgtcttcaggtgcttgcccaaaagtattcaaatacttgacctaaataataaccaaatccaaactgtacctaaagagactattcatctgatggccttacgagaactaaatattgcatttaattttctaactgatctccctggatgcagtcatttcagtagactttcagttctgaacattgaaatgaacttcattctcagcccatctctggattttgttcagagctgccaggaagttaaaactctaaatgcgggaagaaatccattccggtgtacctgtgaattaaaaaatttcattcagcttgaaacatattcagaggtcatgatggttggatggtcagattcatacacctgtgaataccctttaaacctaaggggaactaggttaaaagacgttcatctccacgaattatcttgcaacacagctctgttgattgtcaccattgtggttattatgctagttctggggttggctgtggccttctgctgtctccactttgatctgccctggtatctcaggatgctaggtcaatgcacacaaacatggcacagggttaggaaaacaacccaagaacaactcaagagaaatgtccgattccacgcatttatttcatacagtgaacatgattctctgtgggtgaagaatgaattgatccccaatctagagaaggaagatggttctatcttgatttgcctttatgaaagctactttgaccctggcaaaagcattagtgaaaatattgtaagcttcattgagaaaagctataagtccatctttgttttgtctcccaactttgtccagaatgagtggtgccattatgaattctactttgcccaccacaatctcttccatgaaaattctgatcatataattcttatcttactggaacccattccattctattgcattcccaccaggtatcataaactgaaagctctcctggaaaaaaaagcatacttggaatggcccaaggataggcgtaaatgtgggcttttctgggcaaaccttcgagctgctattaatgttaatgtattagccaccagagaaatgtatgaactgcagacattcacagagttaaatgaagagtctcgaggttctacaatctctctgatgagaacagattgtctataaaatcccacagtccttgggaagttggggaccacatacactgttgggatgtacattgatacaacctttatgatggcaatttgacaatatttattaaaataaaaaatggttattcccttcatatcagtttctagaaggatttctaagaatgtatcctatagaaacaccttcacaagtttataagggcttatggaaaaaggtgttcatcccaggattgtttataatcatgaaaaatgtggccaggtgcagtggctcactcttgtaatcccagcactatgggaggccaaggtgggtgacccacgaggtcaagagatggagaccatcctggccaacatggtgaaaccctgtctctactaaaaatacaaaaattagctgggcgtgatggtgcacgcctgtagtcccagctacttgggaggctgaggcaggagaatcgcttgaacccgggaggtggcagttgcagtgagctgagatcgagccactgcactccagcctggtgacagagcgagactccatctc

SEQ ID NO: 4575 - protein, 811 aa, Homo sapiens; identical to SEQ ID NO: 514

SEQ ID NO: 4576 - DNA, 3300 bp, Homo sapiens
gccaattctgaccgtgtcaacgaatcatccacgcacctgcagctctgctgagagagtgcaagccgtgggaattcagcagctgaatatcaagacctttgaattcaacaagaagttaagacatttatagttgtctaacaacagactgaagattgtggcttggtattcactggcaggtttcagacatttagatctttcttttaatgactaacaccatgcctatctgtggagaagctggcaacatgtcacacctggaaattgtttttcaacattaatactattatttggcagtaatccagattgcttttgccaccaacctgaagacatatagaggcagaaggacaggaataattctatttgtttcctgttttgaaacttccatctgtaagtattgttatgacagcagagggtgatgctccagagctgccagaagaaagggaactgatgaccaactgctccaacatgtctctaagaaaggttcccgcagacttgaccccagccacaacgacactggatttatcctataacctcctttttcaactccagagttcagattttcattctgtctccaaactgagagttttgattctatgccataacagaattcaacagctggatctcaaaacctttgaattcaacaaggagttaagatatttagatttgtctaataacagactgaagagtgtaacttggtatttactggcaggtctcaggtatttagatctttcttttaatgactttgacaccatgcctatctgtgaggaagctggcaacatgtcacacctggaaatcctaggtttgagtggggcaaaaatacaaaaatcagatttccagaaaattgctcatctgcatctaaatactgtcttcttaggattcagaactcttcctcattatgaagaaggtagcctgcccatcttaaacacaacaaaactgcacattgttttaccaatggacacaaatttctgggttcttttgcgtgatggaatcaagacttcaaaaatattagaaatgacaaatatagatggcaaaagccaatttgtaagttatgaaatgcaacgaaatcttagtttagaaaatgctaagacatcggttctattgcttaataaagttgatttactctgggacgaccttttccttatcttacaatttgtttggcatacatcagtggaacactttcagatccgaaatgtgacttttggtggtaaggcttatcttgaccacaattcatttgactactcaaatactgtaatgagaactataaaattggagcatgtacatttcagagtgttttacattcaacaggataaaatctatttgcttttgaccaaaatggacatagaaaacctgacaatatcaaatgcacaaatgccacacatgcttttcccgaattatcctacgaaattccaatatttaaattttgccaataatatcttaacagacgagttgtttaaaagaactatccaactgcctcacttgaaaactctcattttgaatggcaataaactggagacactttctttagtaagttgctttgctaacaacacacccttggaacacttggatctgagtcaaaatctattacaacataaaaatgatgaaaattgctcatggccagaaactgtggtcaatatgaatctgtcatacaataaattgtctgattctgtcttcaggtgcttgcccaaaagtattcaaatacttgacctaaataataaccaaatccaaactgtacctaaagagactattcatctgatggccttacgagaactaaatattgcatttaattttctaactgatctccctggatgcagtcatttcagtagactttcagttctgaacattgaaatgaacttcattctcagcccatctctggattttgttcagagctgccaggaagttaaaactctaaatgcgggaagaaatccattccggtgtacctgtgaattaaaaaatttcattcagcttgaaacatattcagaggtcatgatggttggatggtcagattcatacacctgtgaataccctttaaacctaaggggaactaggttaaaagacgttcatctccacgaattatcttgcaacacagctctgttgattgtcaccattgtggttattatgctagttctggggttggctgtggccttctgctgtctccactttgatctgccctggtatctcaggatgctaggtcaatgcacacaaacatggcacagggttaggaaaacaacccaagaacaactcaagagaaatgtccgattccacgcatttatttcatacagtgaacatgattctctgtgggtgaagaatgaattgatccccaatctagagaaggaagatggttctatcttgatttgcctttatgaaagctactttgaccctggcaaaagcattagtgaaaatattgtaagcttcattgagaaaagctataagtccatctttgttttgtctcccaactttgtccagaatgagtggtgccattatgaattctactttgcccaccacaatctcttccatgaaaattctgatcatataattcttatcttactggaacccattccattctattgcattcccaccaggtatcataaactgaaagctctcctggaaaaaaaagcatacttggaatggcccaaggataggcgtaaatgtgggcttttctgggcaaaccttcgagctgctattaatgttaatgtattagccaccagagaaatgtatgaactgcagacattcacagagttaaatgaagagtctcgaggttctacaatctctctgatgagaacagattgtctataaaatcccacagtccttgggaagttggggaccacatacactgttgggatgtacattgatacaacctttatgatggcaatttgacaatatttattaaaataaaaaatggttattcccttcatatcagtttctagaaggatttctaagaatgtatcctatagaaacaccttcacaagtttataagggcttatggaaaaaggtgttcatcccaggattgtttataatcatgaaaaatgtggccaggtgcagtggctcactcttgtaatcccagcactatgggaggccaaggtgggtgacccacgaggtcaagagatggagaccatcctggccaacatggtgaaaccctgtctctactaaaaatacaaaaattagctgggcgtgatggtgcacgcctgtagtcccagctacttgggaggctgaggcaggagaatcgcttgaacccgggaggtggcagttgcagtgagctgagatcgagccactgcactccagcctggtgacagagcgagactccatctc

SEQ ID NO: 4577 - protein, 797 aa, Homo sapiens
MTAEGDAPELPEERELMTNCSNMSLRKVPADLTPATTTLDLSYNLLFQLQSSDFHSVSKLRVLILCHNRIQQLDLKTFEFNKELRYLDLSNNRLKSVTWYLLAGLRYLDLSFNDFDTMPICEEAGNMSHLEILGLSGAKIQKSDFQKIAHLHLNTVFLGFRTLPHYEEGSLPILNTTKLHIVLPMDTNFWVLLRDGIKTSKILEMTNIDGKSQFVSYEMQRNLSLENAKTSVLLLNKVDLLWDDLFLILQFVWHTSVEHFQIRNVTFGGKAYLDHNSFDYSNTVMRTIKLEHVHFRVFYIQQDKIYLLLTKMDIENLTISNAQMPHMLFPNYPTKFQYLNFANNILTDELFKRTIQLPHLKTLILNGNKLETLSLVSCFANNTPLEHLDLSQNLLQHKNDENCSWPETVVNMNLSYNKLSDSVFRCLPKSIQILDLNNNQIQTVPKETIHLMALRELNIAFNFLTDLPGCSHFSRLSVLNIEMNFILSPSLDFVQSCQEVKTLNAGRNPFRCTCELKNFIQLETYSEVMMVGWSDSYTCEYPLNLRGTRLKDVHLHELSCNTALLIVTIVVIMLVLGLAVAFCCLHFDLPWYLRMLGQCTQTWHRVRKTTQEQLKRNVRFHAFISYSEHDSLWVKNELIPNLEKEDGSILICLYESYFDPGKSISENIVSFIEKSYKSIFVLSPNFVQNEWCHYEFYFAHHNLFHENSDHIILILLEPIPFYCIPTRYHKLKALLEKKAYLEWPKDRRKCGLFWANLRAAINVNVLATREMYELQTFTELNEESRGSTISLMRTDCL

SEQ ID NO: 4578 - DNA, 3587 bp, Homo sapiens
agccaattctgaccgtgtcaacgaatcatccacgcacctgcagctctgctgagagagtgcaagccgtgggaattcagcagctgaatatcaagacctttgaattcaacaagaagttaagacatttatagttgtctaacaacagactgaagattgtggcttggtattcactggcaggtttcagacatttagatctttcttttaatgactaacaccatgcctatctgtggagaagctggcaacatgtcacacctggaaattgtttttcaacattaatactattatttggcagtaatccagattgcttttgccaccaacctgaagacatatagaggcagaaggacaggaataattctatttgtttcctgttttgaaacttccatctgtaaggctatcaaaaggagatgtgagagagggtattgagtctggcctgacaatgcagttcttaaaccaaaggtccattatgcttctcctctctgagaatcctgacttacctcaacaacggagacatggcacagtagccagcttggagacttctcagccaatgctctgagatcaagtcgaagacccaatatacagggttttgagctcatcttcatcattcatatgaggaaataagtggtaaaatccttggaaatacaatgagactcatcagaaacatttacatattttgtagtattgttatgacagcagagggtgatgctccagagctgccagaagaaagggaactgatgaccaactgctccaacatgtctctaagaaaggttcccgcagacttgaccccagccacaacgacactggatttatcctataacctcctttttcaactccagagttcagattttcattctgtctccaaactgagagttttgattctatgccataacagaattcaacagctggatctcaaaacctttgaattcaacaaggagttaagatatttagatttgtctaataacagactgaagagtgtaacttggtatttactggcaggtctcaggtatttagatctttcttttaatgactttgacaccatgcctatctgtgaggaagctggcaacatgtcacacctggaaatcctaggtttgagtggggcaaaaatacaaaaatcagatttccagaaaattgctcatctgcatctaaatactgtcttcttaggattcagaactcttcctcattatgaagaaggtagcctgcccatcttaaacacaacaaaactgcacattgttttaccaatggacacaaatttctgggttcttttgcgtgatggaatcaagacttcaaaaatattagaaatgacaaatatagatggcaaaagccaatttgtaagttatgaaatgcaacgaaatcttagtttagaaaatgctaagacatcggttctattgcttaataaagttgatttactctgggacgaccttttccttatcttacaatttgtttggcatacatcagtggaacactttcagatccgaaatgtgacttttggtggtaaggcttatcttgaccacaattcatttgactactcaaatactgtaatgagaactataaaattggagcatgtacatttcagagtgttttacattcaacaggataaaatctatttgcttttgaccaaaatggacatagaaaacctgacaatatcaaatgcacaaatgccacacatgcttttcccgaattatcctacgaaattccaatatttaaattttgccaataatatcttaacagacgagttgtttaaaagaactatccaactgcctcacttgaaaactctcattttgaatggcaataaactggagacactttctttagtaagttgctttgctaacaacacacccttggaacacttggatctgagtcaaaatctattacaacataaaaatgatgaaaattgctcatggccagaaactgtggtcaatatgaatctgtcatacaataaattgtctgattctgtcttcaggtgcttgcccaaaagtattcaaatacttgacctaaataataaccaaatccaaactgtacctaaagagactattcatctgatggccttacgagaactaaatattgcatttaattttctaactgatctccctggatgcagtcatttcagtagactttcagttctgaacattgaaatgaacttcattctcagcccatctctggattttgttcagagctgccaggaagttaaaactctaaatgcgggaagaaatccattccggtgtacctgtgaattaaaaaatttcattcagcttgaaacatattcagaggtcatgatggttggatggtcagattcatacacctgtgaataccctttaaacctaaggggaactaggttaaaagacgttcatctccacgaattatcttgcaacacagctctgttgattgtcaccattgtggttattatgctagttctggggttggctgtggccttctgctgtctccactttgatctgccctggtatctcaggatgctaggtcaatgcacacaaacatggcacagggttaggaaaacaacccaagaacaactcaagagaaatgtccgattccacgcatttatttcatacagtgaacatgattctctgtgggtgaagaatgaattgatccccaatctagagaaggaagatggttctatcttgatttgcctttatgaaagctactttgaccctggcaaaagcattagtgaaaatattgtaagcttcattgagaaaagctataagtccatctttgttttgtctcccaactttgtccagaatgagtggtgccattatgaattctactttgcccaccacaatctcttccatgaaaattctgatcatataattcttatcttactggaacccattccattctattgcattcccaccaggtatcataaactgaaagctctcctggaaaaaaaagcatacttggaatggcccaaggataggcgtaaatgtgggcttttctgggcaaaccttcgagctgctattaatgttaatgtattagccaccagagaaatgtatgaactgcagacattcacagagttaaatgaagagtctcgaggttctacaatctctctgatgagaacagattgtctataaaatcccacagtccttgggaagttggggaccacatacactgttgggatgtacattgatacaacctttatgatggcaatttgacaatatttattaaaataaaaaatggttattcccttcatatcagtttctagaaggatttctaagaatgtatcctatagaaacaccttcacaagtttataagggcttatggaaaaaggtgttcatcccaggattgtttataatcatgaaaaatgtggccaggtgcagtggctcactcttgtaatcccagcactatgggaggccaaggtgggtgacccacgaggtcaagagatggagaccatcctggccaacatggtgaaaccctgtctctactaaaaatacaaaaattagctgggcgtgatggtgcacgcctgtagtcccagctacttgggaggctgaggcaggagaatcgcttgaacccgggaggtggcagttgcagtgagctgagatcgagccactgcactccagcctggtgacagagcgagactccatctc

SEQ ID NO: 4579 - protein, 811 aa, Homo sapiens; identical to SEQ ID NO: 514

SEQ ID NO: 4580 - DNA, 1086 bp, Homo sapiens
aattctgaccgtgtcaacgaatcatccacgcacctgcagctctgctgagagagtgcaagccgtggggctatcaaaaggagatgtgagagagggtattgagtctggcctgacaatgcagttcttaaaccaaaggtccattatgcttctcctctctgagaatcctgacttacctcaacaacggagacatggcacagtagccagcttggagacttctcagccaatgctctgagatcaagtcgaagacccaatatacagggttttgagctcatcttcatcattcatatgaggaaataagtggtaaaatccttggaaatacaatgagactcatcagaaacatttacatattttgtagtattgttatgacagcagagggtgatgctccagagctgccagaagaaagggaactgatgaccaactgctccaacatgtctctaagaaaggttcccgcagacttgaccccagccacaacgacactggatttatcctataacctcctttttcaactccagagttcagattttcattctgtctccaaactgagagttttgattctatgccataacagaattcaacagctggatctcaaaacctttgaattcaacaaggagttaagatatttagatttgtctaataacagactgaagagtgtaacttggtatttactggcaggtctcaggtatttagatctttcttttaatgactttgacaccatgcctatctgtgaggaagctggcaacatgtcacacctggaaatcctaggtttgagtggggcaaaaatacaaaaatcagatttccagaaaattgctcatctgcatctaaatactgtcttcttaggattcagaactcttcctcattatgaagaaggtagcctgcccatcttaaacacaacaaaactgcacattgttttaccaatggacacaaatttctgggttcttttgcgtgatggaatcaagacttcaaaaatattagaaatgacaaatatagatggcaaaagccaatttgtaagttatgaaatgcaacgaaatcttagtttagaaaatgctaagacatcggttctattgcttaataaagttgatttactctggg

SEQ ID NO: 4581 - protein, 255 aa, Homo sapiens
MRLIRNIYIFCSIVMTAEGDAPELPEERELMTNCSNMSLRKVPADLTPATTTLDLSYNLLFQLQSSDFHSVSKLRVLILCHNRIQQLDLKTFEFNKELRYLDLSNNRLKSVTWYLLAGLRYLDLSFNDFDTMPICEEAGNMSHLEILGLSGAKIQKSDFQKIAHLHLNTVFLGFRTLPHYEEGSLPILNTTKLHIVLPMDTNFWVLLRDGIKTSKILEMTNIDGKSQFVSYEMQRNLSLENAKTSVLLLNKVDLL

SEQ ID NO: 4582 - DNA, 1214 bp, Homo sapiens
aattctgaccgtgtcaacgaatcatccacgcacctgcagctctgctgagagagtgcaagccgtgggaattcagcagctgaatatcaagacctttgaattcaacaagaagttaagacatttatagttgtctaacaacagactgaagattgtggcttggtattcactggcaggtttcagacatttagatctttcttttaatgactaacaccatgcctatctgtggagaagctggcaacatgtcacacctggaaattgtttttcaacattaatactattatttggcagtaatccagattgcttttgccaccaacctgaagacatatagaggcagaaggacaggaataattctatttgtttcctgttttgaaacttccatctgtaagggttttgagctcatcttcatcattcatatgaggaaataagtggtaaaatccttggaaatacaatgagactcatcagaaacatttacatattttgtagtattgttatgacagcagagggtgatgctccagagctgccagaagaaagggaactgatgaccaactgctccaacatgtctctaagaaaggttcccgcagacttgaccccagccacaacgacactggatttatcctataacctcctttttcaactccagagttcagattttcattctgtctccaaactgagagttttgattctatgccataacagaattcaacagctggatctcaaaacctttgaattcaacaaggagttaagatatttagatttgtctaataacagactgaagagtgtaacttggtatttactggcaggtctcaggtatttagatctttcttttaatgactttgacaccatgcctatctgtgaggaagctggcaacatgtcacacctggaaatcctaggtttgagtggggcaaaaatacaaaaatcagatttccagaaaattgctcatctgcatctaaatactgtcttcttaggattcagaactcttcctcattatgaagaaggtagcctgcccatcttaaacacaacaaaactgcacattgttttaccaatggacacaaatttctgggttcttttgcgtgatggaatcaagacttcaaaaatattagaaatgacaaatatagatggcaaaagccaatttgtaagttatgaaatgcaacgaaatcttagtttagaaaatgctaagacatcggttctattgcttaataaagttgatttactctggg

SEQ ID NO: 4583 - protein, 255 aa, Homo sapiens; identical to SEQ ID NO: 4581

SEQ ID NO: 4584 - DNA, 1120 bp, Homo sapiens
gccaattctgaccgtgtcaacgaatcatccacgcacctgcagctctgctgagagagtgcaagccgtgggaattcagcagctgaatatcaagacctttgaattcaacaagaagttaagacatttatagttgtctaacaacagactgaagattgtggcttggtattcactggcaggtttcagacatttagatctttcttttaatgactaacaccatgcctatctgtggagaagctggcaacatgtcacacctggaaattgtttttcaacattaatactattatttggcagtaatccagattgcttttgccaccaacctgaagacatatagaggcagaaggacaggaataattctatttgtttcctgttttgaaacttccatctgtaagtattgttatgacagcagagggtgatgctccagagctgccagaagaaagggaactgatgaccaactgctccaacatgtctctaagaaaggttcccgcagacttgaccccagccacaacgacactggatttatcctataacctcctttttcaactccagagttcagattttcattctgtctccaaactgagagttttgattctatgccataacagaattcaacagctggatctcaaaacctttgaattcaacaaggagttaagatatttagatttgtctaataacagactgaagagtgtaacttggtatttactggcaggtctcaggtatttagatctttcttttaatgactttgacaccatgcctatctgtgaggaagctggcaacatgtcacacctggaaatcctaggtttgagtggggcaaaaatacaaaaatcagatttccagaaaattgctcatctgcatctaaatactgtcttcttaggattcagaactcttcctcattatgaagaaggtagcctgcccatcttaaacacaacaaaactgcacattgttttaccaatggacacaaatttctgggttcttttgcgtgatggaatcaagacttcaaaaatattagaaatgacaaatatagatggcaaaagccaatttgtaagttatgaaatgcaacgaaatcttagtttagaaaatgctaagacatcggttctattgcttaataaagttgatttactctggg

SEQ ID NO: 4585 - protein, 241 aa, Homo sapiens
MTAEGDAPELPEERELMTNCSNMSLRKVPADLTPATTTLDLSYNLLFQLQSSDFHSVSKLRVLILCHNRIQQLDLKTFEFNKELRYLDLSNNRLKSVTWYLLAGLRYLDLSFNDFDTMPICEEAGNMSHLEILGLSGAKIQKSDFQKIAHLHLNTVFLGFRTLPHYEEGSLPILNTTKLHIVLPMDTNFWVLLRDGIKTSKILEMTNIDGKSQFVSYEMQRNLSLENAKTSVLLLNKVDLL

SEQ ID NO: 4586 - DNA, 901 bp, Homo sapiens
agccaattctgaccgtgtcaacgaatcatccacgcacctgcagctctgctgagagagtgcaagccgtgggggttttgagctcatcttcatcattcatatgaggaaataagtggtaaaatccttggaaatacaatgagactcatcagaaacatttacatattttgtagtattgttatgacagcagagggtgatgctccagagctgccagaagaaagggaactgatgaccaactgctccaacatgtctctaagaaaggttcccgcagacttgaccccagccacaacgacactggatttatcctataacctcctttttcaactccagagttcagattttcattctgtctccaaactgagagttttgattctatgccataacagaattcaacagctggatctcaaaacctttgaattcaacaaggagttaagatatttagatttgtctaataacagactgaagagtgtaacttggtatttactggcaggtctcaggtatttagatctttcttttaatgactttgacaccatgcctatctgtgaggaagctggcaacatgtcacacctggaaatcctaggtttgagtggggcaaaaatacaaaaatcagatttccagaaaattgctcatctgcatctaaatactgtcttcttaggattcagaactcttcctcattatgaagaaggtagcctgcccatcttaaacacaacaaaactgcacattgttttaccaatggacacaaatttctgggttcttttgcgtgatggaatcaagacttcaaaaatattagaaatgacaaatatagatggcaaaagccaatttgtaagttatgaaatgcaacgaaatcttagtttagaaaatgctaagacatcggttctattgcttaataaagttgatttactctggg

SEQ ID NO: 4587 - protein, 255 aa, Homo sapiens; identical to SEQ ID NO: 4581

SEQ ID NO: 4588 - DNA, 1407 bp, Homo sapiens
agccaattctgaccgtgtcaacgaatcatccacgcacctgcagctctgctgagagagtgcaagccgtgggaattcagcagctgaatatcaagacctttgaattcaacaagaagttaagacatttatagttgtctaacaacagactgaagattgtggcttggtattcactggcaggtttcagacatttagatctttcttttaatgactaacaccatgcctatctgtggagaagctggcaacatgtcacacctggaaattgtttttcaacattaatactattatttggcagtaatccagattgcttttgccaccaacctgaagacatatagaggcagaaggacaggaataattctatttgtttcctgttttgaaacttccatctgtaaggctatcaaaaggagatgtgagagagggtattgagtctggcctgacaatgcagttcttaaaccaaaggtccattatgcttctcctctctgagaatcctgacttacctcaacaacggagacatggcacagtagccagcttggagacttctcagccaatgctctgagatcaagtcgaagacccaatatacagggttttgagctcatcttcatcattcatatgaggaaataagtggtaaaatccttggaaatacaatgagactcatcagaaacatttacatattttgtagtattgttatgacagcagagggtgatgctccagagctgccagaagaaagggaactgatgaccaactgctccaacatgtctctaagaaaggttcccgcagacttgaccccagccacaacgacactggatttatcctataacctcctttttcaactccagagttcagattttcattctgtctccaaactgagagttttgattctatgccataacagaattcaacagctggatctcaaaacctttgaattcaacaaggagttaagatatttagatttgtctaataacagactgaagagtgtaacttggtatttactggcaggtctcaggtatttagatctttcttttaatgactttgacaccatgcctatctgtgaggaagctggcaacatgtcacacctggaaatcctaggtttgagtggggcaaaaatacaaaaatcagatttccagaaaattgctcatctgcatctaaatactgtcttcttaggattcagaactcttcctcattatgaagaaggtagcctgcccatcttaaacacaacaaaactgcacattgttttaccaatggacacaaatttctgggttcttttgcgtgatggaatcaagacttcaaaaatattagaaatgacaaatatagatggcaaaagccaatttgtaagttatgaaatgcaacgaaatcttagtttagaaaatgctaagacatcggttctattgcttaataaagttgatttactctggg

SEQ ID NO: 4589 - protein, 255 aa, Homo sapiens; identical to SEQ ID NO: 4581

SEQ ID NO: 4590 - DNA, 891 bp, Homo sapiens
cattaggtcttgaaggaagactttaactttggatttttcaatgtgtaatgatgaagaatggaaaggccattctaaacagaaagataaagagagcaaaggaaaacagttcctcctgaggatttcagagaagagctggacttcctggctgactctcacattctcttcttctgaactgcttcttctggtagctccctgtcactttggacaagctcgcactgccctccttggctgttctggaactgtgtgatggacttcatcctactaggacacagttgcttcttgaattccccagataaacacccacccgtgtgaatgacaagccataataaaaattaattgtcaaaattaatcaacaaggtcccaaacaagattgagagccaggggacagaagtgccaccggtaattatatagtcacaggcagacctatgaggatgttcatctttcctctaagacaacttgaagttacagacgtttcttagaacttaaaaagtttgatagccccttacccaaagaaatagaagcattggaaaatatgttaaagaaatttctatgaaattagaacaaaatgacttattttgcaagagaaaaaataagtaaaagcctaactctgagaagtccacatccatctaataggtgttccagaatcagaaaaagagatgaggtgaagacattatcaaaaaaaataataataataagacggagaaatcccactgaaggacatgaatctcctaaaagtacccagcaaaacgaacagttcaaagacccaaaccaaggcactttctcttgaaattttagaccatcaggaacaacaatagtaaaagcttccagagagagagaaagaaaaaagaaaccaggttacatacaaagaatcagaaatcagaataaccatgc

SEQ ID NO: 4591 - protein, 68 aa, Homo sapiens [sequence omitted]

SEQ ID NO: 4592 - DNA, 1028 bp, Homo sapiens
taaattcaaggaagtgcttgaatttcttacagactgccaaatggaacagacaagcaggttgtcttgtgttaaagaaaatgagatataagtcagttactcccggaggcaatgctgctgttcagctcttctgtttttgtggccagggtcttcatgaacactaataggggtaccaggccctcttcctcgttagaagaaatcaggataacaaaggcatattgggcacccctacaaaagggaaaacagttcctcctgaggatttcagagaagagctggacttcctggctgactctcacattctcttcttctgaactgcttcttctggtagctccctgtcactttggacaagctcgcactgccctccttggctgttctggaactgtgtgatggacttcatcctactaggacacagttgcttcttgaattccccagataaacacccacccgtgtgaatgacaagccataataaaaattaattgtcaaaattaatcaacaaggtcccaaacaagattgagagccaggggacagaagtgccaccggtaattatatagtcacaggcagacctatgaggatgttcatctttcctctaagacaacttgaagttacagacgtttcttagaacttaaaaagtttgatagccccttacccaaagaaatagaagcattggaaaatatgttaaagaaatttctatgaaattagaacaaaatgacttattttgcaagagaaaaaataagtaaaagcctaactctgagaagtccacatccatctaataggtgttccagaatcagaaaaagagatgaggtgaagacattatcaaaaaaaataataataataagacggagaaatcccactgaaggacatgaatctcctaaaagtacccagcaaaacgaacagttcaaagacccaaaccaaggcactttctcttgaaattttagaccatcaggaacaacaatagtaaaagcttccagagagagagaaagaaaaaagaaaccaggttacatacaaagaatcagaaatcagaataaccatgc

SEQ ID NO: 4593 - protein, 91 aa, Homo sapiens
MLLFSSSVFVARVFMNTNRGTRPSSSLEEIRITKAYWAPLQKGKQFLLRISEKSWTSWLTLTFSSSELLLLVAPCHFGQARTALLGCSGTV

SEQ ID NO: 4594 - DNA, 3070 bp, Homo sapiens
acagactgccaaatggaacagacaagcaggttgtcttgtgttaaagaaaatgagatataagtcagttactcccggaggcaatgctgctgttcagctcttctgtttttgtggccagacaagtcttcctagaggaaggtcacatacccgttgaagtccgccattttgcctcttggtatgcatgctcaagcctgcttgcccagctcctgagagtttgtcaggagtctgctaaccaccagcttcagggtcttcatgaacactaataggggtaccaggccctcttcctcgttagaagaaatcaggataacaaaggcatattgggcacccctacaaaaggaatctgtatctgtatcaagatgatctgaagaacagcttctacctttaggaatgtctagtgttccaaaatgactagcatcttccattttgccattatcttcatgttaatacttcagatcagaatacaattatctgaagaaagtgaatttttagttgataggtcaaaaaacggtctcatccacgttcctaaagacctatcccagaaaacaacaatcttaaatatatcgcaaaattatatatctgagctttggacttctgacatcttatcactgtcaaaactgaggattttgataatttctcataatagaatccagtatcttgatatcagtgttttcaaattcaaccaggaattggaatacttggatttgtcccacaacaagttggtgaagatttcttgccaccctactgtgaacctcaagcacttggacctgtcatttaatgcatttgatgccctgcctatatgcaaagagtttggcaatatgtctcaactaaaatttctggggttgagcaccacacacttagaaaaatctagtgtgctgccaattgctcatttgaatatcagcaaggtcttgctggtcttaggagagacttatggggaaaaagaagaccctgagggccttcaagactttaacactgagagtctgcacattgtgttccccacaaacaaagaattccattttattttggatgtgtcagtcaagactgtagcaaatctggaactatctaatatcaaatgtgtgctagaagataacaaatgttcttacttcctaagtattctggcgaaacttcaaacaaatccaaagttatcaaatcttaccttaaacaacattgaaacaacttggaattctttcattaggatcctccagctggtttggcatacaactgtatggtatttctcaatttcaaacgtgaagctacagggtcagctggacttcagagattttgattattctggcacttccttgaaggccttgtctatacaccaagttgtcagcgatgtgttcggttttccgcaaagttatatctatgaaatcttttcgaatatgaacatcaaaaatttcacagtgtctggtacacgcatggtccacatgctttgcccatccaaaattagcccgttcctgcatttggatttttccaataatctcttaacagacacggtttttgaaaattgtgggcaccttactgagttggagacacttattttacaaatgaatcaattaaaagaactttcaaaaatagctgaaatgactacacagatgaagtctctgcaacaattggatattagccagaattctgtaagctatgatgaaaagaaaggagactgttcttggactaaaagtttattaagtttaaatatgtcttcaaatatacttactgacactattttcagatgtttacctcccaggatcaaggtacttgatcttcacagcaataaaataaagagcattcctaaacaagtcgtaaaactggaagctttgcaagaactcaatgttgctttcaattctttaactgaccttcctggatgtggcagctttagcagcctttctgtattgatcattgatcacaattcagtttcccacccatcggctgatttcttccagagctgccagaagatgaggtcaataaaagcaggggacaatccattccaatgtacctgtgagctaggagaatttgtcaaaaatatagaccaagtatcaagtgaagtgttagagggctggcctgattcttataagtgtgactacccggaaagttatagaggaaccctactaaaggactttcacatgtctgaattatcctgcaacataactctgctgatcgtcaccatcgttgccaccatgctggtgttggctgtgactgtgacctccctctgcagctacttggatctgccctggtatctcaggatggtgtgccagtggacccagacccggcgcagggccaggaacatacccttagaagaactccaaagaaatctccagtttcatgcatttatttcatatagtgggcacgattctttctgggtgaagaatgaattattgccaaacctagagaaagaaggtatgcagatttgccttcatgagagaaactttgttcctggcaagagcattgtggaaaatatcatcacctgcattgagaagagttacaagtccatctttgttttgtctcccaactttgtccagagtgaatggtgccattatgaactctactttgcccatcacaatctctttcatgaaggatctaatagcttaatcctgatcttgctggaacccattccgcagtactccattcctagcagttatcacaagctcaaaagtctcatggccaggaggacttatttggaatggcccaaggaaaagagcaaacgtggccttttttgggctaacttaagggcagccattaatattaagctgacagagcaagcaaagaaatagattacacatcaagtgaaaaatattcctcctgttgatattgctgcttttggaagttccaacaatgactttattttgcatcagcatagatgtaaacacaattgtgagtgtatgatgtaggtaaaaatatataccttcgggtcgcagttcaccatttatatgtggtattaaaaattaatgaaatgatataactttgatttaaacagttctgacacataagggatccacttgtttctttgctataactgagttctgaatttatcatgaagtcaagggaagcacctgtttttcttcagtgatgtgtgttctag

SEQ ID NO: 4595 - protein, 59 aa, Homo sapiens [sequence omitted]

SEQ ID NO: 4596 - DNA, 2877 bp, Homo sapiens
ttgaatttcttacagactgccaaatggaacagacaagcaggttgtcttgggtcttcatgaacactaataggggtaccaggccctcttcctcgttagaagaaatcaggataacaaaggcatattgggcacccctacaaaaggaatctgtatctgtatcaagatgatctgaagaacagcttctacctttaggaatgtctagtgttccaaaatgactagcatcttccattttgccattatcttcatgttaatacttcagatcagaatacaattatctgaagaaagtgaatttttagttgataggtcaaaaaacggtctcatccacgttcctaaagacctatcccagaaaacaacaatcttaaatatatcgcaaaattatatatctgagctttggacttctgacatcttatcactgtcaaaactgaggattttgataatttctcataatagaatccagtatcttgatatcagtgttttcaaattcaaccaggaattggaatacttggatttgtcccacaacaagttggtgaagatttcttgccaccctactgtgaacctcaagcacttggacctgtcatttaatgcatttgatgccctgcctatatgcaaagagtttggcaatatgtctcaactaaaatttctggggttgagcaccacacacttagaaaaatctagtgtgctgccaattgctcatttgaatatcagcaaggtcttgctggtcttaggagagacttatggggaaaaagaagaccctgagggccttcaagactttaacactgagagtctgcacattgtgttccccacaaacaaagaattccattttattttggatgtgtcagtcaagactgtagcaaatctggaactatctaatatcaaatgtgtgctagaagataacaaatgttcttacttcctaagtattctggcgaaacttcaaacaaatccaaagttatcaaatcttaccttaaacaacattgaaacaacttggaattctttcattaggatcctccagctggtttggcatacaactgtatggtatttctcaatttcaaacgtgaagctacagggtcagctggacttcagagattttgattattctggcacttccttgaaggccttgtctatacaccaagttgtcagcgatgtgttcggttttccgcaaagttatatctatgaaatcttttcgaatatgaacatcaaaaatttcacagtgtctggtacacgcatggtccacatgctttgcccatccaaaattagcccgttcctgcatttggatttttccaataatctcttaacagacacggtttttgaaaattgtgggcaccttactgagttggagacacttattttacaaatgaatcaattaaaagaactttcaaaaatagctgaaatgactacacagatgaagtctctgcaacaattggatattagccagaattctgtaagctatgatgaaaagaaaggagactgttcttggactaaaagtttattaagtttaaatatgtcttcaaatatacttactgacactattttcagatgtttacctcccaggatcaaggtacttgatcttcacagcaataaaataaagagcattcctaaacaagtcgtaaaactggaagctttgcaagaactcaatgttgctttcaattctttaactgaccttcctggatgtggcagctttagcagcctttctgtattgatcattgatcacaattcagtttcccacccatcggctgatttcttccagagctgccagaagatgaggtcaataaaagcaggggacaatccattccaatgtacctgtgagctaggagaatttgtcaaaaatatagaccaagtatcaagtgaagtgttagagggctggcctgattcttataagtgtgactacccggaaagttatagaggaaccctactaaaggactttcacatgtctgaattatcctgcaacataactctgctgatcgtcaccatcgttgccaccatgctggtgttggctgtgactgtgacctccctctgcagctacttggatctgccctggtatctcaggatggtgtgccagtggacccagacccggcgcagggccaggaacatacccttagaagaactccaaagaaatctccagtttcatgcatttatttcatatagtgggcacgattctttctgggtgaagaatgaattattgccaaacctagagaaagaaggtatgcagatttgccttcatgagagaaactttgttcctggcaagagcattgtggaaaatatcatcacctgcattgagaagagttacaagtccatctttgttttgtctcccaactttgtccagagtgaatggtgccattatgaactctactttgcccatcacaatctctttcatgaaggatctaatagcttaatcctgatcttgctggaacccattccgcagtactccattcctagcagttatcacaagctcaaaagtctcatggccaggaggacttatttggaatggcccaaggaaaagagcaaacgtggccttttttgggctaacttaagggcagccattaatattaagctgacagagcaagcaaagaaatagattacacatcaagtgaaaaatattcctcctgttgatattgctgcttttggaagttccaacaatgactttattttgcatcagcatagatgtaaacacaattgtgagtgtatgatgtaggtaaaaatatataccttcgggtcgcagttcaccatttatatgtggtattaaaaattaatgaaatgatataactttgatttaaacagttctgacacataagggatccacttgtttctttgctataactgagttctgaatttatcatgaagtcaagggaagcacctgtttttcttcagtgatgtgtgttctag

SEQ ID NO: 4597 - protein, 46 aa, Homo sapiens
MEQTSRLSWVFMNTNRGTRPSSSLEEIRITKAYWAPLQKESVSVSR

SEQ ID NO: 4598 - DNA, 2991 bp, Homo sapiens
aaatgtggttaacagtgaaataaattcaaggaagtgcttgaatttcttacagactgccaaatggaacagacaagcaggttgtcttgtgttaaagaaaatgagatataagtcagttactcccggaggcaatgctgctgttcagctcttctgtttttgtggccagggtcttcatgaacactaataggggtaccaggccctcttcctcgttagaagaaatcaggataacaaaggcatattgggcacccctacaaaaggaatctgtatctgtatcaagatgatctgaagaacagcttctacctttaggaatgtctagtgttccaaaatgactagcatcttccattttgccattatcttcatgttaatacttcagatcagaatacaattatctgaagaaagtgaatttttagttgataggtcaaaaaacggtctcatccacgttcctaaagacctatcccagaaaacaacaatcttaaatatatcgcaaaattatatatctgagctttggacttctgacatcttatcactgtcaaaactgaggattttgataatttctcataatagaatccagtatcttgatatcagtgttttcaaattcaaccaggaattggaatacttggatttgtcccacaacaagttggtgaagatttcttgccaccctactgtgaacctcaagcacttggacctgtcatttaatgcatttgatgccctgcctatatgcaaagagtttggcaatatgtctcaactaaaatttctggggttgagcaccacacacttagaaaaatctagtgtgctgccaattgctcatttgaatatcagcaaggtcttgctggtcttaggagagacttatggggaaaaagaagaccctgagggccttcaagactttaacactgagagtctgcacattgtgttccccacaaacaaagaattccattttattttggatgtgtcagtcaagactgtagcaaatctggaactatctaatatcaaatgtgtgctagaagataacaaatgttcttacttcctaagtattctggcgaaacttcaaacaaatccaaagttatcaaatcttaccttaaacaacattgaaacaacttggaattctttcattaggatcctccagctggtttggcatacaactgtatggtatttctcaatttcaaacgtgaagctacagggtcagctggacttcagagattttgattattctggcacttccttgaaggccttgtctatacaccaagttgtcagcgatgtgttcggttttccgcaaagttatatctatgaaatcttttcgaatatgaacatcaaaaatttcacagtgtctggtacacgcatggtccacatgctttgcccatccaaaattagcccgttcctgcatttggatttttccaataatctcttaacagacacggtttttgaaaattgtgggcaccttactgagttggagacacttattttacaaatgaatcaattaaaagaactttcaaaaatagctgaaatgactacacagatgaagtctctgcaacaattggatattagccagaattctgtaagctatgatgaaaagaaaggagactgttcttggactaaaagtttattaagtttaaatatgtcttcaaatatacttactgacactattttcagatgtttacctcccaggatcaaggtacttgatcttcacagcaataaaataaagagcattcctaaacaagtcgtaaaactggaagctttgcaagaactcaatgttgctttcaattctttaactgaccttcctggatgtggcagctttagcagcctttctgtattgatcattgatcacaattcagtttcccacccatcggctgatttcttccagagctgccagaagatgaggtcaataaaagcaggggacaatccattccaatgtacctgtgagctaggagaatttgtcaaaaatatagaccaagtatcaagtgaagtgttagagggctggcctgattcttataagtgtgactacccggaaagttatagaggaaccctactaaaggactttcacatgtctgaattatcctgcaacataactctgctgatcgtcaccatcgttgccaccatgctggtgttggctgtgactgtgacctccctctgcagctacttggatctgccctggtatctcaggatggtgtgccagtggacccagacccggcgcagggccaggaacatacccttagaagaactccaaagaaatctccagtttcatgcatttatttcatatagtgggcacgattctttctgggtgaagaatgaattattgccaaacctagagaaagaaggtatgcagatttgccttcatgagagaaactttgttcctggcaagagcattgtggaaaatatcatcacctgcattgagaagagttacaagtccatctttgttttgtctcccaactttgtccagagtgaatggtgccattatgaactctactttgcccatcacaatctctttcatgaaggatctaatagcttaatcctgatcttgctggaacccattccgcagtactccattcctagcagttatcacaagctcaaaagtctcatggccaggaggacttatttggaatggcccaaggaaaagagcaaacgtggccttttttgggctaacttaagggcagccattaatattaagctgacagagcaagcaaagaaatagattacacatcaagtgaaaaatattcctcctgttgatattgctgcttttggaagttccaacaatgactttattttgcatcagcatagatgtaaacacaattgtgagtgtatgatgtaggtaaaaatatataccttcgggtcgcagttcaccatttatatgtggtattaaaaattaatgaaatgatataactttgatttaaacagttctgacacataagggatccacttgtttctttgctataactgagttctgaatttatcatgaagtcaagggaagcacctgtttttcttcagtgatgtgtgttctag

SEQ ID NO: 4599 - protein, 49 aa, Homo sapiens
MLLFSSSVFVARVFMNTNRGTRPSSSLEEIRITKAYWAPLQKESVSVSR

SEQ ID NO: 4600 - DNA, 2829 bp, Homo sapiens
caacaccaaatgtggttaacagtgaaataaattcaaggaagtgcttgaatttcttacagactgccaaatggaacagacaagcaggttgtcttgaatctgtatctgtatcaagatgatctgaagaacagcttctacctttaggaatgtctagtgttccaaaatgactagcatcttccattttgccattatcttcatgttaatacttcagatcagaatacaattatctgaagaaagtgaatttttagttgataggtcaaaaaacggtctcatccacgttcctaaagacctatcccagaaaacaacaatcttaaatatatcgcaaaattatatatctgagctttggacttctgacatcttatcactgtcaaaactgaggattttgataatttctcataatagaatccagtatcttgatatcagtgttttcaaattcaaccaggaattggaatacttggatttgtcccacaacaagttggtgaagatttcttgccaccctactgtgaacctcaagcacttggacctgtcatttaatgcatttgatgccctgcctatatgcaaagagtttggcaatatgtctcaactaaaatttctggggttgagcaccacacacttagaaaaatctagtgtgctgccaattgctcatttgaatatcagcaaggtcttgctggtcttaggagagacttatggggaaaaagaagaccctgagggccttcaagactttaacactgagagtctgcacattgtgttccccacaaacaaagaattccattttattttggatgtgtcagtcaagactgtagcaaatctggaactatctaatatcaaatgtgtgctagaagataacaaatgttcttacttcctaagtattctggcgaaacttcaaacaaatccaaagttatcaaatcttaccttaaacaacattgaaacaacttggaattctttcattaggatcctccagctggtttggcatacaactgtatggtatttctcaatttcaaacgtgaagctacagggtcagctggacttcagagattttgattattctggcacttccttgaaggccttgtctatacaccaagttgtcagcgatgtgttcggttttccgcaaagttatatctatgaaatcttttcgaatatgaacatcaaaaatttcacagtgtctggtacacgcatggtccacatgctttgcccatccaaaattagcccgttcctgcatttggatttttccaataatctcttaacagacacggtttttgaaaattgtgggcaccttactgagttggagacacttattttacaaatgaatcaattaaaagaactttcaaaaatagctgaaatgactacacagatgaagtctctgcaacaattggatattagccagaattctgtaagctatgatgaaaagaaaggagactgttcttggactaaaagtttattaagtttaaatatgtcttcaaatatacttactgacactattttcagatgtttacctcccaggatcaaggtacttgatcttcacagcaataaaataaagagcattcctaaacaagtcgtaaaactggaagctttgcaagaactcaatgttgctttcaattctttaactgaccttcctggatgtggcagctttagcagcctttctgtattgatcattgatcacaattcagtttcccacccatcggctgatttcttccagagctgccagaagatgaggtcaataaaagcaggggacaatccattccaatgtacctgtgagctaggagaatttgtcaaaaatatagaccaagtatcaagtgaagtgttagagggctggcctgattcttataagtgtgactacccggaaagttatagaggaaccctactaaaggactttcacatgtctgaattatcctgcaacataactctgctgatcgtcaccatcgttgccaccatgctggtgttggctgtgactgtgacctccctctgcagctacttggatctgccctggtatctcaggatggtgtgccagtggacccagacccggcgcagggccaggaacatacccttagaagaactccaaagaaatctccagtttcatgcatttatttcatatagtgggcacgattctttctgggtgaagaatgaattattgccaaacctagagaaagaaggtatgcagatttgccttcatgagagaaactttgttcctggcaagagcattgtggaaaatatcatcacctgcattgagaagagttacaagtccatctttgttttgtctcccaactttgtccagagtgaatggtgccattatgaactctactttgcccatcacaatctctttcatgaaggatctaatagcttaatcctgatcttgctggaacccattccgcagtactccattcctagcagttatcacaagctcaaaagtctcatggccaggaggacttatttggaatggcccaaggaaaagagcaaacgtggccttttttgggctaacttaagggcagccattaatattaagctgacagagcaagcaaagaaatagattacacatcaagtgaaaaatattcctcctgttgatattgctgcttttggaagttccaacaatgactttattttgcatcagcatagatgtaaacacaattgtgagtgtatgatgtaggtaaaaatatataccttcgggtcgcagttcaccatttatatgtggtattaaaaattaatgaaatgatataactttgatttaaacagttctgacacataagggatccacttgtttctttgctataactgagttctgaatttatcatgaagtcaagggaagcacctgtttttcttcagtgatgtgtgttctag

SEQ ID NO: 4601 - protein, 786 aa, Homo sapiens; identical to SEQ ID NO: 518

SEQ ID NO: 4602 - DNA, 3072 bp, Homo sapiens
agcctttttgttttgttttgttttcaacaccaaatgtggttaacagtgaaataaattcaaggaagtgcttgaatttcttacagactgccaaatggaacagacaagcaggttgtcttgacaagtcttcctagaggaaggtcacatacccgttgaagtccgccattttgcctcttggtatgcatgctcaagcctgcttgcccagctcctgagagtttgtcaggagtctgctaaccaccagcttcagggtcttcatgaacactaataggggtaccaggccctcttcctcgttagaagaaatcaggataacaaaggcatattgggcacccctacaaaaggaatctgtatctgtatcaagatgatctgaagaacagcttctacctttaggaatgtctagtgttccaaaatgactagcatcttccattttgccattatcttcatgttaatacttcagatcagaatacaattatctgaagaaagtgaatttttagttgataggtcaaaaaacggtctcatccacgttcctaaagacctatcccagaaaacaacaatcttaaatatatcgcaaaattatatatctgagctttggacttctgacatcttatcactgtcaaaactgaggattttgataatttctcataatagaatccagtatcttgatatcagtgttttcaaattcaaccaggaattggaatacttggatttgtcccacaacaagttggtgaagatttcttgccaccctactgtgaacctcaagcacttggacctgtcatttaatgcatttgatgccctgcctatatgcaaagagtttggcaatatgtctcaactaaaatttctggggttgagcaccacacacttagaaaaatctagtgtgctgccaattgctcatttgaatatcagcaaggtcttgctggtcttaggagagacttatggggaaaaagaagaccctgagggccttcaagactttaacactgagagtctgcacattgtgttccccacaaacaaagaattccattttattttggatgtgtcagtcaagactgtagcaaatctggaactatctaatatcaaatgtgtgctagaagataacaaatgttcttacttcctaagtattctggcgaaacttcaaacaaatccaaagttatcaaatcttaccttaaacaacattgaaacaacttggaattctttcattaggatcctccagctggtttggcatacaactgtatggtatttctcaatttcaaacgtgaagctacagggtcagctggacttcagagattttgattattctggcacttccttgaaggccttgtctatacaccaagttgtcagcgatgtgttcggttttccgcaaagttatatctatgaaatcttttcgaatatgaacatcaaaaatttcacagtgtctggtacacgcatggtccacatgctttgcccatccaaaattagcccgttcctgcatttggatttttccaataatctcttaacagacacggtttttgaaaattgtgggcaccttactgagttggagacacttattttacaaatgaatcaattaaaagaactttcaaaaatagctgaaatgactacacagatgaagtctctgcaacaattggatattagccagaattctgtaagctatgatgaaaagaaaggagactgttcttggactaaaagtttattaagtttaaatatgtcttcaaatatacttactgacactattttcagatgtttacctcccaggatcaaggtacttgatcttcacagcaataaaataaagagcattcctaaacaagtcgtaaaactggaagctttgcaagaactcaatgttgctttcaattctttaactgaccttcctggatgtggcagctttagcagcctttctgtattgatcattgatcacaattcagtttcccacccatcggctgatttcttccagagctgccagaagatgaggtcaataaaagcaggggacaatccattccaatgtacctgtgagctaggagaatttgtcaaaaatatagaccaagtatcaagtgaagtgttagagggctggcctgattcttataagtgtgactacccggaaagttatagaggaaccctactaaaggactttcacatgtctgaattatcctgcaacataactctgctgatcgtcaccatcgttgccaccatgctggtgttggctgtgactgtgacctccctctgcagctacttggatctgccctggtatctcaggatggtgtgccagtggacccagacccggcgcagggccaggaacatacccttagaagaactccaaagaaatctccagtttcatgcatttatttcatatagtgggcacgattctttctgggtgaagaatgaattattgccaaacctagagaaagaaggtatgcagatttgccttcatgagagaaactttgttcctggcaagagcattgtggaaaatatcatcacctgcattgagaagagttacaagtccatctttgttttgtctcccaactttgtccagagtgaatggtgccattatgaactctactttgcccatcacaatctctttcatgaaggatctaatagcttaatcctgatcttgctggaacccattccgcagtactccattcctagcagttatcacaagctcaaaagtctcatggccaggaggacttatttggaatggcccaaggaaaagagcaaacgtggccttttttgggctaacttaagggcagccattaatattaagctgacagagcaagcaaagaaatagattacacatcaagtgaaaaatattcctcctgttgatattgctgcttttggaagttccaacaatgactttattttgcatcagcatagatgtaaacacaattgtgagtgtatgatgtaggtaaaaatatataccttcgggtcgcagttcaccatttatatgtggtattaaaaattaatgaaatgatataactttgatttaaacagttctgacacataagggatccacttgtttctttgctataactgagttctgaatttatcatgaagtcaagggaagcacctgtttttcttcagtgatgtgtgttctag

SEQ ID NO: 4603 - protein, 35 aa, Homo sapiens
MNTNRGTRPSSSLEEIRITKAYWAPLQKESVSVSR

SEQ ID NO: 4604 - DNA, 3239 bp, Homo sapiens
ggcaagaggaaaaacaaagcagccgaaacacacccagacgcacacttctgccaagcatagccaccacggtaagcattttgaattcagccaattatgatctgtggattattaacattacctcatttacttcatcagtgtagacaatagtaaactgactgtagtgaaatttggaaccatagaaacgtgattctattttaatacaggcctatcaggtaacccacagactatgctacatatgaataagagaaaataagtttattcttaactatgtaatgtaattccagtggaattcggtaggtggcataaaacagcctttttgttttgttttgttttcaacaccaaatgtggttaacagtgaaataaattcaaggaagtgcttgaatttcttacagactgccaaatggaacagacaagcaggttgtcttgtgttaaagaaaatgagatataagtcagttactcccggaggcaatgctgctgttcagctcttctgtttttgtggccagaatctgtatctgtatcaagatgatctgaagaacagcttctacctttaggaatgtctagtgttccaaaatgactagcatcttccattttgccattatcttcatgttaatacttcagatcagaatacaattatctgaagaaagtgaatttttagttgataggtcaaaaaacggtctcatccacgttcctaaagacctatcccagaaaacaacaatcttaaatatatcgcaaaattatatatctgagctttggacttctgacatcttatcactgtcaaaactgaggattttgataatttctcataatagaatccagtatcttgatatcagtgttttcaaattcaaccaggaattggaatacttggatttgtcccacaacaagttggtgaagatttcttgccaccctactgtgaacctcaagcacttggacctgtcatttaatgcatttgatgccctgcctatatgcaaagagtttggcaatatgtctcaactaaaatttctggggttgagcaccacacacttagaaaaatctagtgtgctgccaattgctcatttgaatatcagcaaggtcttgctggtcttaggagagacttatggggaaaaagaagaccctgagggccttcaagactttaacactgagagtctgcacattgtgttccccacaaacaaagaattccattttattttggatgtgtcagtcaagactgtagcaaatctggaactatctaatatcaaatgtgtgctagaagataacaaatgttcttacttcctaagtattctggcgaaacttcaaacaaatccaaagttatcaaatcttaccttaaacaacattgaaacaacttggaattctttcattaggatcctccagctggtttggcatacaactgtatggtatttctcaatttcaaacgtgaagctacagggtcagctggacttcagagattttgattattctggcacttccttgaaggccttgtctatacaccaagttgtcagcgatgtgttcggttttccgcaaagttatatctatgaaatcttttcgaatatgaacatcaaaaatttcacagtgtctggtacacgcatggtccacatgctttgcccatccaaaattagcccgttcctgcatttggatttttccaataatctcttaacagacacggtttttgaaaattgtgggcaccttactgagttggagacacttattttacaaatgaatcaattaaaagaactttcaaaaatagctgaaatgactacacagatgaagtctctgcaacaattggatattagccagaattctgtaagctatgatgaaaagaaaggagactgttcttggactaaaagtttattaagtttaaatatgtcttcaaatatacttactgacactattttcagatgtttacctcccaggatcaaggtacttgatcttcacagcaataaaataaagagcattcctaaacaagtcgtaaaactggaagctttgcaagaactcaatgttgctttcaattctttaactgaccttcctggatgtggcagctttagcagcctttctgtattgatcattgatcacaattcagtttcccacccatcggctgatttcttccagagctgccagaagatgaggtcaataaaagcaggggacaatccattccaatgtacctgtgagctaggagaatttgtcaaaaatatagaccaagtatcaagtgaagtgttagagggctggcctgattcttataagtgtgactacccggaaagttatagaggaaccctactaaaggactttcacatgtctgaattatcctgcaacataactctgctgatcgtcaccatcgttgccaccatgctggtgttggctgtgactgtgacctccctctgcagctacttggatctgccctggtatctcaggatggtgtgccagtggacccagacccggcgcagggccaggaacatacccttagaagaactccaaagaaatctccagtttcatgcatttatttcatatagtgggcacgattctttctgggtgaagaatgaattattgccaaacctagagaaagaaggtatgcagatttgccttcatgagagaaactttgttcctggcaagagcattgtggaaaatatcatcacctgcattgagaagagttacaagtccatctttgttttgtctcccaactttgtccagagtgaatggtgccattatgaactctactttgcccatcacaatctctttcatgaaggatctaatagcttaatcctgatcttgctggaacccattccgcagtactccattcctagcagttatcacaagctcaaaagtctcatggccaggaggacttatttggaatggcccaaggaaaagagcaaacgtggccttttttgggctaacttaagggcagccattaatattaagctgacagagcaagcaaagaaatagattacacatcaagtgaaaaatattcctcctgttgatattgctgcttttggaagttccaacaatgactttattttgcatcagcatagatgtaaacacaattgtgagtgtatgatgtaggtaaaaatatataccttcgggtcgcagttcaccatttatatgtggtattaaaaattaatgaaatgatataactttgatttaaacagttctgacacataagggatccacttgtttctttgctataactgagttctgaatttatcatgaagtcaagggaagcacctgtttttcttcagtgatgtgtgttctag

SEQ ID NO: 4605 - protein, 37 aa, Homo sapiens
MRYKSVTPGGNAAVQLFCFCGQNLYLYQDDLKNSFYL

SEQ ID NO: 4606 - DNA, 3431 bp, Homo sapiens
tgaggtaaggggaaacagagagagacagtcagaacattataagtcgaaaagaatctcagcattcttagtttagggaagttggccttgctcgctgtgtggtagaaaagctgattacgggagagaaccgtggagggaaggaagggaggcagttttgtcatccccacatccggttttgactggacaccatgcaggctgagatcaacttcagaggcagtcagctggaatcccatagctttatttgcccatttattgtgttgttattttgttgttgtcattactggaaaaggcaagagtagagctatcagaatgtcttccttgaacatgctgtcaacaaaccccaggatttttataaaccctatgtgaaaaacacgctaagaatctcttttcttcttagcatatttttcacttagggtttacaaaaatatgttttgaagaaagcttgaaaagatcagtggaaaaaaattcagcaccaaattttctctgaaaatcaacttgtcaaaaaagacgtgattaacatccatcctgtaaccagcacatgaatgatcttccctctttacgagtgtgcttcagcaaaactttaatctcgacccctccctctttccacttttaatagtggatggatgaaaaggcaagaggaaaaacaaagcagccgaaacacacccagacgcacacttctgccaagcatagccaccacgaatctgtatctgtatcaagatgatctgaagaacagcttctacctttaggaatgtctagtgttccaaaatgactagcatcttccattttgccattatcttcatgttaatacttcagatcagaatacaattatctgaagaaagtgaatttttagttgataggtcaaaaaacggtctcatccacgttcctaaagacctatcccagaaaacaacaatcttaaatatatcgcaaaattatatatctgagctttggacttctgacatcttatcactgtcaaaactgaggattttgataatttctcataatagaatccagtatcttgatatcagtgttttcaaattcaaccaggaattggaatacttggatttgtcccacaacaagttggtgaagatttcttgccaccctactgtgaacctcaagcacttggacctgtcatttaatgcatttgatgccctgcctatatgcaaagagtttggcaatatgtctcaactaaaatttctggggttgagcaccacacacttagaaaaatctagtgtgctgccaattgctcatttgaatatcagcaaggtcttgctggtcttaggagagacttatggggaaaaagaagaccctgagggccttcaagactttaacactgagagtctgcacattgtgttccccacaaacaaagaattccattttattttggatgtgtcagtcaagactgtagcaaatctggaactatctaatatcaaatgtgtgctagaagataacaaatgttcttacttcctaagtattctggcgaaacttcaaacaaatccaaagttatcaaatcttaccttaaacaacattgaaacaacttggaattctttcattaggatcctccagctggtttggcatacaactgtatggtatttctcaatttcaaacgtgaagctacagggtcagctggacttcagagattttgattattctggcacttccttgaaggccttgtctatacaccaagttgtcagcgatgtgttcggttttccgcaaagttatatctatgaaatcttttcgaatatgaacatcaaaaatttcacagtgtctggtacacgcatggtccacatgctttgcccatccaaaattagcccgttcctgcatttggatttttccaataatctcttaacagacacggtttttgaaaattgtgggcaccttactgagttggagacacttattttacaaatgaatcaattaaaagaactttcaaaaatagctgaaatgactacacagatgaagtctctgcaacaattggatattagccagaattctgtaagctatgatgaaaagaaaggagactgttcttggactaaaagtttattaagtttaaatatgtcttcaaatatacttactgacactattttcagatgtttacctcccaggatcaaggtacttgatcttcacagcaataaaataaagagcattcctaaacaagtcgtaaaactggaagctttgcaagaactcaatgttgctttcaattctttaactgaccttcctggatgtggcagctttagcagcctttctgtattgatcattgatcacaattcagtttcccacccatcggctgatttcttccagagctgccagaagatgaggtcaataaaagcaggggacaatccattccaatgtacctgtgagctaggagaatttgtcaaaaatatagaccaagtatcaagtgaagtgttagagggctggcctgattcttataagtgtgactacccggaaagttatagaggaaccctactaaaggactttcacatgtctgaattatcctgcaacataactctgctgatcgtcaccatcgttgccaccatgctggtgttggctgtgactgtgacctccctctgcagctacttggatctgccctggtatctcaggatggtgtgccagtggacccagacccggcgcagggccaggaacatacccttagaagaactccaaagaaatctccagtttcatgcatttatttcatatagtgggcacgattctttctgggtgaagaatgaattattgccaaacctagagaaagaaggtatgcagatttgccttcatgagagaaactttgttcctggcaagagcattgtggaaaatatcatcacctgcattgagaagagttacaagtccatctttgttttgtctcccaactttgtccagagtgaatggtgccattatgaactctactttgcccatcacaatctctttcatgaaggatctaatagcttaatcctgatcttgctggaacccattccgcagtactccattcctagcagttatcacaagctcaaaagtctcatggccaggaggacttatttggaatggcccaaggaaaagagcaaacgtggccttttttgggctaacttaagggcagccattaatattaagctgacagagcaagcaaagaaatagattacacatcaagtgaaaaatattcctcctgttgatattgctgcttttggaagttccaacaatgactttattttgcatcagcatagatgtaaacacaattgtgagtgtatgatgtaggtaaaaatatataccttcgggtcgcagttcaccatttatatgtggtattaaaaattaatgaaatgatataactttgatttaaacagttctgacacataagggatccacttgtttctttgctataactgagttctgaatttatcatgaagtcaagggaagcacctgtttttcttcagtgatgtgtgttctag

SEQ ID NO: 4607 - protein, 40 aa, Homo sapiens
MKRQEEKQSSRNTPRRTLLPSIATTNLYLYQDDLKNSFYL

SEQ ID NO: 4608 - DNA, 3078 bp, Homo sapiens
aattgtatttccgttcatttacaagttattttctcttcttctgaaaaagagatcttgtggatggatgaaaaggcaagaggaaaaacaaagcagccgaaacacacccagacgcacacttctgccaagcatagccaccacgactgccaaatggaacagacaagcaggttgtcttgtgttaaagaaaatgagatataagtcagttactcccggaggcaatgctgctgttcagctcttctgtttttgtggccagggtcttcatgaacactaataggggtaccaggccctcttcctcgttagaagaaatcaggataacaaaggcatattgggcacccctacaaaaggaatctgtatctgtatcaagatgatctgaagaacagcttctacctttaggaatgtctagtgttccaaaatgactagcatcttccattttgccattatcttcatgttaatacttcagatcagaatacaattatctgaagaaagtgaatttttagttgataggtcaaaaaacggtctcatccacgttcctaaagacctatcccagaaaacaacaatcttaaatatatcgcaaaattatatatctgagctttggacttctgacatcttatcactgtcaaaactgaggattttgataatttctcataatagaatccagtatcttgatatcagtgttttcaaattcaaccaggaattggaatacttggatttgtcccacaacaagttggtgaagatttcttgccaccctactgtgaacctcaagcacttggacctgtcatttaatgcatttgatgccctgcctatatgcaaagagtttggcaatatgtctcaactaaaatttctggggttgagcaccacacacttagaaaaatctagtgtgctgccaattgctcatttgaatatcagcaaggtcttgctggtcttaggagagacttatggggaaaaagaagaccctgagggccttcaagactttaacactgagagtctgcacattgtgttccccacaaacaaagaattccattttattttggatgtgtcagtcaagactgtagcaaatctggaactatctaatatcaaatgtgtgctagaagataacaaatgttcttacttcctaagtattctggcgaaacttcaaacaaatccaaagttatcaaatcttaccttaaacaacattgaaacaacttggaattctttcattaggatcctccagctggtttggcatacaactgtatggtatttctcaatttcaaacgtgaagctacagggtcagctggacttcagagattttgattattctggcacttccttgaaggccttgtctatacaccaagttgtcagcgatgtgttcggttttccgcaaagttatatctatgaaatcttttcgaatatgaacatcaaaaatttcacagtgtctggtacacgcatggtccacatgctttgcccatccaaaattagcccgttcctgcatttggatttttccaataatctcttaacagacacggtttttgaaaattgtgggcaccttactgagttggagacacttattttacaaatgaatcaattaaaagaactttcaaaaatagctgaaatgactacacagatgaagtctctgcaacaattggatattagccagaattctgtaagctatgatgaaaagaaaggagactgttcttggactaaaagtttattaagtttaaatatgtcttcaaatatacttactgacactattttcagatgtttacctcccaggatcaaggtacttgatcttcacagcaataaaataaagagcattcctaaacaagtcgtaaaactggaagctttgcaagaactcaatgttgctttcaattctttaactgaccttcctggatgtggcagctttagcagcctttctgtattgatcattgatcacaattcagtttcccacccatcggctgatttcttccagagctgccagaagatgaggtcaataaaagcaggggacaatccattccaatgtacctgtgagctaggagaatttgtcaaaaatatagaccaagtatcaagtgaagtgttagagggctggcctgattcttataagtgtgactacccggaaagttatagaggaaccctactaaaggactttcacatgtctgaattatcctgcaacataactctgctgatcgtcaccatcgttgccaccatgctggtgttggctgtgactgtgacctccctctgcagctacttggatctgccctggtatctcaggatggtgtgccagtggacccagacccggcgcagggccaggaacatacccttagaagaactccaaagaaatctccagtttcatgcatttatttcatatagtgggcacgattctttctgggtgaagaatgaattattgccaaacctagagaaagaaggtatgcagatttgccttcatgagagaaactttgttcctggcaagagcattgtggaaaatatcatcacctgcattgagaagagttacaagtccatctttgttttgtctcccaactttgtccagagtgaatggtgccattatgaactctactttgcccatcacaatctctttcatgaaggatctaatagcttaatcctgatcttgctggaacccattccgcagtactccattcctagcagttatcacaagctcaaaagtctcatggccaggaggacttatttggaatggcccaaggaaaagagcaaacgtggccttttttgggctaacttaagggcagccattaatattaagctgacagagcaagcaaagaaatagattacacatcaagtgaaaaatattcctcctgttgatattgctgcttttggaagttccaacaatgactttattttgcatcagcatagatgtaaacacaattgtgagtgtatgatgtaggtaaaaatatataccttcgggtcgcagttcaccatttatatgtggtattaaaaattaatgaaatgatataactttgatttaaacagttctgacacataagggatccacttgtttctttgctataactgagttctgaatttatcatgaagtcaagggaagcacctgtttttcttcagtgatgtgtgttctag

SEQ ID NO: 4609 - protein, 67 aa, Homo sapiens
MKRQEEKQSSRNTPRRTLLPSIATTTAKWNRQAGCLVLKKMRYKSVTPGGNAAVQLFCFCGQGLHEH

SEQ ID NO: 4610 - DNA, 2976 bp, Homo sapiens
acagactgccaaatggaacagacaagcaggttgtcttgtgttaaagaaaatgagatataagtcagttactcccggaggcaatgctgctgttcagctcttctgtttttgtggccagacaagtcttcctagaggaaggtcacatacccgttgaagtccgccattttgcctcttggtatgcatgctcaagcctgcttgcccagctcctgagagtttgtcaggagtctgctaaccaccagcttcagggtcttcatgaacactaataggggtaccaggccctcttcctcgttagaagaaatcaggataacaaaggcatattgggcacccctacaaaaggaatctgtatctgtatcaagatgatctgaagaacagcttctacctttaggaatgtctagtgttccaaaatgactagcatcttccattttgccattatcttcatgttaatacttcagatcagaatacaattatctgaagaaagtgaatttttagttgataggtcaaaaaacggtctcatccacgttcctaaagacctatcccagaaaacaacaatcttaaatatatcgcaaaattatatatctgagctttggacttctgacatcttatcactgtcaaaactgaggattttgataatttctcataatagaatccagtatcttgatatcagtgttttcaaattcaaccaggaattggaatacttggatttgtcccacaacaagttggtgaagatttcttgccaccctactgtgaacctcaagcacttggacctgtcatttaatgcatttgatgccctgcctatatgcaaagagtttggcaatatgtctcaactaaaatttctggggttgagcaccacacacttagaaaaatctagtgtgctgccaattgctcatttgaatatcagcaaggtcttgctggtcttaggagagacttatggggaaaaagaagaccctgagggccttcaagactttaacactgagagtctgcacattgtgttccccacaaacaaagaattccattttattttggatgtgtcagtcaagactgtagcaaatctggaactatctaatatcaaatgtgtgctagaagataacaaatgttcttacttcctaagtattctggcgaaacttcaaacaaatccaaagttatcaaatcttaccttaaacaacattgaaacaacttggaattctttcattaggatcctccagctggtttggcatacaactgtatggtatttctcaatttcaaacgtgaagctacagggtcagctggacttcagagattttgattattctggcacttccttgaaggccttgtctatacaccaagttgtcagcgatgtgttcggttttccgcaaagttatatctatgaaatcttttcgaatatgaacatcaaaaatttcacagtgtctggtacacgcatggtccacatgctttgcccatccaaaattagcccgttcctgcatttggatttttccaataatctcttaacagacacggtttttgaaaattgtgggcaccttactgagttggagacacttattttacaaatgaatcaattaaaagaactttcaaaaatagctgaaatgactacacagatgaagtctctgcaacaattggatattagccagaattctgtaagctatgatgaaaagaaaggagactgttcttggactaaaagtttattaagtttaaatatgtcttcaaatatacttactgacactattttcagatgtttacctcccaggatcaaggtacttgatcttcacagcaataaaataaagagcattcctaaacaagtcgtaaaactggaagctttgcaagaactcaatgttgctttcaattctttaactgaccttcctggatgtggcagctttagcagcctttctgtattgatcattgatcacaattcagtttcccacccatcggctgatttcttccagagctgccagaagatgaggtcaataaaagcaggggacaatccattccaatgtacctgtgagctaggagaatttgtcaaaaatatagaccaagtatcaagtgaagtgttagagggctggcctgattcttataagtgtgactacccggaaagttatagaggaaccctactaaaggactttcacatgtctgaattatcctgcaacataactctgctgatcgtcaccatcgttgccaccatgctggtgttggctgtgactgtgacctccctctgcagctacttggatctgccctggtatctcaggatggtgtgccagtggacccagacccggcgcagggccaggaacatacccttagaagaactccaaagaaatctccagtttcatgcatttatttcatatagtgggcacgattctttctgggtgaagaatgaattattgccaaacctagagaaagaaggtatgcagatttgccttcatgagagaaactttgttcctggcaagagcattgtggaaaatatcatcacctgcattgagaagagttacaagtccatctttgttttgtctcccaactttgtccagagtgaatggtgccattatgaactctactttgcccatcacaatctctttcatgaaggatctaatagcttaatcctgatcttgctggaacccattccgcagtactccattcctagcagttatcacaagctcaaaagtctcatggccaggaggacttatttggaatggcccaaggaaaagagcaaacgtggccttttttgggctaacttaagggcagccattaatattaagctgacagagcaagcaaagaaatagattacacatcaagtgaaaaatattcctcctgttgatattgctgcttttggaagttccaacaatgactttattttgcatcagcatagatgtaaacacaattgtgagtgtatgatgtaggtaaaaatatataccttcgggtcgcagttcaccatttatatgtggtattaaaaattaatgaaatgatataactttgatttaaacagttctgacacat

SEQ ID NO: 4611 - protein, 59 aa, Homo sapiens [sequence omitted]

SEQ ID NO: 4612 - DNA, 2783 bp, Homo sapiens
ttgaatttcttacagactgccaaatggaacagacaagcaggttgtcttgggtcttcatgaacactaataggggtaccaggccctcttcctcgttagaagaaatcaggataacaaaggcatattgggcacccctacaaaaggaatctgtatctgtatcaagatgatctgaagaacagcttctacctttaggaatgtctagtgttccaaaatgactagcatcttccattttgccattatcttcatgttaatacttcagatcagaatacaattatctgaagaaagtgaatttttagttgataggtcaaaaaacggtctcatccacgttcctaaagacctatcccagaaaacaacaatcttaaatatatcgcaaaattatatatctgagctttggacttctgacatcttatcactgtcaaaactgaggattttgataatttctcataatagaatccagtatcttgatatcagtgttttcaaattcaaccaggaattggaatacttggatttgtcccacaacaagttggtgaagatttcttgccaccctactgtgaacctcaagcacttggacctgtcatttaatgcatttgatgccctgcctatatgcaaagagtttggcaatatgtctcaactaaaatttctggggttgagcaccacacacttagaaaaatctagtgtgctgccaattgctcatttgaatatcagcaaggtcttgctggtcttaggagagacttatggggaaaaagaagaccctgagggccttcaagactttaacactgagagtctgcacattgtgttccccacaaacaaagaattccattttattttggatgtgtcagtcaagactgtagcaaatctggaactatctaatatcaaatgtgtgctagaagataacaaatgttcttacttcctaagtattctggcgaaacttcaaacaaatccaaagttatcaaatcttaccttaaacaacattgaaacaacttggaattctttcattaggatcctccagctggtttggcatacaactgtatggtatttctcaatttcaaacgtgaagctacagggtcagctggacttcagagattttgattattctggcacttccttgaaggccttgtctatacaccaagttgtcagcgatgtgttcggttttccgcaaagttatatctatgaaatcttttcgaatatgaacatcaaaaatttcacagtgtctggtacacgcatggtccacatgctttgcccatccaaaattagcccgttcctgcatttggatttttccaataatctcttaacagacacggtttttgaaaattgtgggcaccttactgagttggagacacttattttacaaatgaatcaattaaaagaactttcaaaaatagctgaaatgactacacagatgaagtctctgcaacaattggatattagccagaattctgtaagctatgatgaaaagaaaggagactgttcttggactaaaagtttattaagtttaaatatgtcttcaaatatacttactgacactattttcagatgtttacctcccaggatcaaggtacttgatcttcacagcaataaaataaagagcattcctaaacaagtcgtaaaactggaagctttgcaagaactcaatgttgctttcaattctttaactgaccttcctggatgtggcagctttagcagcctttctgtattgatcattgatcacaattcagtttcccacccatcggctgatttcttccagagctgccagaagatgaggtcaataaaagcaggggacaatccattccaatgtacctgtgagctaggagaatttgtcaaaaatatagaccaagtatcaagtgaagtgttagagggctggcctgattcttataagtgtgactacccggaaagttatagaggaaccctactaaaggactttcacatgtctgaattatcctgcaacataactctgctgatcgtcaccatcgttgccaccatgctggtgttggctgtgactgtgacctccctctgcagctacttggatctgccctggtatctcaggatggtgtgccagtggacccagacccggcgcagggccaggaacatacccttagaagaactccaaagaaatctccagtttcatgcatttatttcatatagtgggcacgattctttctgggtgaagaatgaattattgccaaacctagagaaagaaggtatgcagatttgccttcatgagagaaactttgttcctggcaagagcattgtggaaaatatcatcacctgcattgagaagagttacaagtccatctttgttttgtctcccaactttgtccagagtgaatggtgccattatgaactctactttgcccatcacaatctctttcatgaaggatctaatagcttaatcctgatcttgctggaacccattccgcagtactccattcctagcagttatcacaagctcaaaagtctcatggccaggaggacttatttggaatggcccaaggaaaagagcaaacgtggccttttttgggctaacttaagggcagccattaatattaagctgacagagcaagcaaagaaatagattacacatcaagtgaaaaatattcctcctgttgatattgctgcttttggaagttccaacaatgactttattttgcatcagcatagatgtaaacacaattgtgagtgtatgatgtaggtaaaaatatataccttcgggtcgcagttcaccatttatatgtggtattaaaaattaatgaaatgatataactttgatttaaacagttctgacacat

SEQ ID NO: 4613 - protein, 46 aa, Homo sapiens; identical to SEQ ID NO: 4597

SEQ ID NO: 4614 - DNA, 2897 bp, Homo sapiens
aaatgtggttaacagtgaaataaattcaaggaagtgcttgaatttcttacagactgccaaatggaacagacaagcaggttgtcttgtgttaaagaaaatgagatataagtcagttactcccggaggcaatgctgctgttcagctcttctgtttttgtggccagggtcttcatgaacactaataggggtaccaggccctcttcctcgttagaagaaatcaggataacaaaggcatattgggcacccctacaaaaggaatctgtatctgtatcaagatgatctgaagaacagcttctacctttaggaatgtctagtgttccaaaatgactagcatcttccattttgccattatcttcatgttaatacttcagatcagaatacaattatctgaagaaagtgaatttttagttgataggtcaaaaaacggtctcatccacgttcctaaagacctatcccagaaaacaacaatcttaaatatatcgcaaaattatatatctgagctttggacttctgacatcttatcactgtcaaaactgaggattttgataatttctcataatagaatccagtatcttgatatcagtgttttcaaattcaaccaggaattggaatacttggatttgtcccacaacaagttggtgaagatttcttgccaccctactgtgaacctcaagcacttggacctgtcatttaatgcatttgatgccctgcctatatgcaaagagtttggcaatatgtctcaactaaaatttctggggttgagcaccacacacttagaaaaatctagtgtgctgccaattgctcatttgaatatcagcaaggtcttgctggtcttaggagagacttatggggaaaaagaagaccctgagggccttcaagactttaacactgagagtctgcacattgtgttccccacaaacaaagaattccattttattttggatgtgtcagtcaagactgtagcaaatctggaactatctaatatcaaatgtgtgctagaagataacaaatgttcttacttcctaagtattctggcgaaacttcaaacaaatccaaagttatcaaatcttaccttaaacaacattgaaacaacttggaattctttcattaggatcctccagctggtttggcatacaactgtatggtatttctcaatttcaaacgtgaagctacagggtcagctggacttcagagattttgattattctggcacttccttgaaggccttgtctatacaccaagttgtcagcgatgtgttcggttttccgcaaagttatatctatgaaatcttttcgaatatgaacatcaaaaatttcacagtgtctggtacacgcatggtccacatgctttgcccatccaaaattagcccgttcctgcatttggatttttccaataatctcttaacagacacggtttttgaaaattgtgggcaccttactgagttggagacacttattttacaaatgaatcaattaaaagaactttcaaaaatagctgaaatgactacacagatgaagtctctgcaacaattggatattagccagaattctgtaagctatgatgaaaagaaaggagactgttcttggactaaaagtttattaagtttaaatatgtcttcaaatatacttactgacactattttcagatgtttacctcccaggatcaaggtacttgatcttcacagcaataaaataaagagcattcctaaacaagtcgtaaaactggaagctttgcaagaactcaatgttgctttcaattctttaactgaccttcctggatgtggcagctttagcagcctttctgtattgatcattgatcacaattcagtttcccacccatcggctgatttcttccagagctgccagaagatgaggtcaataaaagcaggggacaatccattccaatgtacctgtgagctaggagaatttgtcaaaaatatagaccaagtatcaagtgaagtgttagagggctggcctgattcttataagtgtgactacccggaaagttatagaggaaccctactaaaggactttcacatgtctgaattatcctgcaacataactctgctgatcgtcaccatcgttgccaccatgctggtgttggctgtgactgtgacctccctctgcagctacttggatctgccctggtatctcaggatggtgtgccagtggacccagacccggcgcagggccaggaacatacccttagaagaactccaaagaaatctccagtttcatgcatttatttcatatagtgggcacgattctttctgggtgaagaatgaattattgccaaacctagagaaagaaggtatgcagatttgccttcatgagagaaactttgttcctggcaagagcattgtggaaaatatcatcacctgcattgagaagagttacaagtccatctttgttttgtctcccaactttgtccagagtgaatggtgccattatgaactctactttgcccatcacaatctctttcatgaaggatctaatagcttaatcctgatcttgctggaacccattccgcagtactccattcctagcagttatcacaagctcaaaagtctcatggccaggaggacttatttggaatggcccaaggaaaagagcaaacgtggccttttttgggctaacttaagggcagccattaatattaagctgacagagcaagcaaagaaatagattacacatcaagtgaaaaatattcctcctgttgatattgctgcttttggaagttccaacaatgactttattttgcatcagcatagatgtaaacacaattgtgagtgtatgatgtaggtaaaaatatataccttcgggtcgcagttcaccatttatatgtggtattaaaaattaatgaaatgatataactttgatttaaacagttctgacacat

SEQ ID NO: 4615 - protein, 49 aa, Homo sapiens; identical to SEQ ID NO: 4599

SEQ ID NO: 4616 - DNA, 2735 bp, Homo sapiens
caacaccaaatgtggttaacagtgaaataaattcaaggaagtgcttgaatttcttacagactgccaaatggaacagacaagcaggttgtcttgaatctgtatctgtatcaagatgatctgaagaacagcttctacctttaggaatgtctagtgttccaaaatgactagcatcttccattttgccattatcttcatgttaatacttcagatcagaatacaattatctgaagaaagtgaatttttagttgataggtcaaaaaacggtctcatccacgttcctaaagacctatcccagaaaacaacaatcttaaatatatcgcaaaattatatatctgagctttggacttctgacatcttatcactgtcaaaactgaggattttgataatttctcataatagaatccagtatcttgatatcagtgttttcaaattcaaccaggaattggaatacttggatttgtcccacaacaagttggtgaagatttcttgccaccctactgtgaacctcaagcacttggacctgtcatttaatgcatttgatgccctgcctatatgcaaagagtttggcaatatgtctcaactaaaatttctggggttgagcaccacacacttagaaaaatctagtgtgctgccaattgctcatttgaatatcagcaaggtcttgctggtcttaggagagacttatggggaaaaagaagaccctgagggccttcaagactttaacactgagagtctgcacattgtgttccccacaaacaaagaattccattttattttggatgtgtcagtcaagactgtagcaaatctggaactatctaatatcaaatgtgtgctagaagataacaaatgttcttacttcctaagtattctggcgaaacttcaaacaaatccaaagttatcaaatcttaccttaaacaacattgaaacaacttggaattctttcattaggatcctccagctggtttggcatacaactgtatggtatttctcaatttcaaacgtgaagctacagggtcagctggacttcagagattttgattattctggcacttccttgaaggccttgtctatacaccaagttgtcagcgatgtgttcggttttccgcaaagttatatctatgaaatcttttcgaatatgaacatcaaaaatttcacagtgtctggtacacgcatggtccacatgctttgcccatccaaaattagcccgttcctgcatttggatttttccaataatctcttaacagacacggtttttgaaaattgtgggcaccttactgagttggagacacttattttacaaatgaatcaattaaaagaactttcaaaaatagctgaaatgactacacagatgaagtctctgcaacaattggatattagccagaattctgtaagctatgatgaaaagaaaggagactgttcttggactaaaagtttattaagtttaaatatgtcttcaaatatacttactgacactattttcagatgtttacctcccaggatcaaggtacttgatcttcacagcaataaaataaagagcattcctaaacaagtcgtaaaactggaagctttgcaagaactcaatgttgctttcaattctttaactgaccttcctggatgtggcagctttagcagcctttctgtattgatcattgatcacaattcagtttcccacccatcggctgatttcttccagagctgccagaagatgaggtcaataaaagcaggggacaatccattccaatgtacctgtgagctaggagaatttgtcaaaaatatagaccaagtatcaagtgaagtgttagagggctggcctgattcttataagtgtgactacccggaaagttatagaggaaccctactaaaggactttcacatgtctgaattatcctgcaacataactctgctgatcgtcaccatcgttgccaccatgctggtgttggctgtgactgtgacctccctctgcagctacttggatctgccctggtatctcaggatggtgtgccagtggacccagacccggcgcagggccaggaacatacccttagaagaactccaaagaaatctccagtttcatgcatttatttcatatagtgggcacgattctttctgggtgaagaatgaattattgccaaacctagagaaagaaggtatgcagatttgccttcatgagagaaactttgttcctggcaagagcattgtggaaaatatcatcacctgcattgagaagagttacaagtccatctttgttttgtctcccaactttgtccagagtgaatggtgccattatgaactctactttgcccatcacaatctctttcatgaaggatctaatagcttaatcctgatcttgctggaacccattccgcagtactccattcctagcagttatcacaagctcaaaagtctcatggccaggaggacttatttggaatggcccaaggaaaagagcaaacgtggccttttttgggctaacttaagggcagccattaatattaagctgacagagcaagcaaagaaatagattacacatcaagtgaaaaatattcctcctgttgatattgctgcttttggaagttccaacaatgactttattttgcatcagcatagatgtaaacacaattgtgagtgtatgatgtaggtaaaaatatataccttcgggtcgcagttcaccatttatatgtggtattaaaaattaatgaaatgatataactttgatttaaacagttctgacacat

SEQ ID NO: 4617 - protein, 786 aa, Homo sapiens; identical to SEQ ID NO: 518

SEQ ID NO: 4618 - DNA, 2978 bp, Homo sapiens
agcctttttgttttgttttgttttcaacaccaaatgtggttaacagtgaaataaattcaaggaagtgcttgaatttcttacagactgccaaatggaacagacaagcaggttgtcttgacaagtcttcctagaggaaggtcacatacccgttgaagtccgccattttgcctcttggtatgcatgctcaagcctgcttgcccagctcctgagagtttgtcaggagtctgctaaccaccagcttcagggtcttcatgaacactaataggggtaccaggccctcttcctcgttagaagaaatcaggataacaaaggcatattgggcacccctacaaaaggaatctgtatctgtatcaagatgatctgaagaacagcttctacctttaggaatgtctagtgttccaaaatgactagcatcttccattttgccattatcttcatgttaatacttcagatcagaatacaattatctgaagaaagtgaatttttagttgataggtcaaaaaacggtctcatccacgttcctaaagacctatcccagaaaacaacaatcttaaatatatcgcaaaattatatatctgagctttggacttctgacatcttatcactgtcaaaactgaggattttgataatttctcataatagaatccagtatcttgatatcagtgttttcaaattcaaccaggaattggaatacttggatttgtcccacaacaagttggtgaagatttcttgccaccctactgtgaacctcaagcacttggacctgtcatttaatgcatttgatgccctgcctatatgcaaagagtttggcaatatgtctcaactaaaatttctggggttgagcaccacacacttagaaaaatctagtgtgctgccaattgctcatttgaatatcagcaaggtcttgctggtcttaggagagacttatggggaaaaagaagaccctgagggccttcaagactttaacactgagagtctgcacattgtgttccccacaaacaaagaattccattttattttggatgtgtcagtcaagactgtagcaaatctggaactatctaatatcaaatgtgtgctagaagataacaaatgttcttacttcctaagtattctggcgaaacttcaaacaaatccaaagttatcaaatcttaccttaaacaacattgaaacaacttggaattctttcattaggatcctccagctggtttggcatacaactgtatggtatttctcaatttcaaacgtgaagctacagggtcagctggacttcagagattttgattattctggcacttccttgaaggccttgtctatacaccaagttgtcagcgatgtgttcggttttccgcaaagttatatctatgaaatcttttcgaatatgaacatcaaaaatttcacagtgtctggtacacgcatggtccacatgctttgcccatccaaaattagcccgttcctgcatttggatttttccaataatctcttaacagacacggtttttgaaaattgtgggcaccttactgagttggagacacttattttacaaatgaatcaattaaaagaactttcaaaaatagctgaaatgactacacagatgaagtctctgcaacaattggatattagccagaattctgtaagctatgatgaaaagaaaggagactgttcttggactaaaagtttattaagtttaaatatgtcttcaaatatacttactgacactattttcagatgtttacctcccaggatcaaggtacttgatcttcacagcaataaaataaagagcattcctaaacaagtcgtaaaactggaagctttgcaagaactcaatgttgctttcaattctttaactgaccttcctggatgtggcagctttagcagcctttctgtattgatcattgatcacaattcagtttcccacccatcggctgatttcttccagagctgccagaagatgaggtcaataaaagcaggggacaatccattccaatgtacctgtgagctaggagaatttgtcaaaaatatagaccaagtatcaagtgaagtgttagagggctggcctgattcttataagtgtgactacccggaaagttatagaggaaccctactaaaggactttcacatgtctgaattatcctgcaacataactctgctgatcgtcaccatcgttgccaccatgctggtgttggctgtgactgtgacctccctctgcagctacttggatctgccctggtatctcaggatggtgtgccagtggacccagacccggcgcagggccaggaacatacccttagaagaactccaaagaaatctccagtttcatgcatttatttcatatagtgggcacgattctttctgggtgaagaatgaattattgccaaacctagagaaagaaggtatgcagatttgccttcatgagagaaactttgttcctggcaagagcattgtggaaaatatcatcacctgcattgagaagagttacaagtccatctttgttttgtctcccaactttgtccagagtgaatggtgccattatgaactctactttgcccatcacaatctctttcatgaaggatctaatagcttaatcctgatcttgctggaacccattccgcagtactccattcctagcagttatcacaagctcaaaagtctcatggccaggaggacttatttggaatggcccaaggaaaagagcaaacgtggccttttttgggctaacttaagggcagccattaatattaagctgacagagcaagcaaagaaatagattacacatcaagtgaaaaatattcctcctgttgatattgctgcttttggaagttccaacaatgactttattttgcatcagcatagatgtaaacacaattgtgagtgtatgatgtaggtaaaaatatataccttcgggtcgcagttcaccatttatatgtggtattaaaaattaatgaaatgatataactttgatttaaacagttctgacacat

SEQ ID NO: 4619 - protein, 35 aa, Homo sapiens; identical to SEQ ID NO: 4603

SEQ ID NO: 4620 - DNA, 3145 bp, Homo sapiens
ggcaagaggaaaaacaaagcagccgaaacacacccagacgcacacttctgccaagcatagccaccacggtaagcattttgaattcagccaattatgatctgtggattattaacattacctcatttacttcatcagtgtagacaatagtaaactgactgtagtgaaatttggaaccatagaaacgtgattctattttaatacaggcctatcaggtaacccacagactatgctacatatgaataagagaaaataagtttattcttaactatgtaatgtaattccagtggaattcggtaggtggcataaaacagcctttttgttttgttttgttttcaacaccaaatgtggttaacagtgaaataaattcaaggaagtgcttgaatttcttacagactgccaaatggaacagacaagcaggttgtcttgtgttaaagaaaatgagatataagtcagttactcccggaggcaatgctgctgttcagctcttctgtttttgtggccagaatctgtatctgtatcaagatgatctgaagaacagcttctacctttaggaatgtctagtgttccaaaatgactagcatcttccattttgccattatcttcatgttaatacttcagatcagaatacaattatctgaagaaagtgaatttttagttgataggtcaaaaaacggtctcatccacgttcctaaagacctatcccagaaaacaacaatcttaaatatatcgcaaaattatatatctgagctttggacttctgacatcttatcactgtcaaaactgaggattttgataatttctcataatagaatccagtatcttgatatcagtgttttcaaattcaaccaggaattggaatacttggatttgtcccacaacaagttggtgaagatttcttgccaccctactgtgaacctcaagcacttggacctgtcatttaatgcatttgatgccctgcctatatgcaaagagtttggcaatatgtctcaactaaaatttctggggttgagcaccacacacttagaaaaatctagtgtgctgccaattgctcatttgaatatcagcaaggtcttgctggtcttaggagagacttatggggaaaaagaagaccctgagggccttcaagactttaacactgagagtctgcacattgtgttccccacaaacaaagaattccattttattttggatgtgtcagtcaagactgtagcaaatctggaactatctaatatcaaatgtgtgctagaagataacaaatgttcttacttcctaagtattctggcgaaacttcaaacaaatccaaagttatcaaatcttaccttaaacaacattgaaacaacttggaattctttcattaggatcctccagctggtttggcatacaactgtatggtatttctcaatttcaaacgtgaagctacagggtcagctggacttcagagattttgattattctggcacttccttgaaggccttgtctatacaccaagttgtcagcgatgtgttcggttttccgcaaagttatatctatgaaatcttttcgaatatgaacatcaaaaatttcacagtgtctggtacacgcatggtccacatgctttgcccatccaaaattagcccgttcctgcatttggatttttccaataatctcttaacagacacggtttttgaaaattgtgggcaccttactgagttggagacacttattttacaaatgaatcaattaaaagaactttcaaaaatagctgaaatgactacacagatgaagtctctgcaacaattggatattagccagaattctgtaagctatgatgaaaagaaaggagactgttcttggactaaaagtttattaagtttaaatatgtcttcaaatatacttactgacactattttcagatgtttacctcccaggatcaaggtacttgatcttcacagcaataaaataaagagcattcctaaacaagtcgtaaaactggaagctttgcaagaactcaatgttgctttcaattctttaactgaccttcctggatgtggcagctttagcagcctttctgtattgatcattgatcacaattcagtttcccacccatcggctgatttcttccagagctgccagaagatgaggtcaataaaagcaggggacaatccattccaatgtacctgtgagctaggagaatttgtcaaaaatatagaccaagtatcaagtgaagtgttagagggctggcctgattcttataagtgtgactacccggaaagttatagaggaaccctactaaaggactttcacatgtctgaattatcctgcaacataactctgctgatcgtcaccatcgttgccaccatgctggtgttggctgtgactgtgacctccctctgcagctacttggatctgccctggtatctcaggatggtgtgccagtggacccagacccggcgcagggccaggaacatacccttagaagaactccaaagaaatctccagtttcatgcatttatttcatatagtgggcacgattctttctgggtgaagaatgaattattgccaaacctagagaaagaaggtatgcagatttgccttcatgagagaaactttgttcctggcaagagcattgtggaaaatatcatcacctgcattgagaagagttacaagtccatctttgttttgtctcccaactttgtccagagtgaatggtgccattatgaactctactttgcccatcacaatctctttcatgaaggatctaatagcttaatcctgatcttgctggaacccattccgcagtactccattcctagcagttatcacaagctcaaaagtctcatggccaggaggacttatttggaatggcccaaggaaaagagcaaacgtggccttttttgggctaacttaagggcagccattaatattaagctgacagagcaagcaaagaaatagattacacatcaagtgaaaaatattcctcctgttgatattgctgcttttggaagttccaacaatgactttattttgcatcagcatagatgtaaacacaattgtgagtgtatgatgtaggtaaaaatatataccttcgggtcgcagttcaccatttatatgtggtattaaaaattaatgaaatgatataactttgatttaaacagttctgacacat

SEQ ID NO: 4621 - protein, 37 aa, Homo sapiens; identical to SEQ ID NO: 4605

SEQ ID NO: 4622 - DNA, 3337 bp, Homo sapiens
tgaggtaaggggaaacagagagagacagtcagaacattataagtcgaaaagaatctcagcattcttagtttagggaagttggccttgctcgctgtgtggtagaaaagctgattacgggagagaaccgtggagggaaggaagggaggcagttttgtcatccccacatccggttttgactggacaccatgcaggctgagatcaacttcagaggcagtcagctggaatcccatagctttatttgcccatttattgtgttgttattttgttgttgtcattactggaaaaggcaagagtagagctatcagaatgtcttccttgaacatgctgtcaacaaaccccaggatttttataaaccctatgtgaaaaacacgctaagaatctcttttcttcttagcatatttttcacttagggtttacaaaaatatgttttgaagaaagcttgaaaagatcagtggaaaaaaattcagcaccaaattttctctgaaaatcaacttgtcaaaaaagacgtgattaacatccatcctgtaaccagcacatgaatgatcttccctctttacgagtgtgcttcagcaaaactttaatctcgacccctccctctttccacttttaatagtggatggatgaaaaggcaagaggaaaaacaaagcagccgaaacacacccagacgcacacttctgccaagcatagccaccacgaatctgtatctgtatcaagatgatctgaagaacagcttctacctttaggaatgtctagtgttccaaaatgactagcatcttccattttgccattatcttcatgttaatacttcagatcagaatacaattatctgaagaaagtgaatttttagttgataggtcaaaaaacggtctcatccacgttcctaaagacctatcccagaaaacaacaatcttaaatatatcgcaaaattatatatctgagctttggacttctgacatcttatcactgtcaaaactgaggattttgataatttctcataatagaatccagtatcttgatatcagtgttttcaaattcaaccaggaattggaatacttggatttgtcccacaacaagttggtgaagatttcttgccaccctactgtgaacctcaagcacttggacctgtcatttaatgcatttgatgccctgcctatatgcaaagagtttggcaatatgtctcaactaaaatttctggggttgagcaccacacacttagaaaaatctagtgtgctgccaattgctcatttgaatatcagcaaggtcttgctggtcttaggagagacttatggggaaaaagaagaccctgagggccttcaagactttaacactgagagtctgcacattgtgttccccacaaacaaagaattccattttattttggatgtgtcagtcaagactgtagcaaatctggaactatctaatatcaaatgtgtgctagaagataacaaatgttcttacttcctaagtattctggcgaaacttcaaacaaatccaaagttatcaaatcttaccttaaacaacattgaaacaacttggaattctttcattaggatcctccagctggtttggcatacaactgtatggtatttctcaatttcaaacgtgaagctacagggtcagctggacttcagagattttgattattctggcacttccttgaaggccttgtctatacaccaagttgtcagcgatgtgttcggttttccgcaaagttatatctatgaaatcttttcgaatatgaacatcaaaaatttcacagtgtctggtacacgcatggtccacatgctttgcccatccaaaattagcccgttcctgcatttggatttttccaataatctcttaacagacacggtttttgaaaattgtgggcaccttactgagttggagacacttattttacaaatgaatcaattaaaagaactttcaaaaatagctgaaatgactacacagatgaagtctctgcaacaattggatattagccagaattctgtaagctatgatgaaaagaaaggagactgttcttggactaaaagtttattaagtttaaatatgtcttcaaatatacttactgacactattttcagatgtttacctcccaggatcaaggtacttgatcttcacagcaataaaataaagagcattcctaaacaagtcgtaaaactggaagctttgcaagaactcaatgttgctttcaattctttaactgaccttcctggatgtggcagctttagcagcctttctgtattgatcattgatcacaattcagtttcccacccatcggctgatttcttccagagctgccagaagatgaggtcaataaaagcaggggacaatccattccaatgtacctgtgagctaggagaatttgtcaaaaatatagaccaagtatcaagtgaagtgttagagggctggcctgattcttataagtgtgactacccggaaagttatagaggaaccctactaaaggactttcacatgtctgaattatcctgcaacataactctgctgatcgtcaccatcgttgccaccatgctggtgttggctgtgactgtgacctccctctgcagctacttggatctgccctggtatctcaggatggtgtgccagtggacccagacccggcgcagggccaggaacatacccttagaagaactccaaagaaatctccagtttcatgcatttatttcatatagtgggcacgattctttctgggtgaagaatgaattattgccaaacctagagaaagaaggtatgcagatttgccttcatgagagaaactttgttcctggcaagagcattgtggaaaatatcatcacctgcattgagaagagttacaagtccatctttgttttgtctcccaactttgtccagagtgaatggtgccattatgaactctactttgcccatcacaatctctttcatgaaggatctaatagcttaatcctgatcttgctggaacccattccgcagtactccattcctagcagttatcacaagctcaaaagtctcatggccaggaggacttatttggaatggcccaaggaaaagagcaaacgtggccttttttgggctaacttaagggcagccattaatattaagctgacagagcaagcaaagaaatagattacacatcaagtgaaaaatattcctcctgttgatattgctgcttttggaagttccaacaatgactttattttgcatcagcatagatgtaaacacaattgtgagtgtatgatgtaggtaaaaatatataccttcgggtcgcagttcaccatttatatgtggtattaaaaattaatgaaatgatataactttgatttaaacagttctgacacat

SEQ ID NO: 4623 - protein, 40 aa, Homo sapiens; identical to SEQ ID NO: 4607

SEQ ID NO: 4624 - DNA, 2984 bp, Homo sapiens
aattgtatttccgttcatttacaagttattttctcttcttctgaaaaagagatcttgtggatggatgaaaaggcaagaggaaaaacaaagcagccgaaacacacccagacgcacacttctgccaagcatagccaccacgactgccaaatggaacagacaagcaggttgtcttgtgttaaagaaaatgagatataagtcagttactcccggaggcaatgctgctgttcagctcttctgtttttgtggccagggtcttcatgaacactaataggggtaccaggccctcttcctcgttagaagaaatcaggataacaaaggcatattgggcacccctacaaaaggaatctgtatctgtatcaagatgatctgaagaacagcttctacctttaggaatgtctagtgttccaaaatgactagcatcttccattttgccattatcttcatgttaatacttcagatcagaatacaattatctgaagaaagtgaatttttagttgataggtcaaaaaacggtctcatccacgttcctaaagacctatcccagaaaacaacaatcttaaatatatcgcaaaattatatatctgagctttggacttctgacatcttatcactgtcaaaactgaggattttgataatttctcataatagaatccagtatcttgatatcagtgttttcaaattcaaccaggaattggaatacttggatttgtcccacaacaagttggtgaagatttcttgccaccctactgtgaacctcaagcacttggacctgtcatttaatgcatttgatgccctgcctatatgcaaagagtttggcaatatgtctcaactaaaatttctggggttgagcaccacacacttagaaaaatctagtgtgctgccaattgctcatttgaatatcagcaaggtcttgctggtcttaggagagacttatggggaaaaagaagaccctgagggccttcaagactttaacactgagagtctgcacattgtgttccccacaaacaaagaattccattttattttggatgtgtcagtcaagactgtagcaaatctggaactatctaatatcaaatgtgtgctagaagataacaaatgttcttacttcctaagtattctggcgaaacttcaaacaaatccaaagttatcaaatcttaccttaaacaacattgaaacaacttggaattctttcattaggatcctccagctggtttggcatacaactgtatggtatttctcaatttcaaacgtgaagctacagggtcagctggacttcagagattttgattattctggcacttccttgaaggccttgtctatacaccaagttgtcagcgatgtgttcggttttccgcaaagttatatctatgaaatcttttcgaatatgaacatcaaaaatttcacagtgtctggtacacgcatggtccacatgctttgcccatccaaaattagcccgttcctgcatttggatttttccaataatctcttaacagacacggtttttgaaaattgtgggcaccttactgagttggagacacttattttacaaatgaatcaattaaaagaactttcaaaaatagctgaaatgactacacagatgaagtctctgcaacaattggatattagccagaattctgtaagctatgatgaaaagaaaggagactgttcttggactaaaagtttattaagtttaaatatgtcttcaaatatacttactgacactattttcagatgtttacctcccaggatcaaggtacttgatcttcacagcaataaaataaagagcattcctaaacaagtcgtaaaactggaagctttgcaagaactcaatgttgctttcaattctttaactgaccttcctggatgtggcagctttagcagcctttctgtattgatcattgatcacaattcagtttcccacccatcggctgatttcttccagagctgccagaagatgaggtcaataaaagcaggggacaatccattccaatgtacctgtgagctaggagaatttgtcaaaaatatagaccaagtatcaagtgaagtgttagagggctggcctgattcttataagtgtgactacccggaaagttatagaggaaccctactaaaggactttcacatgtctgaattatcctgcaacataactctgctgatcgtcaccatcgttgccaccatgctggtgttggctgtgactgtgacctccctctgcagctacttggatctgccctggtatctcaggatggtgtgccagtggacccagacccggcgcagggccaggaacatacccttagaagaactccaaagaaatctccagtttcatgcatttatttcatatagtgggcacgattctttctgggtgaagaatgaattattgccaaacctagagaaagaaggtatgcagatttgccttcatgagagaaactttgttcctggcaagagcattgtggaaaatatcatcacctgcattgagaagagttacaagtccatctttgttttgtctcccaactttgtccagagtgaatggtgccattatgaactctactttgcccatcacaatctctttcatgaaggatctaatagcttaatcctgatcttgctggaacccattccgcagtactccattcctagcagttatcacaagctcaaaagtctcatggccaggaggacttatttggaatggcccaaggaaaagagcaaacgtggccttttttgggctaacttaagggcagccattaatattaagctgacagagcaagcaaagaaatagattacacatcaagtgaaaaatattcctcctgttgatattgctgcttttggaagttccaacaatgactttattttgcatcagcatagatgtaaacacaattgtgagtgtatgatgtaggtaaaaatatataccttcgggtcgcagttcaccatttatatgtggtattaaaaattaatgaaatgatataactttgatttaaacagttctgacacat

SEQ ID NO: 4625 - protein, 67 aa, Homo sapiens; identical to SEQ ID NO: 4609

SEQ ID NO: 4626 - DNA, 2626 bp, Homo sapiens
gaatctgtatctgtatcaagatgatctgaagaacagcttctacctttaggaatgtctagtgttccaaaatgactagcatcttccattttgccattatcttcatgttaatacttcagatcagaatacaattatctgaagaaagtgaatttttagttgataggtcaaaaaacggtctcatccacgttcctaaagacctatcccagaaaacaacaatcttaaatatatcgcaaaattatatatctgagctttggacttctgacatcttatcactgtcaaaactgaggattttgataatttctcataatagaatccagtatcttgatatcagtgttttcaaattcaaccaggaattggaatacttggatttgtcccacaacaagttggtgaagatttcttgccaccctactgtgaacctcaagcacttggacctgtcatttaatgcatttgatgccctgcctatatgcaaagagtttggcaatatgtctcaactaaaatttctggggttgagcaccacacacttagaaaaatctagtgtgctgccaattgctcatttgaatatcagcaaggtcttgctggtcttaggagagacttatggggaaaaagaagaccctgagggccttcaagactttaacactgagagtctgcacattgtgttccccacaaacaaagaattccattttattttggatgtgtcagtcaagactgtagcaaatctggaactatctaatatcaaatgtgtgctagaagataacaaatgttcttacttcctaagtattctggcgaaacttcaaacaaatccaaagttatcaaatcttaccttaaacaacattgaaacaacttggaattctttcattaggatcctccagctggtttggcatacaactgtatggtatttctcaatttcaaacgtgaagctacagggtcagctggacttcagagattttgattattctggcacttccttgaaggccttgtctatacaccaagttgtcagcgatgtgttcggttttccgcaaagttatatctatgaaatcttttcgaatatgaacatcaaaaatttcacagtgtctggtacacgcatggtccacatgctttgcccatccaaaattagcccgttcctgcatttggatttttccaataatctcttaacagacacggtttttgaaaattgtgggcaccttactgagttggagacacttattttacaaatgaatcaattaaaagaactttcaaaaatagctgaaatgactacacagatgaagtctctgcaacaattggatattagccagaattctgtaagctatgatgaaaagaaaggagactgttcttggactaaaagtttattaagtttaaatatgtcttcaaatatacttactgacactattttcagatgtttacctcccaggatcaaggtacttgatcttcacagcaataaaataaagagcattcctaaacaagtcgtaaaactggaagctttgcaagaactcaatgttgctttcaattctttaactgaccttcctggatgtggcagctttagcagcctttctgtattgatcattgatcacaattcagtttcccacccatcggctgatttcttccagagctgccagaagatgaggtcaataaaagcaggggacaatccattccaatgtacctgtgagctaggagaatttgtcaaaaatatagaccaagtatcaagtgaagtgttagagggctggcctgattcttataagtgtgactacccggaaagttatagaggaaccctactaaaggactttcacatgtctgaattatcctgcaacataactctgctgatcgtcaccatcgttgccaccatgctggtgttggctgtgactgtgacctccctctgcagctacttggatctgccctggtatctcaggatggtgtgccagtggacccagacccggcgcagggccaggaacatacccttagaagaactccaaagaaatctccagtttcatgcatttatttcatatagtgggcacgattctttctgggtgaagaatgaattattgccaaacctagagaaagaaggtatgcagatttgccttcatgagagaaactttgttcctggcaagagcattgtggaaaatatcatcacctgcattgagaagagttacaagtccatctttgttttgtctcccaactttgtccagagtgaatggtgccattatgaactctactttgcccatcacaatctctttcatgaaggatctaatagcttaatcctgatcttgctggaacccattccgcagtactccattcctagcagttatcacaagctcaaaagtctcatggccaggaggacttatttggaatggcccaaggaaaagagcaaacgtggccttttttgggctaacttaagggcagccattaatattaagctgacagagcaagcaaagaaatagattacacatcaagtgaaaaatattcctcctgttgatattgctgcttttggaagttccaacaatgactttattttgcatcagcatagatgtaaacacaattgtgagtgtatgatgtaggtaaaaatatataccttcgggtcgcagttcaccatttatatgtggtattaaaaattaatgaaatgatataactttgattt

SEQ ID NO: 4627 - protein, 786 aa, Homo sapiens; identical to SEQ ID NO: 518

SEQ ID NO: 4628 - DNA, 2924 bp, Homo sapiens
aattgtatttccgttcatttacaagttattttctcttcttctgaaaaagagatcttgtggatggatgaaaaggcaagaggaaaaacaaagcagccgaaacacacccagacgcacacttctgccaagcatagccaccacgactgccaaatggaacagacaagcaggttgtcttgtgttaaagaaaatgagatataagtcagttactcccggaggcaatgctgctgttcagctcttctgtttttgtggccagggtcttcatgaacactaataggggtaccaggccctcttcctcgttagaagaaatcaggataacaaaggcatattgggcacccctacaaaaggaatctgtatctgtatcaagatgatctgaagaacagcttctacctttaggaatgtctagtgttccaaaatgactagcatcttccattttgccattatcttcatgttaatacttcagatcagaatacaattatctgaagaaagtgaatttttagttgataggtcaaaaaacggtctcatccacgttcctaaagacctatcccagaaaacaacaatcttaaatatatcgcaaaattatatatctgagctttggacttctgacatcttatcactgtcaaaactgaggattttgataatttctcataatagaatccagtatcttgatatcagtgttttcaaattcaaccaggaattggaatacttggatttgtcccacaacaagttggtgaagatttcttgccaccctactgtgaacctcaagcacttggacctgtcatttaatgcatttgatgccctgcctatatgcaaagagtttggcaatatgtctcaactaaaatttctggggttgagcaccacacacttagaaaaatctagtgtgctgccaattgctcatttgaatatcagcaaggtcttgctggtcttaggagagacttatggggaaaaagaagaccctgagggccttcaagactttaacactgagagtctgcacattgtgttccccacaaacaaagaattccattttattttggatgtgtcagtcaagactgtagcaaatctggaactatctaatatcaaatgtgtgctagaagataacaaatgttcttacttcctaagtattctggcgaaacttcaaacaaatccaaagttatcaaatcttaccttaaacaacattgaaacaacttggaattctttcattaggatcctccagctggtttggcatacaactgtatggtatttctcaatttcaaacgtgaagctacagggtcagctggacttcagagattttgattattctggcacttccttgaaggccttgtctatacaccaagttgtcagcgatgtgttcggttttccgcaaagttatatctatgaaatcttttcgaatatgaacatcaaaaatttcacagtgtctggtacacgcatggtccacatgctttgcccatccaaaattagcccgttcctgcatttggatttttccaataatctcttaacagacacggtttttgaaaattgtgggcaccttactgagttggagacacttattttacaaatgaatcaattaaaagaactttcaaaaatagctgaaatgactacacagatgaagtctctgcaacaattggatattagccagaattctgtaagctatgatgaaaagaaaggagactgttcttggactaaaagtttattaagtttaaatatgtcttcaaatatacttactgacactattttcagatgtttacctcccaggatcaaggtacttgatcttcacagcaataaaataaagagcattcctaaacaagtcgtaaaactggaagctttgcaagaactcaatgttgctttcaattctttaactgaccttcctggatgtggcagctttagcagcctttctgtattgatcattgatcacaattcagtttcccacccatcggctgatttcttccagagctgccagaagatgaggtcaataaaagcaggggacaatccattccaatgtacctgtgagctaggagaatttgtcaaaaatatagaccaagtatcaagtgaagtgttagagggctggcctgattcttataagtgtgactacccggaaagttatagaggaaccctactaaaggactttcacatgtctgaattatcctgcaacataactctgctgatcgtcaccatcgttgccaccatgctggtgttggctgtgactgtgacctccctctgcagctacttggatctgccctggtatctcaggatggtgtgccagtggacccagacccggcgcagggccaggaacatacccttagaagaactccaaagaaatctccagtttcatgcatttatttcatatagtgggcacgattctttctgggtgaagaatgaattattgccaaacctagagaaagaaggtatgcagatttgccttcatgagagaaactttgttcctggcaagagcattgtggaaaatatcatcacctgcattgagaagagttacaagtccatctttgttttgtctcccaactttgtccagagtgaatggtgccattatgaactctactttgcccatcacaatctctttcatgaaggatctaatagcttaatcctgatcttgctggaacccattccgcagtactccattcctagcagttatcacaagctcaaaagtctcatggccaggaggacttatttggaatggcccaaggaaaagagcaaacgtggccttttttgggctaacttaagggcagccattaatattaagctgacagagcaagcaaagaaatagattacacatcaagtgaaaaatattcctcctgttgatattgctgcttttggaagttccaacaatgactttattttgcatcagcatagatgtaaacacaattgtgagtgtatgatgtaggtaaaaatatataccttcgggtcgcagttcaccattt

SEQ ID NO: 4629 - protein, 67 aa, Homo sapiens; identical to SEQ ID NO: 4609

SEQ ID NO: 4630 - DNA, 590 bp, Homo sapiens
agactgccaaatggaacagacaagcaggttgtcttgtgttaaagaaaatgagatataagtcagttactcccggaggcaatgctgctgttcagctcttctgtttttgtggccagggtcttcatgaacactaataggggtaccaggccctcttcctcgttagaagaaatcaggataacaaaggcatattgggcacccctacaaaagggtaagtccaaggaaggctccaaaacccagataagtttgcacatctaaattggggaacttttgtaaccgagggttgtttgtagcagctaaattatttaggttctctgtgctcattgagatatgggaggggatatgtgaagaggaatttggtgctttgctgatactaatgccctgcttgtctaatggttctaggggattttgaataagttccttgtgagaactgggtagctgtgtaatcacggctgaaagggtctctggaggtgaggactgcacactctagagttcatcccaacacagctccctctgttctcatacgccactggaatgctgaccacaaaatggtgtcttagctagagcagtttgaatactggtacaataggcataac

SEQ ID NO: 4631 - protein, 57 aa, Homo sapiens
MLLFSSSVFVARVFMNTNRGTRPSSSLEEIRITKAYWAPLQKGKSKEGSKTQISLHI

SEQ ID NO: 4632 - DNA, 3208 bp, Homo sapiens
ccctttaggatagccactgcaacatcatgaccaaagacaaagaacctattgttaaaagcttccattttgtttgccttatgatcataatagttggaaccagaatccagttctccgacggaaatgaatttgcagtagacaagtcaaaaagaggtcttattcatgttccaaaagacctaccgctgaaaaccaaagtcttagatatgtctcagaactacatcgctgagcttcaggtctctgacatgagctttctatcagagttgacagttttgagactttcccataacagaatccagctacttgatttaagtgttttcaagttcaaccaggatttagaatatttggatttatctcataatcagttgcaaaagatatcctgccatcctattgtgagtttcaggcatttagatctctcattcaatgatttcaaggccctgcccatctgtaaggaatttggcaacttatcacaactgaatttcttgggattgagtgctatgaagctgcaaaaattagatttgctgccaattgctcacttgcatctaagttatatccttctggatttaagaaattattatataaaagaaaatgagacagaaagtctacaaattctgaatgcaaaaacccttcaccttgtttttcacccaactagtttattcgctatccaagtgaacatatcagttaatactttagggtgcttacaactgactaatattaaattgaatgatgacaactgtcaagttttcattaaatttttatcagaactcaccagaggttcaaccttactgaattttaccctcaaccacatagaaacgacttggaaatgcctggtcagagtctttcaatttctttggcccaaacctgtggaatatctcaatatttacaatttaacaataattgaaagcattcgtgaagaagattttacttattctaaaacgacattgaaagcattgacaatagaacatatcacgaaccaagtttttctgttttcacagacagctttgtacaccgtgttttctgagatgaacattatgatgttaaccatttcagatacaccttttatacacatgctgtgtcctcatgcaccaagcacattcaagtttttgaactttacccagaacgttttcacagatagtatttttgaaaaatgttccacgttagttaaattggagacacttatctttgttttgtctcccaactttgtccagagtgagtggtgccattacgaactctattttgcccatcacaatctctttcatgaaggatctaataacttaatcctcatcttactggaacccattccacagaacagcattcccaacaagtaccacaagctgaaggctctcatgacgcagcggacttatttgcagtggcccaaggagaaaagcaaacgtgggctcttttgggctaacattagagccgcttttaatatgaaattaacactagtcactgaaaacaatgatgtgaaatcttaaaaaaatttaggaaattcaacttaagaaaccattatttacttggatgatggtgaatagtacagtcgtaagtaactgtctggaggtgcctccattatcctcatgccttcaggaaagacttaacaaaaacaatgtttcatctggggaactgagctaggcggtgaggttagcctgccagttagagacagcccagtctcttctggtttaatcattatgtttcaaattgaaacagtctcttttgagtaaatgctcagtttttcagctcctctccactctgctttcccaaatggattctgttgtgagcaagagtttatatggcttcatggcagcaagggaacagtcaacttcagcatcatatgcaccagtcctcggagtgccctgtgaatcatattggtctttgggtcagtgtcatcattctcttcaagtctggggcttggggaaaaaattagatcagctacggcatataaaaaagtcttttgtttcacatatgtgtaatagcttatttaattttttatcctgctacacaaatatgtaattaaccaatgaggactcatgacttgatagtgtatgtatgtaaagggatatatggacttaatcataagctgttgaggtgaaagacgtggatccacctgctttccaagaaaactcggccaaatttatttgcagctggatattgaatgggacttttctggttgtcttagaattctggctaaaggctcaaagctgacgaaagacagtaactgcaccaacatgatactagacacagccagtctggacttatcaaaagagcagaaagagaccaatgactcccagtccgtattatccatctctagaagactagagtcaaaagcgtgattaaagagtcattaagcggaggttctaggccatagggagattgctttgaatttcttgcagacaagtgtgagggactcagcatggtagaaggtagcctggcatcccactccaagactgaaagcttgcagagtaacaggagcacacaggttcagtgcagcagatgtggtgtggcttgagaattcttggaagagcttgatgagtgtttgctggagtccgagggtgggcactgggaacacagagactggtaaatagtgtttggcaaatacaagtgcttgatgaatatttgttgaatgaatagatgagttcttcccccctggggaattcaggaggtgaaaggttggcttgagcacccaaaatggcaggatgagagaagagaagcactgatagcaacctgccctcccattattgacatggtaaaaggatgtgaatttcttcacatggctttgactatggaagagtagctgggcttgcattgtcatgacgggatatcagccaacagggtagcctgttgtgcaaagaaactatagcagtaagaggacacggggttaggcagaagaggggtttggggtggaggttgctgcaagaggtcagccagataatgtggccctgcatcatggaactgtgcaatgtggggtacactcaaggccctccaataactcacagatgtgccctatgaaaaagccagcatttggactctgccatagcagctggcaggatcatgctggcctgtctgccttattcaatagttaactacaggaagatctgctcctctttgtgtaataccctcttcccttgcaatggcatagggacatctagaatatagagaagacagagacaatggaggaagagtaaagaaactgactatatgccttcgtcatttcactgca

SEQ ID NO: 4633 - protein, 480 aa, Homo sapiens
MTKDKEPIVKSFHFVCLMIIIVGTRIQFSDGNEFAVDKSKRGLIHVPKDLPLKTKVLDMSQNYIAELQVSDMSFLSELTVLRLSHNRIQLLDLSVFKFNQDLEYLDLSHNQLQKISCHPIVSFRHLDLSFNDFKALPICKEFGNLSQLNFLGLSAMKLQKLDLLPIAHLHLSYILLDLRNYYIKENETESLQILNAKTLHLVFHPTSLFAIQVNISVNTLGCLQLTNIKLNDDNCQVFIKFLSELTRGSTLLNFTLNHIETTWKCLVRVFQFLWPKPVEYLNIYNLTIIESIREEDFTYSKTTLKALTIEHITNQVFLFSQTALYTVFSEMNIMMLTISDTPFIHMLCPHAPSTFKFLNFTQNVFTDSIFEKCSTLVKLETLIFVLSPNFVQSEWCHYELYFAHHNLFHEGSNNLILILLEPIPQNSIPNKYHKLKALMTQRTYLQWPKEKSKRGLFWANIRAAFNMKLTLVTENNDVKS

SEQ ID NO: 4634 - DNA, 2753 bp, Homo sapiens
agaatttggactcatatcaagatgctctgaagaagaacaaccctttaggatagccactgcaacatcatgaccaaagacaaagaacctattgttaaaagcttccattttgtttgccttatgatcataatagttggaaccagaatccagttctccgacggaaatgaatttgcagtagacaagtcaaaaagaggtcttattcatgttccaaaagacctaccgctgaaaaccaaagtcttagatatgtctcagaactacatcgctgagcttcaggtctctgacatgagctttctatcagagttgacagttttgagactttcccataacagaatccagctacttgatttaagtgttttcaagttcaaccaggatttagaatatttggatttatctcataatcagttgcaaaagatatcctgccatcctattgtgagtttcaggcatttagatctctcattcaatgatttcaaggccctgcccatctgtaaggaatttggcaacttatcacaactgaatttcttgggattgagtgctatgaagctgcaaaaattagatttgctgccaattgctcacttgcatctaagttatatccttctggatttaagaaattattatataaaagaaaatgagacagaaagtctacaaattctgaatgcaaaaacccttcaccttgtttttcacccaactagtttattcgctatccaagtgaacatatcagttaatactttagggtgcttacaactgactaatattaaattgaatgatgacaactgtcaagttttcattaaatttttatcagaactcaccagaggttcaaccttactgaattttaccctcaaccacatagaaacgacttggaaatgcctggtcagagtctttcaatttctttggcccaaacctgtggaatatctcaatatttacaatttaacaataattgaaagcattcgtgaagaagattttacttattctaaaacgacattgaaagcattgacaatagaacatatcacgaaccaagtttttctgttttcacagacagctttgtacaccgtgttttctgagatgaacattatgatgttaaccatttcagatacaccttttatacacatgctgtgtcctcatgcaccaagcacattcaagtttttgaactttacccagaacgttttcacagatagtatttttgaaaaatgttccacgttagttaaattggagacacttatcttacaaaagaatggattaaaagaccttttcaaagtaggtctcatgacgaaggatatgccttctttggaaatactggatgttagctggaattctttggaatctggtagacataaagaaaactgcacttgggttgagagtatagtggtgttaaatttgtcttcaaatatgcttactgactctgttttcagatgtttacctcccaggatcaaggtacttgatcttcacagcaataaaataaagagcgttcctaaacaagtcgtaaaactggaagctttgcaagaactcaatgttgctttcaattctttaactgaccttcctggatgtggcagctttagcagcctttctgtattgatcattgatcacaattcagtttcccacccatcggctgatttcttccagagctgccagaagatgaggtcaataaaagcaggggacaatccattccaatgtacctgtgagctaagagaatttgtcaaaaatatagaccaagtatcaagtgaagtgttagagggctggcctgattcttataagtgtgactacccagaaagttatagaggaagcccactaaaggactttcacatgtctgaattatcctgcaacataactctgctgatcgtcaccatcggtgccaccatgctggtgttggctgtgactgtgacctccctctgcatctacttggatctgccctggtatctcaggatggtgtgccagtggacccagactcggcgcagggccaggaacatacccttagaagaactccaaagaaacctccagtttcatgcttttatttcatatagtgaacatgattctgcctgggtgaaaagtgaattggtaccttacctagaaaaagaagatatacagatttgtcttcatgagagaaactttgtccctggcaagagcattgtggaaaatatcatcaactgcattgagaagagttacaagtccatctttgttttgtctcccaactttgtccagagtgagtggtgccattacgaactctattttgcccatcacaatctctttcatgaaggatctaataacttaatcctcatcttactggaacccattccacagaacagcattcccaacaagtaccacaagctgaaggctctcatgacgcagcggacttatttgcagtggcccaaggagaaaagcaaacgtgggctcttttgggctaacattagagccgcttttaatatgaaattaacactagtcactgaaaacaatgatgtgaaatcttaaaaaaatttaggaaattcaacttaagaaaccattatttacttggatgatggtgaatagtacagtcgtaagtaactgtctggaggtgcctccattatcctcatgccttcaggaaagacttaacaaaaacaatgtttcatctggggaactgagctaggcggtgaggttagcctgccagttagagacagcccagtctcttctggtttaatcattatgtttcaaattgaaacagtctcttttgagtaaatgctcagtttttcagctcctctccactctgctttcccaaatggattctgttg

SEQ ID NO: 4635 - protein, 796 aa, Homo sapiens; identical to SEQ ID NO: 520

SEQ ID NO: 4636 - DNA, 1259 bp, Homo sapiens
aattgtatttccgttcatttacaagttattttctcttcttctgaaaaagagatcttgaatttggactcatatcaagatgctctgaagaagaacaaccctttaggatagccactgcaacatcatgaccaaagacaaagaacctattgttaaaagcttccattttgtttgccttatgatcataatagttggaaccagaatccagttctccgacggaaatgaatttgcagtagacaagtcaaaaagaggtcttattcatgttccaaaagacctaccgctgaaaaccaaagtcttagatatgtctcagaactacatcgctgagcttcaggtctctgacatgagctttctatcagagttgacagttttgagactttcccataacagaatccagctacttgatttaagtgttttcaagttcaaccaggatttagaatatttggatttatctcataatcagttgcaaaagatatcctgccatcctattgtgagtttcaggcatttagatctctcattcaatgatttcaaggccctgcccatctgtaaggaatttggcaacttatcacaactgaatttcttgggattgagtgctatgaagctgcaaaaattagatttgctgccaattgctcacttgcatctaagttatatccttctggatttaagaaattattatataaaagaaaatgagacagaaagtctacaaattctgaatgcaaaaacccttcaccttgtttttcacccaactagtttattcgctatccaagtgaacatatcagttaatactttagggtgcttacaactgactaatattaaattgaatgatgacaactgtcaagttttcattaaatttttatcagaactcaccagaggttcaaccttactgaattttaccctcaaccacatagaaacgacttggaaatgcctggtcagagtctttcaatttctttggcccaaacctgtggaatatctcaatatttacaatttaacaataattgaaagcattcgtgaagaagattttacttattctaaaacgacattgaaagcattgacaatagaacatatcacgaaccaagtttttctgttttcacagacagctttgtacaccgtgttttctgagatgaacattatgatgttaaccatttcagatacaccttttatacacatgctgtgtcctcatgcaccaagcacattcaagtttttgaactttacccagaacgttttcacagatagtatttttgaaaaatgttccacgttagttaaattgg

SEQ ID NO: 4637 - protein, 378 aa, Homo sapiens
MTKDKEPIVKSFHFVCLMIIIVGTRIQFSDGNEFAVDKSKRGLIHVPKDLPLKTKVLDMSQNYIAELQVSDMSFLSELTVLRLSHNRIQLLDLSVFKFNQDLEYLDLSHNQLQKISCHPIVSFRHLDLSFNDFKALPICKEFGNLSQLNFLGLSAMKLQKLDLLPIAHLHLSYILLDLRNYYIKENETESLQILNAKTLHLVFHPTSLFAIQVNISVNTLGCLQLTNIKLNDDNCQVFIKFLSELTRGSTLLNFTLNHIETTWKCLVRVFQFLWPKPVEYLNIYNLTIIESIREEDFTYSKTTLKALTIEHITNQVFLFSQTALYTVFSEMNIMMLTISDTPFIHMLCPHAPSTFKFLNFTQNVFTDSIFEKCSTLVK

SEQ ID NO: 4638 - DNA, 548 bp, Homo sapiens
aattgtatttccgttcatttacaagttattttctcttcttctgaaaaagagatcttgtggccaagtggatttttcaaatgtatgtgtgtctctgtgggtgttctgatgggcagttgggagaagttatatggatcagtgaagagcttttaaccatacgccattcagtaataaaagttccccaactcagagttttcactcttccaaagaaagaatttggactcatatcaagatgctctgaagaagaacaaccctttaggatagccactgcaacatcatgaccaaagacaaagaacctattgttaaaagcttccattttgtttgccttatgatcataatagttggaaccagaatccagttctccgacggaaatgaatttgcagtagacaagtcaaaaagaggtcttattcatgttccaaaagacctaccgctgaaaaccaaagtcttagatatgtctcagaactacatcgctgagcttcaggtctctgacatgagctttctatcagagttgacagttttgagactttcccataacagaatccagctacttg

SEQ ID NO: 4639 - protein, 66 aa, Homo sapiens [sequence omitted]

SEQ ID NO: 4640 - DNA, 2152 bp, Homo sapiens
agacgtggcggggcgggacccgctgggcactcccgcgcgtactcggccgcctgagcgccgacccacgccctgcctgctcttccagtccagccaacactctaagcaggcaccgcctccactcgcagcccccgggatgggtcccactccctaccgcagatccccaggccccctccacccagtcggctagccctcgcctctgccatccgatactaaaatgtctgatgatgctggtgacaccttagccactggagacaaagcagaagttactgagatgcctaatagtgattctttacctgaggatgcagaagtgcattgtgattcagctgcagtttcacatgagccaacaccagctgaccccagaggggaggggcatgaaaatgcagctgtgcagggtgcaggggctgccgccattgggccccctgtgcagcctcaggatgccaacgccctggagccccctctcaatggagacgtgactgaggatacacttgctgaatgtattgattccgtcagccttgaggcagaacccagatccgaaatacccctgcaagaacagaattatctggctgtggattcccctccaagtggaggaggatgggcaggctggggatcctggggcaaatctctgctgtcgtcagcatctgccacagtaggtcatggattgacggcagtcaaggaaaaagcaggagccactctacggattcatggtgtaaattctggatcttctgaaggagcccaaccaaatactgaaaacggagtccctgaaataacagatgcagccacagatcagggccctgcagaaagcccacccacttccccttcatcagcctctcggggtatgctgtctgccatcaccaatgtggttcaaaacacaggtaaaagtgtcttaactggaggccttgatgcgttggaattcatcggcaagaaaaccatgaatgtccttgcagaaagtgacccgggctttaagcggaccaagacgctcatggagagaactgtttccttgtctcagatgttaagggaagctaaggagaaggagaagcagagactggcacagcagctcacgatggagagaaccgcgcactacgggatgctgtttgatgaatatcaaggcttgtcacacctggaagccctggaaattctgtccaatgaaagcgaaagcaaggttcagtcatttttagcatcacttgatggagagaagctggaactcttaaaaaatgacctaatttccattaaagacatctttgcagccaaagaattagagaatgaagaaaatcaagaagaacaaggcttagaagaaaagggagaagaatttgctcgcatgcttacagagcttctctttgaattacatgtggcggccacacctgacaaactcaataaggccatgaagagggctcatgactgggtggaagaggatcaaaccgtggtgtcagtagatgtggcaaaagtgtccgaagaagaaacaaagaaggaagaaaaggaagagaaatctcaagaccctcaagaagacaaaaaggaggaaaagaaaactaagaccatagaggaagtatacatgtcgtccattgaaagtctggcggaggtaacagcgcgctgtattgagcagcttcataaagtagcagaattaattcttcatggacaagaagaggaaaaaccagctcaggaccaagcaaaagttctaataaaattaactactgcaatgtgcaatgaagtggcctctttatcaaagaagtttacgaattctttaaccactgttgggagcaacaagaaggccgaggtccttaaccccatgatcagtagtgtattgttagagggctgcaacagtacaacgtacatacaggatgccttccagctgctgctgcctgttctgcaggtctcacatatccagaccagttgtttgaaagcacagccgtgacctggccagactccatctagttaaaggagacagctggccgccttgcctcaatatgtaccatttaaggggatgttctctgtgcgcctggccacagacatccatttgaggacactacaagcaattttgcacagacaatattgagaatgcaaatttagagagagttatcatttctctcaatgtgtataattgtttttacaaacaattgtgttttctttatgttaatttaaacttacacagcttatattg

SEQ ID NO: 4641 - protein, 563 aa, Homo sapiens
MSDDAGDTLATGDKAEVTEMPNSDSLPEDAEVHCDSAAVSHEPTPADPRGEGHENAAVQGAGAAAIGPPVQPQDANALEPPLNGDVTEDTLAECIDSVSLEAEPRSEIPLQEQNYLAVDSPPSGGGWAGWGSWGKSLLSSASATVGHGLTAVKEKAGATLRIHGVNSGSSEGAQPNTENGVPEITDAATDQGPAESPPTSPSSASRGMLSAITNVVQNTGKSVLTGGLDALEFIGKKTMNVLAESDPGFKRTKTLMERTVSLSQMLREAKEKEKQRLAQQLTMERTAHYGMLFDEYQGLSHLEALEILSNESESKVQSFLASLDGEKLELLKNDLISIKDIFAAKELENEENQEEQGLEEKGEEFARMLTELLFELHVAATPDKLNKAMKRAHDWVEEDQTVVSVDVAKVSEEETKKEEKEEKSQDPQEDKKEEKKTKTIEEVYMSSIESLAEVTARCIEQLHKVAELILHGQEEEKPAQDQAKVLIKLTTAMCNEVASLSKKFTNSLTTVGSNKKAEVLNPMISSVLLEGCNSTTYIQDAFQLLLPVLQVSHIQTSCLKAQP

SEQ ID NO: 4642 - DNA, 931 bp, Homo sapiens
gcgcgcttgcgctgcaagactcggcaagtttgttccgactgtaactccggggatgaggaacggggtctctcgcccctcctccggcttcgcagcccccgaccccaagtgggctccccgcccacagcagtgttcgtcctcctacctcctggccccctcccttccgctgggatttggatctaaccaatgaagctcctctgtcatcagcaccaatgaacccagcaacatgtcatacgtgaaagagacagtggacagattgctcaaaggatatgacattcgcttgcggccggacttcggagggccccccgtcgacgttgggatgcggatcgatgtcgccagcatagacatggtctccgaagtgaatatggattatacactcaccatgtatttccagcagtcttggaaagacaaaaggctttcttattctggaatcccactgaacctcaccctagacaatagggtagctgaccaactctgggtaccagacacctactttctgaatgacaagaaatcatttgtgcatggggtcacagtgaaaaatcgaatgattcgactgcatcctgatggaacagttctctatggactccggtaaatggctttatgttgcatgttttaatgttgttgttgttttgtttcattttaaacttttggaagtgggcaaaggggagagaagcaagaatatatagatgaatatataaatggggtgtcatatacttatgaaggtctattacaaaccctcatgtagttaagggctttttacaaattataggcaacacatcaaaattaactaccagttttaacaaggaaatatctgaactgtaacctgttattataggatatgtaaagtggtggctctttattctttggtgtcacctttagtcattcttttgagaaacagatgaaacctatatattcataaactcatatatgcctc

SEQ ID NO: 4643 - protein, 121 aa, Homo sapiens
MSYVKETVDRLLKGYDIRLRPDFGGPPVDVGMRIDVASIDMVSEVNMDYTLTMYFQQSWKDKRLSYSGIPLNLTLDNRVADQLWVPDTYFLNDKKSFVHGVTVKNRMIRLHPDGTVLYGLR

SEQ ID NO: 4644 - DNA, 849 bp, Homo sapiens
aaaaaaaacaaaatcaggttgagggcagaaatgaaatcaacatagcaacctccaatgcatgaaggaaactccgtttacacatgctcgtaggatcccctgcgtggaaacagcagcttgtctctgactacccggaggacatggagcaccccaaataggaactttagagggattgaaatctgttgcctgttccactaggaatattgtttgcaaggcacaaggtgtcttttggtagtgagcgcgctctgcgcatgcgcaggtccattcgggaattactgcccagcagccgactaagttgcattccttgaatcttcgcagaaaagacaattcttttaatcagagttagtaatgtggacagtacaaaatcgagagagtctggggcttctctctttccctgtgatgattaccatggtctgttgtgcacacagcaccaatgaacccagcaacatgtcatacgtgaaagagacagtggacagattgctcaaaggatatgacattcgcttgcggccggacttcggagggccccccgtcgacgttgggatgcggatcgatgtcgccagcatagacatggtctccgaagtgaatatgcatgtcctaaagaaaaaattggggaaataaaaatcccaagccaactattgagaggccaatgagaagagagaaagaagattcacgacagaggttaatattggccaactgaaaacttctgtcttcatgtggggagaactgatctttagaagtgtcgaagttgggaatgagaggaagactggataaaaaatttggagagtaggatatattcacaaaactggaaaaatggattcagtccttggtgggttatttgtgtctgcctcttat

SEQ ID NO: 4645 - protein, 89 aa, Homo sapiens
MWTVQNRESLGLLSFPVMITMVCCAHSTNEPSNMSYVKETVDRLLKGYDIRLRPDFGGPPVDVGMRIDVASIDMVSEVNMHVLKKKLGK

SEQ ID NO: 4646 - DNA, 1016 bp, Homo sapiens
aatgcatgaaggaaactccgtttacacatgctcgtaggatcccctgcgtggaaacagcagcttgtctctgactacccggaggacatggagcaccccaaataggaactttagagggattgaaatctgttgcctgttccactaggaatattgtttgcaaggcacaaggtgtcttttggtagtgagcgcgctctgcgcatgcgcaggtccattcgggaattactgcccagcagccgactaagttgcattccttgaatcttcgcagaaaagacaattcttttaatcagagttagtaatgtggacagtacaaaatcgagagagtctggggcttctctctttccctgtgatgattaccatggtctgttgtgcacacagcaccaatgaacccagcaacatgtcatacgtgaaagagacagtggacagattgctcaaaggatatgacattcgcttgcggccggacttcggagggccccccgtcgacgttgggatgcggatcgatgtcgccagcatagacatggtctccgaagtgaatatggtgagtggcctcccgaggggcccggcggttcggcttacgcagatgggaaatggacaggtccctttgccctctgcgtttcattggcggtcacctcgcccctggcccctgaggtcccactccgcacccgctccccgctccggcacacacacccggtcgcccctggtttgtaatttcgacacacacgggctactgcggtgttccaggggaaacgtgctcggcactattttgggaaggacgagtgactgttgcgccgtggatctgctggggcggagtctgagcgttactttagctgggtttccctgcgtgtttggatgaggagggcaccatctgctggcagccgggcggcctgcactagggtccccggaccggtggtcggcagccatcacctccccaggcgcggtgctggcaatccccatggccctcgcagtccgcgagcccggatgcaccaaggccctgccaccgagagcacagtctgggtttcaaa

SEQ ID NO: 4647 - protein, 184 aa, Homo sapiens
MWTVQNRESLGLLSFPVMITMVCCAHSTNEPSNMSYVKETVDRLLKGYDIRLRPDFGGPPVDVGMRIDVASIDMVSEVNMVSGLPRGPAVRLTQMGNGQVPLPSAFHWRSPRPWPLRSHSAPAPRSGTHTRSPLVCNFDTHGLLRCSRGNVLGTILGRTSDCCAVDLLGRSLSVTLAGFPCVFG

SEQ ID NO: 4648 - DNA, 357 bp, Homo sapiens
gaatgaagaatgtgaagattaaaagatcgtatgaatcaagaattaatttgtgaatttcatgagtcataagtgcccctagtgttttcccaggcctcaccaaggctgtaggtacaaatggtagagttgccatcatgttccagccactcttggtccccatctgcatgtgccgggtgtctcctcaaattctctttcaagttgagtcctagcaggtatactttaccagttcaacaggcccactcaagaagattcaatcctaataacagatacagcttaagctaaagcttggacacctcaactcttgtataagacctcagtctttgtacctgttttgtactattaattaaacagtaaagtttc

SEQ ID NO: 4649 - protein, 54 aa, Homo sapiens
MVELPSCSSHSWSPSACAGCLLKFSFKLSPSRYTLPVQQAHSRRFNPNNRYSLS

SEQ ID NO: 4650 - DNA, 328 bp, Homo sapiens
acagtggtatgagcacaaaaggaggagatcactggagatatattaaagtatggagaccaccatctgtgtgaagacagaaggacaaaccatatggcatatggaggtaaagactaccgatggcttatggattatgcaagtgattgatatttgaaataaaaatctacattgagttatcaaagataatagtcacttccattgaagaataagcaaaacttccaaagacttcattaatatccacatcagtgatatttcaagagagactaactcagcagtgtcagctaatgaaagtgaatgaagaatgtgaagattaaaagatcgtatgaatcaa

SEQ ID NO: 4651 - protein, 33 aa, Homo sapiens
METTICVKTEGQTIWHMEVKTTDGLWIMQVIDI

SEQ ID NO: 4652 - DNA, 1288 bp, Homo sapiens
atttttcacattagggtcactaaggtaagcaagtatgcccacatttacccccaggtttctcaaatattacttaaaactatagttattttattcttacattatttaacacaagcaactatattccatctgatctgtggctttgaagataaaaaggtctaagagagacattgtgctcaacttatatttctatttaccaccacatggacccatctgttccagtttgtacttggagcctttccttctctgccattatgaagaatgaatggtccaaggctaaaatcagtgcactaatttctacctctctcaataactgtgtccttctataatgtgttaattatctttgttttaataaattctaaatcatgcttgccttaaccattctagatgaaatgcaattttcattacctatcatatagaagttgaatagttctgttttctgactctgctcgttcataatacaccacctgaactaagtaatgggtataatatacccaaatacatttggactcttcaatatggtcctattgaagaggcacaaaagaattcatttgtgtgctccctttgctaatggtattttcaacgttcatttagaaatgcatttatagttattttatgaacaatataagaaaaattagttgtgtacaagttatgcacctaatttttgactaaaaatgttatccattaatttatttttctactcttacttatttccaataatcaccttcagtgtaacaatttgctaccaccttgaatatttaaacaagtggccaagagttcaaagggaatttctacagcagggttgtgaacatattttaagtgcagcagtactgacagactaagcatatagctttctgagggaaatattgtgaagagacaacattcatgtgtgtatctgtaggttggcccacagtgaaaaagtattatccataatactgcacacatatttctcatatctcaatgcactttatactcttaggaggaaatcccctactcatgggctgttgaagaaccttaatcattagaattaataattttcgtgcaagtagttttattttcatataaggttccagtttcatataaggggttaactttctccttaaaatctagtaaacctgactacataaaagccaaagccatcagggagatagtgttaagagtagacactttctaagttgagatttaaaaataagtaaataaccacttaccatttgcttaatatgtgctaactatagtgtgcattgtaggaaaaagaaatacaaggaacagactcttttaaaaaagattacag

SEQ ID NO: 4653 - protein, 41 aa, Homo sapiens
MDPSVPVCTWSLSFSAIMKNEWSKAKISALISTSLNNCVLL

SEQ ID NO: 4654 - DNA, 7538 bp, Homo sapiens
agcgcgctggacgctgctgctgcagactaaatcgcagtctcatctcaaattgtgaatttattggattcacgcactgtcatgggggacctgggatggattgcttttccaaaaaatgggtgggaagagattggtgaagtggatgaaaattatgcccctatccacacataccaagtatgcaaagtgatggaacagaatcagaataactggcttttgaccagttggatctccaatgaaggtgcttccagaatcttcatagaactcaaatttaccctgcgggactgcaacagccttcctggaggactggggacctgtaaggaaacctttaatatgtattactttgagtcagatgatcagaatgggagaaacatcaaggaaaaccaatacatcaaaattgataccattgctgccgatgaaagctttacagaacttgatcttggtgaccgtgttatgaaactgaatacagaggtcagagatgtaggacctctaagcaaaaagggattttatcttgcttttcaagatgttggtgcttgcattgctctggtttctgtgcgtgtatactataaaaaatgcccttctgtggtacgacacttggctgtcttccctgacaccatcactggagctgattcttcccaattgctcgaagtgtcaggctcctgtgtcaaccattctgtgaccgatgaacctcccaaaatgcactgcagcgccgaaggggagtggctggtgcccatcgggaaatgcatgtgcaaggcaggatatgaagagaaaaatggcacctgtcaagtgtgcagacctgggttcttcaaagcctcacctcacatccagagctgcggcaaatgtccacctcacagttatacccatgaggaagcttcaacctcttgtgtctgtgaaaaggattatttcaggagagagtctgatccacccacaatggcatgcacaagacccccctctgctcctcggaatgccatctcaaatgttaatgaaactagtgtctttctggaatggattccgcctgctgacactggtggaaggaaagacgtgtcatattatattgcatgcaagaagtgcaactcccatgcaggtgtgtgtgaggagtgtggcggtcatgtcaggtaccttccccggcaaagcggcctgaaaaacacctctgtcatgatggtggatctactcgctcacacaaactatacctttgagattgaggcagtgaatggagtgtccgacttgagcccaggagcccggcagtatgtgtctgtaaatgtaaccacaaatcaagcagctccatctccagtcaccaatgtgaaaaaagggaaaattgcaaaaaacagcatctctttgtcttggcaagaaccagatcgtcccaatggaatcatcctagagtatgaaatcaagtattttgaaaaggaccaagagaccagctacacgattatcaaatctaaagagacaactattactgcagagggcttgaaaccagcttcagtttatgtcttccaaattcgagcacgtacagcagcaggctatggtgtcttcagtcgaagatttgagtttgaaaccaccccagtgtttgcagcatccagcgatcaaagccagattcctgtaattgctgtgtctgtgacagtgggagtcattttgttggcagtggttatcggcgtcctcctcagtggaagttgctgcgaatgtggctgtgggagggcttcttccctgtgcgctgttgcccatccaagcctaatatggcggtgtggctacagcaaagcaaaacaagatccagaagaggaaaagatgcattttcataatgggcacattaaactgccaggagtaagaacttacattgatccacatacctatgaggatcccaatcaagctgtccacgaatttgctaaggagatagaagcatcatgtatcaccattgagagagttattggagcaggtgaatttggtgaagtttgtagtggacgtttgaaactaccaggaaaaagagaattacctgtggctatcaaaacccttaaagtaggctatactgaaaagcaacgcagagatttcctaggtgaagcaagtatcatgggacagtttgatcatcctaacatcatccatttagaaggtgtggtgaccaaaagtaaaccagtgatgatcgtgacagagtatatggagaatggctctttagatacatttttgaagaaaaacgatgggcagttcactgtgattcagcttgttggcatgctgagaggtatctctgcaggaatgaagtacctttctgacatgggctatgtgcatagagatcttgctgccagaaacatcttaatcaacagtaaccttgtgtgcaaagtgtctgactttggactttcccgggtactggaagatgatcccgaggcagcctacaccacaaggggaggaaaaattccaatcagatggactgccccagaagcaatagctttccgaaagtttacttctgccagtgatgtctggagttatggaatagtaatgtgggaagttgtgtcttatggagagagaccctactgggagatgaccaatcaagatgtgattaaagcggtagaggaaggctatcgtctgccaagccccatggattgtcctgctgctctctatcagttaatgctggattgctggcagaaagagcgaaatagcaggcccaagtttgatgaaatagtcaacatgttggacaagctgatacgtaacccaagtagtctgaagacgctggttaatgcatcctgcagagtatctaatttattggcagaacatagcccactaggatctggggcctacagatcagtaggtgaatggctagaggcaatcaagatgggccggtatacagagattttcatggaaaatggatacagttcaatggacgctgtggctcaggtgaccttggaggatttgagacggcttggagtgactcttgtcggtcaccagaagaagatcatgaacagccttcaagaaatgaaggtgcagctggtaaacggaatggtgccattgtaacttcatgtaaatgtcgcttcttcaagtgaatgattctgcactttgtaaacagcactgagatttattttaacaaaaaaagggggaaaagggaaaacagtgatttctaaaccttagaaaacatttgcctcagccacagaatttgtaatcatggttttactgaagtatccagttcttagtccttagtcttcatttttcatgaagcaaacatatcttgcattaaaagggacatgaagttagacatcatcttaagttacaacaacagaatccttcccactacttctacaaaattttgtacatgaaatatataattatatagcacttttatagactgaattaaggcaacccctttcaaaacttccagggatctacttgaaaggaaatgttttatagccatttgtgagctaacaaaagctacagtttactgaagtttacttcaagtcttaattgtctacaaaagtgtattgaagagcaatatgattagattatttcttaatagatatcttcttttgtaattttaaaatgctgttacacagcgttaagttatagaaactagtgtgtaaacatgttgcttgatcaagaaaaagtacaatacagggtgtatatttattttttgtgttataaagtttacttttagttgctcttctagagattattaggtaataaatgtgtatatactgtataatttgcaatatacccaggaactgatttaagatggaattgtgtgtgtgtttgcttgcacatgtgtgtgttaccattctgcttgcatttctaatagtgtttcaattttagcaacatataggagcaagtgttccagaatgtaatatgaataggagaaatagggaagcagtaaaacaaaatttaacacaagcttgtgtctcttttcctctcatgtgtccaaaagctaatctctttattcactaaaaggaaatgtgtataagactaaatcccctttggctttttaaaaacattttgtgatatcagtgacaatgcagttcttctagccattaatcttgtacccctgtaagaaatttcacctttctgagtcctgaaaagtatcttgtcaagcaaagttgacaccgaagggcacattttcagcaggatgtagaaggatttaactgtgcaggcttctgttaatgttgttaaatccaggcacatagcacgaagcatcacccttaagtgttaatccgttgtaaccattcccattttgactcagttctagaaattttgactctaaggcagcaatggaattatgacaaatatatatatatacacatacacacacacaaatatatatatatgcttatttcccttcagaattttatttcaataattgataagttttatttttaatggatgtttattcatttgttaatttcagtttgtattcagttacatggctttgagtttattttattgaaccaatccaaggtattatgtaattaggcttattaaggaatataacatatcttctatgtatgctctatataccacacatgatgaagacttatatttgtgatacaaattatgcagtgtattagaaattgtccaaaactgagctcctgagataaccaacatttttgtattattacactttataaaaattatggaatgtcatgtgattagtcaaaatcagagcatttaaataaaatacagcctactcatgattatcaatgttaatagtacagtagatcagagaagcctggattaatgaaatttatcagaaatatagccacgttatattaatggtattcttttttccaagcacttgttttatttgaatattagcacatataagaataaacttttgggaaataactacttcctattctgcccaccctttacttaagcagtaaagtacctcttttctaaagaaccaggaaacatcaaaataaccacaacaaaaatctaaacagttttcaaataatacattcagttctcataataataagggctatataccatgggtccacacaaactgtgctgcaaacatataatctattagtttagtaaaatttccagagatgtgaatttaatattttcttgataaaatcataaaaaagcatcaccattattaaagatgcatttgttcatttcaataaacagaaattaatgaaacaaattacttttgtacaaaataaatgatgattatgtggcactttattgaattttatagaaatattccaatctaagtgataaagtaacaactgagaaacttcagaatgaaagccttattgattcaaaaggaaaattaccatatgctttagggctgatgaacttgccacaattgcttagacataacaaagatattttctacattgttttccaactttatatgctgaaagataattaggaggtccgggtggagtgtatctaaatgactagaactttaagttgcaatatagattttctctttttaacaaaggaagaatataaattaatttggatcaaatttatttgccttctttgcaatcttggtgatcattttggaaagtaaattgaaaggaaagttaaatagccacatagttttcttttgcatctcaatttggttgagaatttctaaggaaggttaatatgactttagaatgaataaagagactgtcaaacaacaagtactctccctaaaaaagaggaaagaatgccttcctaaaatatttgtttcctattgtatatgtcaccaattggaaaatgccaatctcatctgcaagtgtgagaaatggaacaaggagaggagccaactctagtaaaatgtagtgaggccataatccaaggcaaagtttaacaaatcttgattgtgtaatttcttattctgttgattcattttgtcacccaccagactaccaaaaataaagcacagacatgacaattttagtatatacaacagatttggcaaataatacataatcttattgtaattgccagtagcaatatcttaaggggcatgagtctttcacagtattggactttgaaaaattggtacagggagtaattttcaacagactgatacttgaagtcactcaattactactttgacctatcataatttgtttctaatcttgtcatttgctcatatatactattaatataaccagttgctcttttcataatgtactatttctatgtaaagatgtaaagattttgattttcctatgttttaaaattgtaatgtgcatgatcttttatttcttgtgtttcaattaccaagtcagtattctaaggttgtaagattactgtaaaaattatattccaatattttatctaaacttaagtgtggccagcattattggtttcagagttgcctaaacaacacagaatatccttaattcagtttgtaaaagagttttgaccagtgtaaaaaagtgaagacacagtttcatgtttcaagtttaaaatggaaagttaatatcatttgagcacttatgtgttttcatgtcttctacttaatctgtatgtgaaagtaaaatatttttaacaccattatttatgccatgtaaagtgggttctcagaagcacaagcacagatatttaccttctgaagacatttttggctataaaagtgcattggatggcaaacactatttgagtcaggtgttagaaatttattagatgtattatattacatagtagaataaggtccctttctcattttgtttttcctaaaaataagaaaaaaaagaagtgtgatagtaaactgtctttgctaatgtcctgccagatgtttaacttcaaattaagcaaaaagtaggtacaatatgatgatgatcctgatgatgatgatgatgatgatgatgaagaataaatggaatcaaaatgctagctttatttgacattaataagtaaaataagtcatcattttttcaactctgtagcacagctgtttacattgaataattttctctattgtgctgttaattatatagtaatgtatcaaaatagaaataggaactttcttttcatttcttattcatttatgaagaaatcttttcacacataaatgattgaatgttcttgttcagaatgaccacataatcattgcttagaagaagataccaattcttttaaaagaaaaaaagtctgtttataataatcagaatcaaatgttgtttgtttcttctaaacgttaatggagaaaattgaaggtggtaaaatgtcatgtttattcaggctgggaactgtattcacagtagaagtttcagtggtcaacatatctatgactctttaggctgctgtagttttacagtcaattatttaaaagtgagtagttacatttataagagcctgagaatacttagactcagtcatttgttagtatttttaccaaaatctcttagtttcagacatgtcagaagcagctatatagcatatcttattctatgatatacatcaggctatctcaagttcctgtctcacagttaattcaaagaaggattaggatttctgtattttttctcatttgaatctttatgtgcatttggtttgtgtacatgctttttgtagtgtaagatatgaaattttatattttttcagaaaataaaaaccctttgaatacagttaca

SEQ ID NO: 4655 - protein, 968 aa, Homo sapiens
MGDLGWIAFPKNGWEEIGEVDENYAPIHTYQVCKVMEQNQNNWLLTSWISNEGASRIFIELKFTLRDCNSLPGGLGTCKETFNMYYFESDDQNGRNIKENQYIKIDTIAADESFTELDLGDRVMKLNTEVRDVGPLSKKGFYLAFQDVGACIALVSVRVYYKKCPSVVRHLAVFPDTITGADSSQLLEVSGSCVNHSVTDEPPKMHCSAEGEWLVPIGKCMCKAGYEEKNGTCQVCRPGFFKASPHIQSCGKCPPHSYTHEEASTSCVCEKDYFRRESDPPTMACTRPPSAPRNAISNVNETSVFLEWIPPADTGGRKDVSYYIACKKCNSHAGVCEECGGHVRYLPRQSGLKNTSVMMVDLLAHTNYTFEIEAVNGVSDLSPGARQYVSVNVTTNQAAPSPVTNVKKGKIAKNSISLSWQEPDRPNGIILEYEIKYFEKDQETSYTIIKSKETTITAEGLKPASVYVFQIRARTAAGYGVFSRRFEFETTPVFAASSDQSQIPVIAVSVTVGVILLAVVIGVLLSGSCCECGCGRASSLCAVAHPSLIWRCGYSKAKQDPEEEKMHFHNGHIKLPGVRTYIDPHTYEDPNQAVHEFAKEIEASCITIERVIGAGEFGEVCSGRLKLPGKRELPVAIKTLKVGYTEKQRRDFLGEASIMGQFDHPNIIHLEGVVTKSKPVMIVTEYMENGSLDTFLKKNDGQFTVIQLVGMLRGISAGMKYLSDMGYVHRDLAARNILINSNLVCKVSDFGLSRVLEDDPEAAYTTRGGKIPIRWTAPEAIAFRKFTSASDVWSYGIVMWEVVSYGERPYWEMTNQDVIKAVEEGYRLPSPMDCPAALYQLMLDCWQKERNSRPKFDEIVNMLDKLIRNPSSLKTLVNASCRVSNLLAEHSPLGSGAYRSVGEWLEAIKMGRYTEIFMENGYSSMDAVAQVTLEDLRRLGVTLVGHQKKIMNSLQEMKVQLVNGMVPL

SEQ ID NO: 4656 - DNA, 8350 bp, Homo sapiens
acacagcaggagcgcgccttggcggtgcagtttcaacctcgacttcgcagccgcgcacacaccgcctgctccccgagcagcgggaaccgcagcagctcctgggccgccgcagcgcagctccgcgctcctaccggccggcagccgtcagtccctcccctcttcagcactcagcccgcagctatttccttctgccagtctctttgaactctggatctttgcttttgctcgctgctctcctgtttttcattctccacattttctcaagtcctctttctttatccttagccaccctgcttttttcctccttttttaaaaaatcggagatttcgtcttaaaatgatttgccttccttaccttcgtccatttcaacactgaaggctgcaaagaaccttcacctttcccctagtggtatttaaaaattctcaatccgtaaaaagtctttttgaaaggcaaaggaacaggacccaggaccctctcgacacccttgatccgagtccagatctgcactagcaaccagaactaatatttcatttaaccccaccaaagggggaggcgagaggagccagaagcaaacttcagctgtctcagccggatccgtggttcctacatttggaggagccgcgtgccagaaggcgtaggaccccaaggggggacaaggaggactcccgagtctcccttcgccgctctgcgaggccgaagcggtggactgagccgctcgggacagcggcaccggaggaggctcggagaagatgcggggctcggggccccggggtgcgggacgccggcggcccccaagcggcggcggcgacacccccatcaccccagcgtccctggccggctgctactctgcacctcgacgggctcccctctggacgtgccttctcctgtgcgccgcactccggaccctcctggccagccccagcaacgaagtgaatttattggattcacgcactgtcatgggggacctgggatggattgcttttccaaaaaatgggtgggaagagattggtgaagtggatgaaaattatgcccctatccacacataccaagtatgcaaagtgatggaacagaatcagaataactggcttttgaccagttggatctccaatgaaggtgcttccagaatcttcatagaactcaaatttaccctgcgggactgcaacagccttcctggaggactggggacctgtaaggaaacctttaatatgtattactttgagtcagatgatcagaatgggagaaacatcaaggaaaaccaatacatcaaaattgataccattgctgccgatgaaagctttacagaacttgatcttggtgaccgtgttatgaaactgaatacagaggtcagagatgtaggacctctaagcaaaaagggattttatcttgcttttcaagatgttggtgcttgcattgctctggtttctgtgcgtgtatactataaaaaatgcccttctgtggtacgacacttggctgtcttccctgacaccatcactggagctgattcttcccaattgctcgaagtgtcaggctcctgtgtcaaccattctgtgaccgatgaacctcccaaaatgcactgcagcgccgaaggggagtggctggtgcccatcgggaaatgcatgtgcaaggcaggatatgaagagaaaaatggcacctgtcaagtgtgcagacctgggttcttcaaagcctcacctcacatccagagctgcggcaaatgtccacctcacagttatacccatgaggaagcttcaacctcttgtgtctgtgaaaaggattatttcaggagagagtctgatccacccacaatggcatgcacaagacccccctctgctcctcggaatgccatctcaaatgttaatgaaactagtgtctttctggaatggattccgcctgctgacactggtggaaggaaagacgtgtcatattatattgcatgcaagaagtgcaactcccatgcaggtgtgtgtgaggagtgtggcggtcatgtcaggtaccttccccggcaaagcggcctgaaaaacacctctgtcatgatggtggatctactcgctcacacaaactatacctttgagattgaggcagtgaatggagtgtccgacttgagcccaggagcccggcagtatgtgtctgtaaatgtaaccacaaatcaagcagctccatctccagtcaccaatgtgaaaaaagggaaaattgcaaaaaacagcatctctttgtcttggcaagaaccagatcgtcccaatggaatcatcctagagtatgaaatcaagtattttgaaaaggaccaagagaccagctacacgattatcaaatctaaagagacaactattactgcagagggcttgaaaccagcttcagtttatgtcttccaaattcgagcacgtacagcagcaggctatggtgtcttcagtcgaagatttgagtttgaaaccaccccagtgtttgcagcatccagcgatcaaagccagattcctgtaattgctgtgtctgtgacagtgggagtcattttgttggcagtggttatcggcgtcctcctcagtggaaggcggtgtggctacagcaaagcaaaacaagatccagaagaggaaaagatgcattttcataatgggcacattaaactgccaggagtaagaacttacattgatccacatacctatgaggatcccaatcaagctgtccacgaatttgctaaggagatagaagcatcatgtatcaccattgagagagttattggagcaggtgaatttggtgaagtttgtagtggacgtttgaaactaccaggaaaaagagaattacctgtggctatcaaaacccttaaagtaggctatactgaaaagcaacgcagagatttcctaggtgaagcaagtatcatgggacagtttgatcatcctaacatcatccatttagaaggtgtggtgaccaaaagtaaaccagtgatgatcgtgacagagtatatggagaatggctctttagatacatttttgaagaaaaacgatgggcagttcactgtgattcagcttgttggcatgctgagaggtatctctgcaggaatgaagtacctttctgacatgggctatgtgcatagagatcttgctgccagaaacatcttaatcaacagtaaccttgtgtgcaaagtgtctgactttggactttcccgggtactggaagatgatcccgaggcagcctacaccacaaggggaggaaaaattccaatcagatggactgccccagaagcaatagctttccgaaagtttacttctgccagtgatgtctggagttatggaatagtaatgtgggaagttgtgtcttatggagagagaccctactgggagatgaccaatcaagatgtgattaaagcggtagaggaaggctatcgtctgccaagccccatggattgtcctgctgctctctatcagttaatgctggattgctggcagaaagagcgaaatagcaggcccaagtttgatgaaatagtcaacatgttggacaagctgatacgtaacccaagtagtctgaagacgctggttaatgcatcctgcagagtatctaatttattggcagaacatagcccactaggatctggggcctacagatcagtaggtgaatggctagaggcaatcaagatgggccggtatacagagattttcatggaaaatggatacagttcaatggacgctgtggctcaggtgaccttggaggatttgagacggcttggagtgactcttgtcggtcaccagaagaagatcatgaacagccttcaagaaatgaaggtgcagctggtaaacggaatggtgccattgtaacttcatgtaaatgtcgcttcttcaagtgaatgattctgcactttgtaaacagcactgagatttattttaacaaaaaaagggggaaaagggaaaacagtgatttctaaaccttagaaaacatttgcctcagccacagaatttgtaatcatggttttactgaagtatccagttcttagtccttagtcttcatttttcatgaagcaaacatatcttgcattaaaagggacatgaagttagacatcatcttaagttacaacaacagaatccttcccactacttctacaaaattttgtacatgaaatatataattatatagcacttttatagactgaattaaggcaacccctttcaaaacttccagggatctacttgaaaggaaatgttttatagccatttgtgagctaacaaaagctacagtttactgaagtttacttcaagtcttaattgtctacaaaagtgtattgaagagcaatatgattagattatttcttaatagatatcttcttttgtaattttaaaatgctgttacacagcgttaagttatagaaactagtgtgtaaacatgttgcttgatcaagaaaaagtacaatacagggtgtatatttattttttgtgttataaagtttacttttagttgctcttctagagattattaggtaataaatgtgtatatactgtataatttgcaatatacccaggaactgatttaagatggaattgtgtgtgtgtttgcttgcacatgtgtgtgttaccattctgcttgcatttctaatagtgtttcaattttagcaacatataggagcaagtgttccagaatgtaatatgaataggagaaatagggaagcagtaaaacaaaatttaacacaagcttgtgtctcttttcctctcatgtgtccaaaagctaatctctttattcactaaaaggaaatgtgtataagactaaatcccctttggctttttaaaaacattttgtgatatcagtgacaatgcagttcttctagccattaatcttgtacccctgtaagaaatttcacctttctgagtcctgaaaagtatcttgtcaagcaaagttgacaccgaagggcacattttcagcaggatgtagaaggatttaactgtgcaggcttctgttaatgttgttaaatccaggcacatagcacgaagcatcacccttaagtgttaatccgttgtaaccattcccattttgactcagttctagaaattttgactctaaggcagcaatggaattatgacaaatatatatatatacacatacacacacacaaatatatatatatgcttatttcccttcagaattttatttcaataattgataagttttatttttaatggatgtttattcatttgttaatttcagtttgtattcagttacatggctttgagtttattttattgaaccaatccaaggtattatgtaattaggcttattaaggaatataacatatcttctatgtatgctctatataccacacatgatgaagacttatatttgtgatacaaattatgcagtgtattagaaattgtccaaaactgagctcctgagataaccaacatttttgtattattacactttataaaaattatggaatgtcatgtgattagtcaaaatcagagcatttaaataaaatacagcctactcatgattatcaatgttaatagtacagtagatcagagaagcctggattaatgaaatttatcagaaatatagccacgttatattaatggtattcttttttccaagcacttgttttatttgaatattagcacatataagaataaacttttgggaaataactacttcctattctgcccaccctttacttaagcagtaaagtacctcttttctaaagaaccaggaaacatcaaaataaccacaacaaaaatctaaacagttttcaaataatacattcagttctcataataataagggctatataccatgggtccacacaaactgtgctgcaaacatataatctattagtttagtaaaatttccagagatgtgaatttaatattttcttgataaaatcataaaaaagcatcaccattattaaagatgcatttgttcatttcaataaacagaaattaatgaaacaaattacttttgtacaaaataaatgatgattatgtggcactttattgaattttatagaaatattccaatctaagtgataaagtaacaactgagaaacttcagaatgaaagccttattgattcaaaaggaaaattaccatatgctttagggctgatgaacttgccacaattgcttagacataacaaagatattttctacattgttttccaactttatatgctgaaagataattaggaggtccgggtggagtgtatctaaatgactagaactttaagttgcaatatagattttctctttttaacaaaggaagaatataaattaatttggatcaaatttatttgccttctttgcaatcttggtgatcattttggaaagtaaattgaaaggaaagttaaatagccacatagttttcttttgcatctcaatttggttgagaatttctaaggaaggttaatatgactttagaatgaataaagagactgtcaaacaacaagtactctccctaaaaaagaggaaagaatgccttcctaaaatatttgtttcctattgtatatgtcaccaattggaaaatgccaatctcatctgcaagtgtgagaaatggaacaaggagaggagccaactctagtaaaatgtagtgaggccataatccaaggcaaagtttaacaaatcttgattgtgtaatttcttattctgttgattcattttgtcacccaccagactaccaaaaataaagcacagacatgacaattttagtatatacaacagatttggcaaataatacataatcttattgtaattgccagtagcaatatcttaaggggcatgagtctttcacagtattggactttgaaaaattggtacagggagtaattttcaacagactgatacttgaagtcactcaattactactttgacctatcataatttgtttctaatcttgtcatttgctcatatatactattaatataaccagttgctcttttcataatgtactatttctatgtaaagatgtaaagattttgattttcctatgttttaaaattgtaatgtgcatgatcttttatttcttgtgtttcaattaccaagtcagtattctaaggttgtaagattactgtaaaaattatattccaatattttatctaaacttaagtgtggccagcattattggtttcagagttgcctaaacaacacagaatatccttaattcagtttgtaaaagagttttgaccagtgtaaaaaagtgaagacacagtttcatgtttcaagtttaaaatggaaagttaatatcatttgagcacttatgtgttttcatgtcttctacttaatctgtatgtgaaagtaaaatatttttaacaccattatttatgccatgtaaagtgggttctcagaagcacaagcacagatatttaccttctgaagacatttttggctataaaagtgcattggatggcaaacactatttgagtcaggtgttagaaatttattagatgtattatattacatagtagaataaggtccctttctcattttgtttttcctaaaaataagaaaaaaaagaagtgtgatagtaaactgtctttgctaatgtcctgccagatgtttaacttcaaattaagcaaaaagtaggtacaatatgatgatgatcctgatgatgatgatgatgatgatgatgaagaataaatggaatcaaaatgctagctttatttgacattaataagtaaaataagtcatcattttttcaactctgtagcacagctgtttacattgaataattttctctattgtgctgttaattatatagtaatgtatcaaaatagaaataggaactttcttttcatttcttattcatttatgaagaaatcttttcacacataaatgattgaatgttcttgttcagaatgaccacataatcattgcttagaagaagataccaattcttttaaaagaaaaaaagtctgtttataataatcagaatcaaatgttgtttgtttcttctaaacgttaatggagaaaattgaaggtggtaaaatgtcatgtttattcaggctgggaactgtattcacagtagaagtttcagtggtcaacatatctatgactctttaggctgctgtagttttacagtcaattatttaaaagtgagtagttacatttataagagcctgagaatacttagactcagtcatttgttagtatttttaccaaaatctcttagtttcagacatgtcagaagcagctatatagcatatcttattctatgatatacatcaggctatctcaagttcctgtctcacagttaattcaaagaaggattaggatttctgtattttttctcatttgaatctttatgtgcatttggtttgtgtacatgctttttgtagtgtaagatatgaaattttatattttttcagaaaataaaaaccctttgaatacagttaca

SEQ ID NO: 4657 - protein, 1015 aa, Homo sapiens
MRGSGPRGAGRRRPPSGGGDTPITPASLAGCYSAPRRAPLWTCLLLCAALRTLLASPSNEVNLLDSRTVMGDLGWIAFPKNGWEEIGEVDENYAPIHTYQVCKVMEQNQNNWLLTSWISNEGASRIFIELKFTLRDCNSLPGGLGTCKETFNMYYFESDDQNGRNIKENQYIKIDTIAADESFTELDLGDRVMKLNTEVRDVGPLSKKGFYLAFQDVGACIALVSVRVYYKKCPSVVRHLAVFPDTITGADSSQLLEVSGSCVNHSVTDEPPKMHCSAEGEWLVPIGKCMCKAGYEEKNGTCQVCRPGFFKASPHIQSCGKCPPHSYTHEEASTSCVCEKDYFRRESDPPTMACTRPPSAPRNAISNVNETSVFLEWIPPADTGGRKDVSYYIACKKCNSHAGVCEECGGHVRYLPRQSGLKNTSVMMVDLLAHTNYTFEIEAVNGVSDLSPGARQYVSVNVTTNQAAPSPVTNVKKGKIAKNSISLSWQEPDRPNGIILEYEIKYFEKDQETSYTIIKSKETTITAEGLKPASVYVFQIRARTAAGYGVFSRRFEFETTPVFAASSDQSQIPVIAVSVTVGVILLAVVIGVLLSGRRCGYSKAKQDPEEEKMHFHNGHIKLPGVRTYIDPHTYEDPNQAVHEFAKEIEASCITIERVIGAGEFGEVCSGRLKLPGKRELPVAIKTLKVGYTEKQRRDFLGEASIMGQFDHPNIIHLEGVVTKSKPVMIVTEYMENGSLDTFLKKNDGQFTVIQLVGMLRGISAGMKYLSDMGYVHRDLAARNILINSNLVCKVSDFGLSRVLEDDPEAAYTTRGGKIPIRWTAPEAIAFRKFTSASDVWSYGIVMWEVVSYGERPYWEMTNQDVIKAVEEGYRLPSPMDCPAALYQLMLDCWQKERNSRPKFDEIVNMLDKLIRNPSSLKTLVNASCRVSNLLAEHSPLGSGAYRSVGEWLEAIKMGRYTEIFMENGYSSMDAVAQVTLEDLRRLGVTLVGHQKKIMNSLQEMKVQLVNGMVPL

SEQ ID NO: 4658 - DNA, 8769 bp, Homo sapiens
aagatgccaaacggagggacccgcgtctctaagggccgccggctgagctggggctgatctcccttccgcctcccgggaaccccagtcctcgccagcgtcgtcaggattccttgccctaattatcccgggaggaagacgcgcctttcccggagaccgctaggcaacactcaccaaggcagcctccagattacttccctccgtgggtgtgtgacttcgtcgaagcaactcacacttacagtagattctcactggcgaggctgcgagcagcagagggcgggggagctgggaagaggaggagggaaggagggtgggaggcgctgagctgggaggcagaggagacgccggagctccagacacagcaggagcgcgccttggcggtgcagtttcaacctcgacttcgcagccgcgcacacaccgcctgctccccgagcagcgggaaccgcagcagctcctgggccgccgcagcgcagctccgcgctcctaccggccggcagccgtcagtccctcccctcttcagcactcagcccgcagctatttccttctgccagtctctttgaactctggatctttgcttttgctcgctgctctcctgtttttcattctccacattttctcaagtcctctttctttatccttagccaccctgcttttttcctccttttttaaaaaatcggagatttcgtcttaaaatgatttgccttccttaccttcgtccatttcaacactgaaggctgcaaagaaccttcacctttcccctagtggtatttaaaaattctcaatccgtaaaaagtctttttgaaaggcaaaggaacaggacccaggaccctctcgacacccttgatccgagtccagatctgcactagcaaccagaactaatatttcatttaaccccaccaaagggggaggcgagaggagccagaagcaaacttcagctgtctcagccggatccgtggttcctacatttggaggagccgcgtgccagaaggcgtaggaccccaaggggggacaaggaggactcccgagtctcccttcgccgctctgcgaggccgaagcggtggactgagccgctcgggacagcggcaccggaggaggctcggagaagatgcggggctcggggccccggggtgcgggacgccggcggcccccaagcggcggcggcgacacccccatcaccccagcgtccctggccggctgctactctgcacctcgacgggctcccctctggacgtgccttctcctgtgcgccgcactccggaccctcctggccagccccagcaacgaagtgaatttattggattcacgcactgtcatgggggacctgggatggattgcttttccaaaaaatgggtgggaagagattggtgaagtggatgaaaattatgcccctatccacacataccaagtatgcaaagtgatggaacagaatcagaataactggcttttgaccagttggatctccaatgaaggtgcttccagaatcttcatagaactcaaatttaccctgcgggactgcaacagccttcctggaggactggggacctgtaaggaaacctttaatatgtattactttgagtcagatgatcagaatgggagaaacatcaaggaaaaccaatacatcaaaattgataccattgctgccgatgaaagctttacagaacttgatcttggtgaccgtgttatgaaactgaatacagaggtcagagatgtaggacctctaagcaaaaagggattttatcttgcttttcaagatgttggtgcttgcattgctctggtttctgtgcgtgtatactataaaaaatgcccttctgtggtacgacacttggctgtcttccctgacaccatcactggagctgattcttcccaattgctcgaagtgtcaggctcctgtgtcaaccattctgtgaccgatgaacctcccaaaatgcactgcagcgccgaaggggagtggctggtgcccatcgggaaatgcatgtgcaaggcaggatatgaagagaaaaatggcacctgtcaagtgtgcagacctgggttcttcaaagcctcacctcacatccagagctgcggcaaatgtccacctcacagttatacccatgaggaagcttcaacctcttgtgtctgtgaaaaggattatttcaggagagagtctgatccacccacaatggcatgcacaagacccccctctgctcctcggaatgccatctcaaatgttaatgaaactagtgtctttctggaatggattccgcctgctgacactggtggaaggaaagacgtgtcatattatattgcatgcaagaagtgcaactcccatgcaggtgtgtgtgaggagtgtggcggtcatgtcaggtaccttccccggcaaagcggcctgaaaaacacctctgtcatgatggtggatctactcgctcacacaaactatacctttgagattgaggcagtgaatggagtgtccgacttgagcccaggagcccggcagtatgtgtctgtaaatgtaaccacaaatcaagcagctccatctccagtcaccaatgtgaaaaaagggaaaattgcaaaaaacagcatctctttgtcttggcaagaaccagatcgtcccaatggaatcatcctagagtatgaaatcaagtattttgaaaaggaccaagagaccagctacacgattatcaaatctaaagagacaactattactgcagagggcttgaaaccagcttcagtttatgtcttccaaattcgagcacgtacagcagcaggctatggtgtcttcagtcgaagatttgagtttgaaaccaccccagtgtttgcagcatccagcgatcaaagccagattcctgtaattgctgtgtctgtgacagtgggagtcattttgttggcagtggttatcggcgtcctcctcagtggaagttgctgcgaatgtggctgtgggagggcttcttccctgtgcgctgttgcccatccaagcctaatatggcggtgtggctacagcaaagcaaaacaagatccagaagaggaaaagatgcattttcataatgggcacattaaactgccaggagtaagaacttacattgatccacatacctatgaggatcccaatcaagctgtccacgaatttgctaaggagatagaagcatcatgtatcaccattgagagagttattggagcaggtgaatttggtgaagtttgtagtggacgtttgaaactaccaggaaaaagagaattacctgtggctatcaaaacccttaaagtaggctatactgaaaagcaacgcagagatttcctaggtgaagcaagtatcatgggacagtttgatcatcctaacatcatccatttagaaggtgtggtgaccaaaagtaaaccagtgatgatcgtgacagagtatatggagaatggctctttagatacatttttgaagaaaaacgatgggcagttcactgtgattcagcttgttggcatgctgagaggtatctctgcaggaatgaagtacctttctgacatgggctatgtgcatagagatcttgctgccagaaacatcttaatcaacagtaaccttgtgtgcaaagtgtctgactttggactttcccgggtactggaagatgatcccgaggcagcctacaccacaaggggaggaaaaattccaatcagatggactgccccagaagcaatagctttccgaaagtttacttctgccagtgatgtctggagttatggaatagtaatgtgggaagttgtgtcttatggagagagaccctactgggagatgaccaatcaagatgtgattaaagcggtagaggaaggctatcgtctgccaagccccatggattgtcctgctgctctctatcagttaatgctggattgctggcagaaagagcgaaatagcaggcccaagtttgatgaaatagtcaacatgttggacaagctgatacgtaacccaagtagtctgaagacgctggttaatgcatcctgcagagtatctaatttattggcagaacatagcccactaggatctggggcctacagatcagtaggtgaatggctagaggcaatcaagatgggccggtatacagagattttcatggaaaatggatacagttcaatggacgctgtggctcaggtgaccttggaggatttgagacggcttggagtgactcttgtcggtcaccagaagaagatcatgaacagccttcaagaaatgaaggtgcagctggtaaacggaatggtgccattgtaacttcatgtaaatgtcgcttcttcaagtgaatgattctgcactttgtaaacagcactgagatttattttaacaaaaaaagggggaaaagggaaaacagtgatttctaaaccttagaaaacatttgcctcagccacagaatttgtaatcatggttttactgaagtatccagttcttagtccttagtcttcatttttcatgaagcaaacatatcttgcattaaaagggacatgaagttagacatcatcttaagttacaacaacagaatccttcccactacttctacaaaattttgtacatgaaatatataattatatagcacttttatagactgaattaaggcaacccctttcaaaacttccagggatctacttgaaaggaaatgttttatagccatttgtgagctaacaaaagctacagtttactgaagtttacttcaagtcttaattgtctacaaaagtgtattgaagagcaatatgattagattatttcttaatagatatcttcttttgtaattttaaaatgctgttacacagcgttaagttatagaaactagtgtgtaaacatgttgcttgatcaagaaaaagtacaatacagggtgtatatttattttttgtgttataaagtttacttttagttgctcttctagagattattaggtaataaatgtgtatatactgtataatttgcaatatacccaggaactgatttaagatggaattgtgtgtgtgtttgcttgcacatgtgtgtgttaccattctgcttgcatttctaatagtgtttcaattttagcaacatataggagcaagtgttccagaatgtaatatgaataggagaaatagggaagcagtaaaacaaaatttaacacaagcttgtgtctcttttcctctcatgtgtccaaaagctaatctctttattcactaaaaggaaatgtgtataagactaaatcccctttggctttttaaaaacattttgtgatatcagtgacaatgcagttcttctagccattaatcttgtacccctgtaagaaatttcacctttctgagtcctgaaaagtatcttgtcaagcaaagttgacaccgaagggcacattttcagcaggatgtagaaggatttaactgtgcaggcttctgttaatgttgttaaatccaggcacatagcacgaagcatcacccttaagtgttaatccgttgtaaccattcccattttgactcagttctagaaattttgactctaaggcagcaatggaattatgacaaatatatatatatacacatacacacacacaaatatatatatatgcttatttcccttcagaattttatttcaataattgataagttttatttttaatggatgtttattcatttgttaatttcagtttgtattcagttacatggctttgagtttattttattgaaccaatccaaggtattatgtaattaggcttattaaggaatataacatatcttctatgtatgctctatataccacacatgatgaagacttatatttgtgatacaaattatgcagtgtattagaaattgtccaaaactgagctcctgagataaccaacatttttgtattattacactttataaaaattatggaatgtcatgtgattagtcaaaatcagagcatttaaataaaatacagcctactcatgattatcaatgttaatagtacagtagatcagagaagcctggattaatgaaatttatcagaaatatagccacgttatattaatggtattcttttttccaagcacttgttttatttgaatattagcacatataagaataaacttttgggaaataactacttcctattctgcccaccctttacttaagcagtaaagtacctcttttctaaagaaccaggaaacatcaaaataaccacaacaaaaatctaaacagttttcaaataatacattcagttctcataataataagggctatataccatgggtccacacaaactgtgctgcaaacatataatctattagtttagtaaaatttccagagatgtgaatttaatattttcttgataaaatcataaaaaagcatcaccattattaaagatgcatttgttcatttcaataaacagaaattaatgaaacaaattacttttgtacaaaataaatgatgattatgtggcactttattgaattttatagaaatattccaatctaagtgataaagtaacaactgagaaacttcagaatgaaagccttattgattcaaaaggaaaattaccatatgctttagggctgatgaacttgccacaattgcttagacataacaaagatattttctacattgttttccaactttatatgctgaaagataattaggaggtccgggtggagtgtatctaaatgactagaactttaagttgcaatatagattttctctttttaacaaaggaagaatataaattaatttggatcaaatttatttgccttctttgcaatcttggtgatcattttggaaagtaaattgaaaggaaagttaaatagccacatagttttcttttgcatctcaatttggttgagaatttctaaggaaggttaatatgactttagaatgaataaagagactgtcaaacaacaagtactctccctaaaaaagaggaaagaatgccttcctaaaatatttgtttcctattgtatatgtcaccaattggaaaatgccaatctcatctgcaagtgtgagaaatggaacaaggagaggagccaactctagtaaaatgtagtgaggccataatccaaggcaaagtttaacaaatcttgattgtgtaatttcttattctgttgattcattttgtcacccaccagactaccaaaaataaagcacagacatgacaattttagtatatacaacagatttggcaaataatacataatcttattgtaattgccagtagcaatatcttaaggggcatgagtctttcacagtattggactttgaaaaattggtacagggagtaattttcaacagactgatacttgaagtcactcaattactactttgacctatcataatttgtttctaatcttgtcatttgctcatatatactattaatataaccagttgctcttttcataatgtactatttctatgtaaagatgtaaagattttgattttcctatgttttaaaattgtaatgtgcatgatcttttatttcttgtgtttcaattaccaagtcagtattctaaggttgtaagattactgtaaaaattatattccaatattttatctaaacttaagtgtggccagcattattggtttcagagttgcctaaacaacacagaatatccttaattcagtttgtaaaagagttttgaccagtgtaaaaaagtgaagacacagtttcatgtttcaagtttaaaatggaaagttaatatcatttgagcacttatgtgttttcatgtcttctacttaatctgtatgtgaaagtaaaatatttttaacaccattatttatgccatgtaaagtgggttctcagaagcacaagcacagatatttaccttctgaagacatttttggctataaaagtgcattggatggcaaacactatttgagtcaggtgttagaaatttattagatgtattatattacatagtagaataaggtccctttctcattttgtttttcctaaaaataagaaaaaaaagaagtgtgatagtaaactgtctttgctaatgtcctgccagatgtttaacttcaaattaagcaaaaagtaggtacaatatgatgatgatcctgatgatgatgatgatgatgatgatgaagaataaatggaatcaaaatgctagctttatttgacattaataagtaaaataagtcatcattttttcaactctgtagcacagctgtttacattgaataattttctctattgtgctgttaattatatagtaatgtatcaaaatagaaataggaactttcttttcatttcttattcatttatgaagaaatcttttcacacataaatgattgaatgttcttgttcagaatgaccacataatcattgcttagaagaagataccaattcttttaaaagaaaaaaagtctgtttataataatcagaatcaaatgttgtttgtttcttctaaacgttaatggagaaaattgaaggtggtaaaatgtcatgtttattcaggctgggaactgtattcacagtagaagtttcagtggtcaacatatctatgactctttaggctgctgtagttttacagtcaattatttaaaagtgagtagttacatttataagagcctgagaatacttagactcagtcatttgttagtatttttaccaaaatctcttagtttcagacatgtcagaagcagctatatagcatatcttattctatgatatacatcaggctatctcaagttcctgtctcacagttaattcaaagaaggattaggatttctgtattttttctcatttgaatctttatgtgcatttggtttgtgtacatgctttttgtagtgtaagatatgaaattttatattttttcagaaaataaaaaccctttgaatacagttaca

SEQ ID NO: 4659 - protein, 1037 aa, Homo sapiens
MRGSGPRGAGRRRPPSGGGDTPITPASLAGCYSAPRRAPLWTCLLLCAALRTLLASPSNEVNLLDSRTVMGDLGWIAFPKNGWEEIGEVDENYAPIHTYQVCKVMEQNQNNWLLTSWISNEGASRIFIELKFTLRDCNSLPGGLGTCKETFNMYYFESDDQNGRNIKENQYIKIDTIAADESFTELDLGDRVMKLNTEVRDVGPLSKKGFYLAFQDVGACIALVSVRVYYKKCPSVVRHLAVFPDTITGADSSQLLEVSGSCVNHSVTDEPPKMHCSAEGEWLVPIGKCMCKAGYEEKNGTCQVCRPGFFKASPHIQSCGKCPPHSYTHEEASTSCVCEKDYFRRESDPPTMACTRPPSAPRNAISNVNETSVFLEWIPPADTGGRKDVSYYIACKKCNSHAGVCEECGGHVRYLPRQSGLKNTSVMMVDLLAHTNYTFEIEAVNGVSDLSPGARQYVSVNVTTNQAAPSPVTNVKKGKIAKNSISLSWQEPDRPNGIILEYEIKYFEKDQETSYTIIKSKETTITAEGLKPASVYVFQIRARTAAGYGVFSRRFEFETTPVFAASSDQSQIPVIAVSVTVGVILLAVVIGVLLSGSCCECGCGRASSLCAVAHPSLIWRCGYSKAKQDPEEEKMHFHNGHIKLPGVRTYIDPHTYEDPNQAVHEFAKEIEASCITIERVIGAGEFGEVCSGRLKLPGKRELPVAIKTLKVGYTEKQRRDFLGEASIMGQFDHPNIIHLEGVVTKSKPVMIVTEYMENGSLDTFLKKNDGQFTVIQLVGMLRGISAGMKYLSDMGYVHRDLAARNILINSNLVCKVSDFGLSRVLEDDPEAAYTTRGGKIPIRWTAPEAIAFRKFTSASDVWSYGIVMWEVVSYGERPYWEMTNQDVIKAVEEGYRLPSPMDCPAALYQLMLDCWQKERNSRPKFDEIVNMLDKLIRNPSSLKTLVNASCRVSNLLAEHSPLGSGAYRSVGEWLEAIKMGRYTEIFMENGYSSMDAVAQVTLEDLRRLGVTLVGHQKKIMNSLQEMKVQLVNGMVPL

SEQ ID NO: 4660 - DNA, 5858 bp, Homo sapiens
aagatgccaaacggagggacccgcgtctctaagggccgccggctgagctggggctgatctcccttccgcctcccgggaaccccagtcctcgccagcgtcgtcaggattccttgccctaattatcccgggaggaagacgcgcctttcccggagaccgctaggcaacactcaccaaggcagcctccagattacttccctccgtgggtgtgtgacttcgtcgaagcaactcacacttacagtagattctcactggcgaggctgcgagcagcagagggcgggggagctgggaagaggaggagggaaggagggtgggaggcgctgagctgggaggcagaggagacgccggagctccagacacagcaggagcgcgccttggcggtgcagtttcaacctcgacttcgcagccgcgcacacaccgcctgctccccgagcagcgggaaccgcagcagctcctgggccgccgcagcgcagctccgcgctcctaccggccggcagccgtcagtccctcccctcttcagcactcagcccgcagctatttccttctgccagtctctttgaactctggatctttgcttttgctcgctgctctcctgtttttcattctccacattttctcaagtcctctttctttatccttagccaccctgcttttttcctccttttttaaaaaatcggagatttcgtcttaaaatgatttgccttccttaccttcgtccatttcaacactgaaggctgcaaagaaccttcacctttcccctagtggtatttaaaaattctcaatccgtaaaaagtctttttgaaaggcaaaggaacaggacccaggaccctctcgacacccttgatccgagtccagatctgcactagcaaccagaactaatatttcatttaaccccaccaaagggggaggcgagaggagccagaagcaaacttcagctgtctcagccggatccgtggttcctacatttggaggagccgcgtgccagaaggcgtaggaccccaaggggggacaaggaggactcccgagtctcccttcgccgctctgcgaggccgaagcggtggactgagccgctcgggacagcggcaccggaggaggctcggagaagatgcggggctcggggccccggggtgcgggacgccggcggcccccaagcggcggcggcgacacccccatcaccccagcgtccctggccggctgctactctgcacctcgacgggctcccctctggacgtgccttctcctgtgcgccgcactccggaccctcctggccagccccagcaacgaagtgaatttattggattcacgcactgtcatgggggacctgggatggattgcttttccaaaaaatgggtgggaagagattggtgaagtggatgaaaattatgcccctatccacacataccaagtatgcaaagtgatggaacagaatcagaataactggcttttgaccagttggatctccaatgaaggtgcttccagaatcttcatagaactcaaatttaccctgcgggactgcaacagccttcctggaggactggggacctgtaaggaaacctttaatatgtattactttgagtcagatgatcagaatgggagaaacatcaaggaaaaccaatacatcaaaattgataccattgctgccgatgaaagctttacagaacttgatcttggtgaccgtgttatgaaactgaatacagaggtcagagatgtaggacctctaagcaaaaagggattttatcttgcttttcaagatgttggtgcttgcattgctctggtttctgtgcgtgtatactataaaaaatgcccttctgtggtacgacacttggctgtcttccctgacaccatcactggagctgattcttcccaattgctcgaagtgtcaggctcctgtgtcaaccattctgtgaccgatgaacctcccaaaatgcactgcagcgccgaaggggagtggctggtgcccatcgggaaatgcatgtgcaaggcaggatatgaagagaaaaatggcacctgtcaagtgtgcagacctgggttcttcaaagcctcacctcacatccagagctgcggcaaatgtccacctcacagttatacccatgaggaagcttcaacctcttgtgtctgtgaaaaggattatttcaggagagagtctgatccacccacaatggcatgcacaagacccccctctgctcctcggaatgccatctcaaatgttaatgaaactagtgtctttctggaatggattccgcctgctgacactggtggaaggaaagacgtgtcatattatattgcatgcaagaagtgcaactcccatgcaggtgtgtgtgaggagtgtggcggtcatgtcaggtaccttccccggcaaagcggcctgaaaaacacctctgtcatgatggtggatctactcgctcacacaaactatacctttgagattgaggcagtgaatggagtgtccgacttgagcccaggagcccggcagtatgtgtctgtaaatgtaaccacaaatcaagcagctccatctccagtcaccaatgtgaaaaaagggaaaattgcaaaaaacagcatctctttgtcttggcaagaaccagatcgtcccaatggaatcatcctagagtatgaaatcaagtattttgaaaaggaccaagagaccagctacacgattatcaaatctaaagagacaactattactgcagagggcttgaaaccagcttcagtttatgtcttccaaattcgagcacgtacagcagcaggctatggtgtcttcagtcgaagatttgagtttgaaaccaccccagtgtttgcagcatccagcgatcaaagccagattcctgtaattgctgtgtctgtgacagtgggagtcattttgttggcagtggttatcggcgtcctcctcagtggaagttgctgcgaatgtggctgtgggagggcttcttccctgtgcgctgttgcccatccaagcctaatatggcggtgtggctacagcaaagcaaaacaagatccagaagaggaaaagatgcattttcataatgggcacattaaactgccaggagtaagaacttacattgatccacatacctatgaggatcccaatcaagctgtccacgaatttgctaaggagatagaagcatcatgtatcaccattgagagagttattggagcaggtgaatttggtgaagtttgtagtggacgtttgaaactaccaggaaaaagagaattacctgtggctatcaaaacccttaaagtaggctatactgaaaagcaacgcagagatttcctaggtgaagcaagtatcatgggacagtttgatcatcctaacatcatccatttagaaggtgtggtgaccaaaagtaaaccagtgatgatcgtgacagagtatatggagaatggctctttagatacatttttgaagaaaaacgatgggcagttcactgtgattcagcttgttggcatgctgagaggtatctctgcaggaatgaagtacctttctgacatgggctatgtgcatagagatcttgctgccagaaacatcttaatcaacagtaaccttgtgtgcaaagtgtctgactttggactttcccgggtactggaagatgatcccgaggcagcctacaccacaaggggaggaaaaattccaatcagatggactgccccagaagcaatagctttccgaaagtttacttctgccagtgatgtctggagttatggaatagtaatgtgggaagttgtgtcttatggagagagaccctactgggagatgaccaatcaagatgtgattaaagcggtagaggaaggctatcgtctgccaagccccatggattgtcctgctgctctctatcagttaatgctggattgctggcagaaagagcgaaatagcaggcccaagtttgatgaaatagtcaacatgttggacaagctgatacgtaacccaagtagtctgaagacgctggttaatgcatcctgcagagtatctaatttattggcagaacatagcccactaggatctggggcctacagatcagtaggtgaatggctagaggcaatcaagatgggccggtatacagagattttcatggaaaatggatacagttcaatggacgctgtggctcaggtgaccttggagtgagtaatttttctgataatttttacataattgctggggcaagaaaaattgttcaaaaaccaatctggatgaggtaagggaaatcagttaacctttgcggatgtgtggcagctctcaaagaagcctcatcatctttagcctgtattgttaacaactgcatggttaatgctacatgtggccagtatctttgcttctttgcttcaaacaaataacattggcatacttgaataattggaataacagctccttggcaaaatactggtgttttgtgttgtggaaaagatgttttcttgacaagtttttttatactggtatctatgttatatgaatgtaaatacaaaacaaaataaactgtaagcacaattggtgtggctagtcctacataaggaccaaacatatttgtacattttggctctctacgatgaatatcaaggtaacagtagcttaaacaaagcttccctggcaggatctcatttaatttctaaatggtgcaccttacattctttcaatctaaggatgtatcagatcccgcctctgatttgttatttggtacaatctcagtggaaccaattgtgcccttttctgtttgcacgtttaagataaaatttatcaaaccttattaaataaaaatcactagagttaaatattaagttctttaaggttgtaagttgtttgtattttattatatactctgtacatgtggttgttttagcctaattgttatttgtgaaaattaactgtctttatggtggttccatctagattacattaacattaatgttttaacctgtgaatataatgataacttacttcaaattacctgccaattcaaaggttaaaatattgtaaggtttagaaaatggtagaatattctgaagcactaaaccatagttgttattttatttgtacacatgatatgaacattgagcagttcttgctcacccatctctattattctgacattctttgattcattgaattcattgttcctccccacagaaggtaacagggtaccaccatttatcaccaattaatgtcacattctcagcattctcttccttcataccgataactaaaaggacctgaaaccaaccactcagcttgctttctaaatttactgaatctcattctcacggtccaccagatcatatctacttgataacacatatgctttgtccattatttctttggacactcaaggaacccatttgtgctatatttaaactggtatactgaaaaatttactgataatttaaaactatttttacatgattgctatttaatttttcagtaaaaatggtcattttaatttattaaagtcatttgtcattttatattaaaatgatattgtaggtatttcttctacccaatgtcagattacttgtaaatatataataaaattatttgcattaaacaatgtctcttttgttattaaaatagcacattttctgtatatagttacatctactacatttttgcttcttccttcaaaaaatagttataattacaaattatagtttttgcattagctacttgtgttttacttatatctttggggtcccaaaatactataaatatgttgaatattttagcattatagtttcacatttttcttattccttttttttctatttctttcctatctgctcctctatccccaaatgctctttagtttttgttttctttcaagccctaataacctcttatgtcttctcataatgattcttctccagcttatggcctcttg

SEQ ID NO: 4661 - protein, 1003 aa, Homo sapiens
MRGSGPRGAGRRRPPSGGGDTPITPASLAGCYSAPRRAPLWTCLLLCAALRTLLASPSNEVNLLDSRTVMGDLGWIAFPKNGWEEIGEVDENYAPIHTYQVCKVMEQNQNNWLLTSWISNEGASRIFIELKFTLRDCNSLPGGLGTCKETFNMYYFESDDQNGRNIKENQYIKIDTIAADESFTELDLGDRVMKLNTEVRDVGPLSKKGFYLAFQDVGACIALVSVRVYYKKCPSVVRHLAVFPDTITGADSSQLLEVSGSCVNHSVTDEPPKMHCSAEGEWLVPIGKCMCKAGYEEKNGTCQVCRPGFFKASPHIQSCGKCPPHSYTHEEASTSCVCEKDYFRRESDPPTMACTRPPSAPRNAISNVNETSVFLEWIPPADTGGRKDVSYYIACKKCNSHAGVCEECGGHVRYLPRQSGLKNTSVMMVDLLAHTNYTFEIEAVNGVSDLSPGARQYVSVNVTTNQAAPSPVTNVKKGKIAKNSISLSWQEPDRPNGIILEYEIKYFEKDQETSYTIIKSKETTITAEGLKPASVYVFQIRARTAAGYGVFSRRFEFETTPVFAASSDQSQIPVIAVSVTVGVILLAVVIGVLLSGSCCECGCGRASSLCAVAHPSLIWRCGYSKAKQDPEEEKMHFHNGHIKLPGVRTYIDPHTYEDPNQAVHEFAKEIEASCITIERVIGAGEFGEVCSGRLKLPGKRELPVAIKTLKVGYTEKQRRDFLGEASIMGQFDHPNIIHLEGVVTKSKPVMIVTEYMENGSLDTFLKKNDGQFTVIQLVGMLRGISAGMKYLSDMGYVHRDLAARNILINSNLVCKVSDFGLSRVLEDDPEAAYTTRGGKIPIRWTAPEAIAFRKFTSASDVWSYGIVMWEVVSYGERPYWEMTNQDVIKAVEEGYRLPSPMDCPAALYQLMLDCWQKERNSRPKFDEIVNMLDKLIRNPSSLKTLVNASCRVSNLLAEHSPLGSGAYRSVGEWLEAIKMGRYTEIFMENGYSSMDAVAQVTLE

SEQ ID NO: 4662 - DNA, 752 bp, Homo sapiens
ggccattatgtgaaacaacctgcagataaacatttttatttttgtaaaagaaagtttgtccgtagttctggtttatctttcagtggaaatggacagccagtgcaaataaatagcttgtgcttgctgttgaacagagtccacatgctacaaatagtctcctggtaaatcacactagatggagacatgagagaaaatgctgaatcacaagacacagaagaatgaagcagcaaagtgaaagaaaaataaaataacattccctaaaggaaggaagatgtatttgtcagaaggacctgacttgaattcgtcattgctcagctggtcatttagtttccttgtctttaaacaaacaaaaaatctgcagtgcactatgtgaaacaaagaagtaaaatacaagggaggtctagggtacggagatatatctaattgccaaataacttaaataagtatttctacaagcatcaaaacttttgtcacttgttaatatttaaatattagaaaatttaaatataaatcagcaaaaatagttctgggagcaccaattcagcaaaaatgtttagggtaatcaaaaattgattatgttaaatgttatggatgcacatttaatatacaatgcccccacacttcattcccttcctattccaagcaatatccctgaatgtagaactaatacttttaatttattccaaaagtcatcgtgccttgccccttggcctattaatgcatcatctagaagtcaccccgtatgggaaagc

SEQ ID NO: 4663 - protein, 58 aa, Homo sapiens
MLNVMDAHLIYNAPTLHSLPIPSNIPECRTNTFNLFQKSSCLAPWPINASSRSHPVWE

SEQ ID NO: 4664 - DNA, 1885 bp, Homo sapiens
cgggtggccatgttgctctaataaagcgggaggggcggcggcgtggggggagcagatgccgctggctgccagcgggacgccggcgagcagagcgcagccgcgagggaggcgcgagggaggcgagccggagcccgagcactagcagcagccggagtcggcgtaaagcacccgggcgcagccggagccggtgccgcagctgcgatggccgtggccgtggggagaccgtctaatgaagagcttcgaaacttgtctttgtctggccatgtgggatttgacagcctccctgaccagctggtcaacaagtctacttctcaaggattctgtttcaacatcctttgtgttggtgagacaggcattggcaaatccacgttaatggacactttgttcaacaccaaatttgaaagtgacccagctactcacaatgaaccaggtgttcggttaaaagccagaagttatgagcttcaggaaagcaatgtacggctgaagttaaccattgttgacaccgtgggatttggagaccagataaataaagatgacagctataagccgatagtagaatatattgatgcccagttcgaggcctacctgcaagaggaattgaagattaaacgttctctcttcaactaccatgacacgaggatccatgcctgcctctactttattgcccctactggacattcactaaagtccctggatctggtcaccatgaaaaagctggacagtaaggtgaacatcattccaataattgcaaaagctgacaccattgccaagaatgaactgcacaaattcaagagtaagatcatgagtgaactggtcagcaatggggtccagatatatcagtttcccactgatgaagaaacggtggcagagattaacgcaacaatgagtgtccatctcccatttgcagtggttggcagcaccgaagaggtgaagattggcaacaagatggcaaaggccaggcagtacccctggggtgtggtgcaggttgagaatgaaaatcattgcgattttgtgaaacttcgagagatgctgatccgcgtgaacatggaggacttgcgagagcagactcacacccgccactatgaattgtaccgacgctgtaagcttgaagagatggggttcaaggacactgaccctgacagcaaacccttcagtcttcaggagacatatgaagcaaaaaggaatgaattcctgggagaactgcagaagaaagaagaagaaatgagacaaatgtttgttatgagagtgaaggagaaagaagctgaacttaaggaggcagagaaagagcttcacgagaagtttgaccttctaaagcggacacaccaagaagaaaagaagaaagtggaagacaagaagaaggagcttgaggaggaggtgaacaacttccagaagaagaaagcagcggctcagttactacagtcccaggcccagcaatctggggcccagcaaaccaagaaagacaaggataagaaaaatgcaagcttcacataaagcctggcaagccaaggatgttcccgcattcacctgcttttgcagtaatatcgtatctctgccatgtgtgttctttagttttattttattttattttatttttttacccttcctcaaacaccagtaactattattaactcgttttgctgaatgttgttgggtggtagaaaatgatagaacaagggaataaccgcgaatgctctgtgcagctggactctgtttccggaaagtaaatgatttgctttttatgcctgttctgaatggcagcacgaagcaggcctgttacttgtatgtcgctttggacagaggaaagtggggtaaaatgctacctgtacgtctgacatgaaaacttctcaccgcctcagcagctgaactaaaaacctgaatagccatg

SEQ ID NO: 4665 - protein, 429 aa, Homo sapiens; identical to SEQ ID NO: 533

SEQ ID NO: 4666 - DNA, 2618 bp, Homo sapiens
cgggtggccatgttgctctaataaagcgggaggggcggcggcgtggggggagcagatgccgctggctgccagcgggacgccggcgagcagagcgcagccgcgagggaggcgcgagggaggcgagccggagcccgagcactagcagcagccggagtcggcgtaaagcacccgggcgcagccggagccggtgccgcagctgcgatggccgtggccgtggggagaccgtctaatgaagagcttcgaaacttgtctttgtctggccatgtgggatttgacagcctccctgaccagctggtcaacaagtctacttctcaaggattctgtttcaacatcctttgtgttggtgagacaggcattggcaaatccacgttaatggacactttgttcaacaccaaatttgaaagtgacccagctactcacaatgaaccaggtgttcggttaaaagccagaagttatgagcttcaggaaagcaatgtacggctgaagttaaccattgttgacaccgtgggatttggagaccagataaataaagatgacagctataagccgatagtagaatatattgatgcccagttcgaggcctacctgcaagaggaattgaagattaaacgttctctcttcaactaccatgacacgaggatccatgcctgcctctactttattgcccctactggacattcactaaagtccctggatctggtcaccatgaaaaagctggacagtaaggtgaacatcattccaataattgcaaaagctgacaccattgccaagaatgaactgcacaaattcaagagtaagatcatgagtgaactggtcagcaatggggtccagatatatcagtttcccactgatgaagaaacggtggcagagattaacgcaacaatgagtgtccatctcccatttgcagtggttggcagcaccgaagaggtgaagattggcaacaagatggcaaaggccaggcagtacccctggggtgtggtgcaggttgagaatgaaaatcattgcgattttgtgaaacttcgagagatgctgatccgcgtgaacatggaggacttgcgagagcagactcacacccgccactatgaattgtaccgacgctgtaagcttgaagagatggggttcaaggacactgaccctgacagcaaacccttcagtcttcaggagacatatgaagcaaaaaggaatgaattcctgggagaactgcagaagaaagaagaagaaatgagacaaatgtttgttatgagagtgaaggagaaagaagctgaacttaaggaggcagagaaagagcttcacgagaagtttgaccttctaaagcggacacaccaagaagaaaagaagaaagtggaagacaagaagaaggagcttgaggaggaggtgaacaacttccagaagaagaaagcagcggctcagttactacagtcccaggcccagcaatctggggcccagcaaaccaagaaagacaaggataagaaaaatgcaagcttcacataaagcctggcaagccaaggatgttcccgcattcacctgcttttgcagtaatatcgtatctctgccatgtgtgttctttagttttattttattttattttatttttttacccttcctcaaacaccagtaactattattaactcgttttgctgaatgttgttgggtggtagaaaatgatagaacaagggaataaccgcgaatgctctgtgcagctggactctgtttccggaaagtaaatgatttgctttttatgcctgttctgaatggcagcacgaagcaggcctgttacttgtatgtcgctttggacagaggaaagtggggtaaaatgctacctgtacgtctgacatgaaaacttctcaccgcctcagcagctgaactaaaaacctgaatagccatgacaagagtttgcattttcttgatgattcatctccatgagtgcacaatccctgaactcactgtcttttctccacacttgtcctaagccaaggtagatttgtacgtagacagactggtgagcaagcattatattttatttttacccttgcatgacattttcattttaatcaataacattatttggcctgagcttgtgggtctgttcagactgtctcctctcatggtttgaaactgcatctgaatgcctgccttcaatcctggccaagttggagtagactggtatgagaaaactatgattagttcacatttactggtgcatccttgatcctctcacagatagaggtcttaaaggttggatcatgtaacattgcttagtagaagaatcttcttctaaggatgatgggctttctacagcctgcttaccactaacagtaaggaatctttcataaacacacctcagtttgttcccagtgggcttagagggaggacctgatgactgattccaggatacttgtacttctaataacatttttcatgaatcatgagaaaatttccacagatacttcccttagaaaatttgctataaactctgtatcattggtagcacaaatttgagcgaggccttgtcaattttaaggtggaaataggaaggaccacaacatgacccgtaagtcaagaaggtagacatttcatatccagcttccttgcttagtctcctttcagtatttggcaat

SEQ ID NO: 4667 - protein, 429 aa, Homo sapiens; identical to SEQ ID NO: 533

SEQ ID NO: 4668 - DNA, 5593 bp, Homo sapiens
cgggtggccatgttgctctaataaagcgggaggggcggcggcgtggggggagcagatgccgctggctgccagcgggacgccggcgagcagagcgcagccgcgagggaggcgcgagggaggcgagccggagcccgagcactagcagcagccggagtcggcgtaaagcacccgggcgcagccggagccggtgccgcagctgcgatggccgtggccgtggggagaccgtctaatgaagagcttcgaaacttgtctttgtctggccatgtgggatttgacagcctccctgaccagctggtcaacaagtctacttctcaaggattctgtttcaacatcctttgtgttggtgagacaggcattggcaaatccacgttaatggacactttgttcaacaccaaatttgaaagtgacccagctactcacaatgaaccaggtgttcggttaaaagccagaagttatgagcttcaggaaagcaatgtacggctgaagttaaccattgttgacaccgtgggatttggagaccagataaataaagatgacagctataagccgatagtagaatatattgatgcccagttcgaggcctacctgcaagaggaattgaagattaaacgttctctcttcaactaccatgacacgaggatccatgcctgcctctactttattgcccctactggacattcactaaagtccctggatctggtcaccatgaaaaagctggacagtaaggtgaacatcattccaataattgcaaaagctgacaccattgccaagaatgaactgcacaaattcaagagtaagatcatgagtgaactggtcagcaatggggtccagatatatcagtttcccactgatgaagaaacggtggcagagattaacgcaacaatgagtgtccatctcccatttgcagtggttggcagcaccgaagaggtgaagattggcaacaagatggcaaaggccaggcagtacccctggggtgtggtgcaggttgagaatgaaaatcattgcgattttgtgaaacttcgagagatgctgatccgcgtgaacatggaggacttgcgagagcagactcacacccgccactatgaattgtaccgacgctgtaagcttgaagagatggggttcaaggacactgaccctgacagcaaacccttcagtcttcaggagacatatgaagcaaaaaggaatgaattcctgggagaactgcagaagaaagaagaagaaatgagacaaatgtttgttatgagagtgaaggagaaagaagctgaacttaaggaggcagagaaagagcttcacgagaagtttgaccttctaaagcggacacaccaagaagaaaagaagaaagtggaagacaagaagaaggagcttgaggaggaggtgaacaacttccagaagaagaaagcagcggctcagttactacagtcccaggcccagcaatctggggcccagcaaaccaagaaagacaaggataagaaaaatgcaagcttcacataaagcctggcaagccaaggatgttcccgcattcacctgcttttgcagtaatatcgtatctctgccatgtgtgttctttagttttattttattttattttatttttttacccttcctcaaacaccagtaactattattaactcgttttgctgaatgttgttgggtggtagaaaatgatagaacaagggaataaccgcgaatgctctgtgcagctggactctgtttccggaaagtaaatgatttgctttttatgcctgttctgaatggcagcacgaagcaggcctgttacttgtatgtcgctttggacagaggaaagtggggtaaaatgctacctgtacgtctgacatgaaaacttctcaccgcctcagcagctgaactaaaaacctgaatagccatgacaagagtttgcattttcttgatgattcatctccatgagtgcacaatccctgaactcactgtcttttctccacacttgtcctaagccaaggtagatttgtacgtagacagactggtgagcaagcattatattttatttttacccttgcatgacattttcattttaatcaataacattatttggcctgagcttgtgggtctgttcagactgtctcctctcatggtttgaaactgcatctgaatgcctgccttcaatcctggccaagttggagtagactggtatgagaaaactatgattagttcacatttactggtgcatccttgatcctctcacagatagaggtcttaaaggttggatcatgtaacattgcttagtagaagaatcttcttctaaggatgatgggctttctacagcctgcttaccactaacagtaaggaatctttcataaacacacctcagtttgttcccagtgggcttagagggaggacctgatgactgattccaggatacttgtacttctaataacatttttcatgaatcatgagaaaatttccacagatacttcccttagaaaatttgctataaactctgtatcattggtagcacaaatttgagcgaggccttgtcaattttaaggtggaaataggaaggaccacaacatgacccgtaagtcaagaaggtagacatttcatatccagcttccttgcttagtctcctttcagtatttggcaataaaagaaagaagaaatagaacagctgaagtctcaaatcattgtctggaattttcctcaccttggctagctccacctgctctttgtctaaggcccttgcctcatcagggattagaactggcccatatgccagaacctgtactaaatgcctaatttgtatggaagagtgcatatttaatctcttttctatactgctcctttctgatgcttatcctttcatctgtgtgattgttttttcccctctactaacaagatcctcccagctttctctctacatgtagaaaggataacatttctcatgaacccactgcccctctgcattttcctcactggttagagattaagtaaataggatagaatatgctgcgtctcccctgacacacactttcttttttgaatgagcaagtctccattttgatttcagcaaagattttttctccttttctttgtcctcaaccatacttagaggaaagaaggaatggtcttccatgaactgattatgcttaattaagcaaagtaaggaaattagtttcatggaagcctaaacaaagctggaatagaaactacacactagacacagcagtagtcatagtcttcacaggtttaggagctactggaccaacattcttgtttttgcttttgtttttttaaataattctagtctggagctaactgtggagcagccaaatagtagctggcatgttgattcaaaccatgggctgaatttgctcataggctgtgcatcagacaaaagcttgaatatttgtgttgtatgcttgttccaaccaccgcttgtgtgagcatttttgtggcttgtacagaaagtacacttttaaattgtctcttgcatcactaaaatttttttaaaatgagcataacaacgaaaggcatccagctgactttttgattccaagattattgattggattgacttttttgcattaaatttttcccagcaaaataaatcatatggcgagtcagggaataaaaagtcaaaagaaacaaatagaagcttttttttttaaaaaatgtattgcttctgaacttttttctgccactgctccctagccctgtttagtttgttattgctgcttttcttttttctttctgtatctatgcctttttttcacagtagtccttggctctgcacggaataaatgataccctcaaatctaattggatgtgctttcgcctttgcatgtaagtacggtagtaagaaacctttgagatctttctgacttttcaaaattagagaaagcaaatgggatggatagattttttttttcttttcaaggggggcaggaaggtaatggtttgagtagcctttgtttaaaaaaaagactaaatatatttaaaaggccacatttatatttttttcacaagaaccacataataaattccacttcttgacctgaatttggaaatccgaaattactaatccaggccaggtgtggtggctcatgcctgtaatcccagcactttgagaggccgaggtgggcagatcacttgaggcctggagttcaagaccaccttggcgaacacggtgaaaccccgtctctacaaaaaatacaaaaattagccaggcgtggtggcacgtgcctgtagtcccagctacttgggaggctaagtcaggagaattgcttgaacttgggagatggaggttgcagtgagccaagattgcaccactgcattccaacctgggtgatgaagtgagactctccaaaaaaaaaaaagaaattattaatccctgcctgtgctctacatagcctcatgggcatcattggatagctcagagggcccttgattctggcaaggcaaataaagccagaatgagaaattaccatcttctactagagaaaaccaagagaaaaatttttatgctaggatgcctttatgaccacttaattttttaatcttagtttaatggtctctccctggtgctaactgctgacagtggccacctcttttttggggattgaggggcctacataactagctggccttaccccatatcttttgttcaaacataataccatctttttgcttcttctgaactttagatctccataacacatgtactgtagaatgtgatggaaaagcattgatgagaatttattggcagttcagattgtgttttcccaacttaggctctttattaattggttaaggttttctccaaaaagggcatttcaacaatgggaattatttaatgtaacagtgggcacagattacttatcttccttctctgctttgtgactcaccagcagtaacacacacaatccacatcttgtgcacctcaaatgaacagacttggtttccttgctttcttgacatttccatgactgtttcacatacaaactattgggtgaggtttttcagctgttaccgacccacgtcctgctgtctctgtgtggtcctacaaaaactgtccattcccacccctttgctttgccatttgcaagagtctggaattgtcaggtctcagcttcgaaaagtcctggttccactgacaggacacattctttagtgggaattaagacctacaaagtctagtttgtatgtaggtatgaagggaattttttaaataaattgaaaagctgtgaacagcattagaactttgtctatttcttaattttaaaatatgctgatatgccttaaactgtagttgtagatccttgtcattttgctgtttgaaaataaccaatgtgttttctaaaactgtcgtgtaatctactttcattgttaatgcagaattgtcatatatgtaagctgcatgttagacatttgtcttttttaaactaaagtaattgtattgatgtgaagcatatcattttttcaaatatgaaagtgatcacttagcaacatgcttggtaatttggcatctgttaaggtaggagagtggtgaacagataatctatgcatatatcactagtgccaagacataaagcgggggaaaatatatttttacccaaacatt

SEQ ID NO: 4669 - protein, 429 aa, Homo sapiens; identical to SEQ ID NO: 533

SEQ ID NO: 4670 - DNA, 6627 bp, Homo sapiens
cgggtggccatgttgctctaataaagcgggaggggcggcggcgtggggggagcagatgccgctggctgccagcgggacgccggcgagcagagcgcagccgcgagggaggcgcgagggaggcgagccggagcccgagcactagcagcagccggagtcggcgtaaagcacccgggcgcagccggagccggtgccgcagctgcgatggccgtggccgtggggagaccgtctaatgaagagcttcgaaacttgtctttgtctggccatgtgggatttgacagcctccctgaccagctggtcaacaagtctacttctcaaggattctgtttcaacatcctttgtgttggtgagacaggcattggcaaatccacgttaatggacactttgttcaacaccaaatttgaaagtgacccagctactcacaatgaaccaggtgttcggttaaaagccagaagttatgagcttcaggaaagcaatgtacggctgaagttaaccattgttgacaccgtgggatttggagaccagataaataaagatgacagctataagccgatagtagaatatattgatgcccagttcgaggcctacctgcaagaggaattgaagattaaacgttctctcttcaactaccatgacacgaggatccatgcctgcctctactttattgcccctactggacattcactaaagtccctggatctggtcaccatgaaaaagctggacagtaaggtgaacatcattccaataattgcaaaagctgacaccattgccaagaatgaactgcacaaattcaagagtaagatcatgagtgaactggtcagcaatggggtccagatatatcagtttcccactgatgaagaaacggtggcagagattaacgcaacaatgagtgtccatctcccatttgcagtggttggcagcaccgaagaggtgaagattggcaacaagatggcaaaggccaggcagtacccctggggtgtggtgcaggttgagaatgaaaatcattgcgattttgtgaaacttcgagagatgctgatccgcgtgaacatggaggacttgcgagagcagactcacacccgccactatgaattgtaccgacgctgtaagcttgaagagatggggttcaaggacactgaccctgacagcaaacccttcagtcttcaggagacatatgaagcaaaaaggaatgaattcctgggagaactgcagaagaaagaagaagaaatgagacaaatgtttgttatgagagtgaaggagaaagaagctgaacttaaggaggcagagaaagagcttcacgagaagtttgaccttctaaagcggacacaccaagaagaaaagaagaaagtggaagacaagaagaaggagcttgaggaggaggtgaacaacttccagaagaagaaagcagcggctcagttactacagtcccaggcccagcaatctggggcccagcaaaccaagaaagacaaggataagaaaaatgcaagcttcacataaagcctggcaagccaaggatgttcccgcattcacctgcttttgcagtaatatcgtatctctgccatgtgtgttctttagttttattttattttattttatttttttacccttcctcaaacaccagtaactattattaactcgttttgctgaatgttgttgggtggtagaaaatgatagaacaagggaataaccgcgaatgctctgtgcagctggactctgtttccggaaagtaaatgatttgctttttatgcctgttctgaatggcagcacgaagcaggcctgttacttgtatgtcgctttggacagaggaaagtggggtaaaatgctacctgtacgtctgacatgaaaacttctcaccgcctcagcagctgaactaaaaacctgaatagccatgacaagagtttgcattttcttgatgattcatctccatgagtgcacaatccctgaactcactgtcttttctccacacttgtcctaagccaaggtagatttgtacgtagacagactggtgagcaagcattatattttatttttacccttgcatgacattttcattttaatcaataacattatttggcctgagcttgtgggtctgttcagactgtctcctctcatggtttgaaactgcatctgaatgcctgccttcaatcctggccaagttggagtagactggtatgagaaaactatgattagttcacatttactggtgcatccttgatcctctcacagatagaggtcttaaaggttggatcatgtaacattgcttagtagaagaatcttcttctaaggatgatgggctttctacagcctgcttaccactaacagtaaggaatctttcataaacacacctcagtttgttcccagtgggcttagagggaggacctgatgactgattccaggatacttgtacttctaataacatttttcatgaatcatgagaaaatttccacagatacttcccttagaaaatttgctataaactctgtatcattggtagcacaaatttgagcgaggccttgtcaattttaaggtggaaataggaaggaccacaacatgacccgtaagtcaagaaggtagacatttcatatccagcttccttgcttagtctcctttcagtatttggcaataaaagaaagaagaaatagaacagctgaagtctcaaatcattgtctggaattttcctcaccttggctagctccacctgctctttgtctaaggcccttgcctcatcagggattagaactggcccatatgccagaacctgtactaaatgcctaatttgtatggaagagtgcatatttaatctcttttctatactgctcctttctgatgcttatcctttcatctgtgtgattgttttttcccctctactaacaagatcctcccagctttctctctacatgtagaaaggataacatttctcatgaacccactgcccctctgcattttcctcactggttagagattaagtaaataggatagaatatgctgcgtctcccctgacacacactttcttttttgaatgagcaagtctccattttgatttcagcaaagattttttctccttttctttgtcctcaaccatacttagaggaaagaaggaatggtcttccatgaactgattatgcttaattaagcaaagtaaggaaattagtttcatggaagcctaaacaaagctggaatagaaactacacactagacacagcagtagtcatagtcttcacaggtttaggagctactggaccaacattcttgtttttgcttttgtttttttaaataattctagtctggagctaactgtggagcagccaaatagtagctggcatgttgattcaaaccatgggctgaatttgctcataggctgtgcatcagacaaaagcttgaatatttgtgttgtatgcttgttccaaccaccgcttgtgtgagcatttttgtggcttgtacagaaagtacacttttaaattgtctcttgcatcactaaaatttttttaaaatgagcataacaacgaaaggcatccagctgactttttgattccaagattattgattggattgacttttttgcattaaatttttcccagcaaaataaatcatatggcgagtcagggaataaaaagtcaaaagaaacaaatagaagcttttttttttaaaaaatgtattgcttctgaacttttttctgccactgctccctagccctgtttagtttgttattgctgcttttcttttttctttctgtatctatgcctttttttcacagtagtccttggctctgcacggaataaatgataccctcaaatctaattggatgtgctttcgcctttgcatgtaagtacggtagtaagaaacctttgagatctttctgacttttcaaaattagagaaagcaaatgggatggatagattttttttttcttttcaaggggggcaggaaggtaatggtttgagtagcctttgtttaaaaaaaagactaaatatatttaaaaggccacatttatatttttttcacaagaaccacataataaattccacttcttgacctgaatttggaaatccgaaattactaatccaggccaggtgtggtggctcatgcctgtaatcccagcactttgagaggccgaggtgggcagatcacttgaggcctggagttcaagaccaccttggcgaacacggtgaaaccccgtctctacaaaaaatacaaaaattagccaggcgtggtggcacgtgcctgtagtcccagctacttgggaggctaagtcaggagaattgcttgaacttgggagatggaggttgcagtgagccaagattgcaccactgcattccaacctgggtgatgaagtgagactctccaaaaaaaaaaaagaaattattaatccctgcctgtgctctacatagcctcatgggcatcattggatagctcagagggcccttgattctggcaaggcaaataaagccagaatgagaaattaccatcttctactagagaaaaccaagagaaaaatttttatgctaggatgcctttatgaccacttaattttttaatcttagtttaatggtctctccctggtgctaactgctgacagtggccacctcttttttggggattgaggggcctacataactagctggccttaccccatatcttttgttcaaacataataccatctttttgcttcttctgaactttagatctccataacacatgtactgtagaatgtgatggaaaagcattgatgagaatttattggcagttcagattgtgttttcccaacttaggctctttattaattggttaaggttttctccaaaaagggcatttcaacaatgggaattatttaatgtaacagtgggcacagattacttatcttccttctctgctttgtgactcaccagcagtaacacacacaatccacatcttgtgcacctcaaatgaacagacttggtttccttgctttcttgacatttccatgactgtttcacatacaaactattgggtgaggtttttcagctgttaccgacccacgtcctgctgtctctgtgtggtcctacaaaaactgtccattcccacccctttgctttgccatttgcaagagtctggaattgtcaggtctcagcttcgaaaagtcctggttccactgacaggacacattctttagtgggaattaagacctacaaagtctagtttgtatgtaggtatgaagggaattttttaaataaattgaaaagctgtgaacagcattagaactttgtctatttcttaattttaaaatatgctgatatgccttaaactgtagttgtagatccttgtcattttgctgtttgaaaataaccaatgtgttttctaaaactgtcgtgtaatctactttcattgttaatgcagaattgtcatatatgtaagctgcatgttagacatttgtcttttttaaactaaagtaattgtattgatgtgaagcatatcattttttcaaatatgaaagtgatcacttagcaacatgcttggtaatttggcatctgttaaggtaggagagtggtgaacagataatctatgcatatatcactagtgccaagacataaagcgggggaaaatatatttttacccaaacattatttgtgtgcccttttttgtgagttctttttagtcactgcttggtttgcatatgtacacgtgcttactggataaaagaaatagggataagagtctcatgctttcctgcctcgtgtggtagacttcaaatggctgccgtctgggttacaccagtttctcaaagatacgtgccatgtggtgtcctgtacttcacatatcatgttatcaccctttttcccccatgcctgtccctgtccaccctgccaattcatgtgccttggtgcccagctgaggcatcgtcttcttcactggcctcctcttccctgctgctgctcaccctcccgtcgagctcgaggaagtcaccccattaactgacacactgctgttctttcacagcttgttgtagagaagctccttttcttttcttaagccattaagaatcaaatttgaatctgaacctttcttttttctcttctgtagcttcttctttatgtaaccatcctgttgacaagccctactctctcctaatggacatagagcattagaagagcaggagctgtctgttcacacgtgttggggaagagttacctcatttccaccatcgcctcctgttcttttaaagtctgggtcaaatattgcactgctgtttgtacttgtcaatgtctgcccatagtggatactgaagtgacttaccactaccaaaaatagtcatattcaataatattaattaaaaaggaaaaaggaaattgactgaaacagaaaacgtgggccaagacccaaggtcttgtgctgggatccccttgcttagaactatcatgttcttgaagctgctgatccaagaactgatggactgaagacagcgtgtaccctaacctgagggggccaccacacccagggcccacaaacttgatctcatggtaactcctgtcctttctgtcccatgagccacattctgaacagcctgatcaggatcctcaaccgtcaggtcataagatccgagcaacattttccttccttttgttagttttatgggttgttttggtgtttggggttttt

SEQ ID NO: 4671 - protein, 429 aa, Homo sapiens; identical to SEQ ID NO: 533

SEQ ID NO: 4672 - DNA, 826 bp, Homo sapiens
gagcactagcagcagccggagtcggcgtaaagcacccgggcgcagccggagccggtgccgcagctgcgatggccgtggccgtggggagaccgtcttcttcaggagacatatgaagcaaaaaggaatgaattcctgggagaactgcagaagaaagaagaagaaatgagacaaatgtttgttatgagagtgaaggagaaagaagctgaacttaaggaggcagagaaagagcttcacgagaagtttgaccttctaaagcggacacaccaagaagaaaagaagaaagtggaagacaagaagaaggagcttgaggaggaggtgaacaacttccagaagaagaaagcagcggctcagttactacagtcccaggcccagcaatctggggcccagcaaaccaagaaagacaaggataagaaaaatgcaagcttcacataaagcctggcaagccaaggatgttcccgcattcacctgcttttgcagtaatatcgtatctctgccatgtgtgttctttagttttattttattttattttatttttttacccttcctcaaacaccagtaactattattaactcgttttgctgaatgttgttgggtggtagaaaatgatagaacaagggaataaccgcgaatgctctgtgcagctggactctgtttccggaaagtaaatgatttgctttttatgcctgttctgaatggcagcacgaagcaggcctgttacttgtatgtcgctttggacagaggaaagtggggtaaaatgctacctgtacgtctgacatgaaaacttctcaccgcctcagcagctgaactaaaaacctgaatagccatg

SEQ ID NO: 4673 - protein, 89 aa, Homo sapiens
MRQMFVMRVKEKEAELKEAEKELHEKFDLLKRTHQEEKKKVEDKKKELEEEVNNFQKKKAAAQLLQSQAQQSGAQQTKKDKDKKNASFT

SEQ ID NO: 4674 - DNA, 1559 bp, Homo sapiens
gagcactagcagcagccggagtcggcgtaaagcacccgggcgcagccggagccggtgccgcagctgcgatggccgtggccgtggggagaccgtcttcttcaggagacatatgaagcaaaaaggaatgaattcctgggagaactgcagaagaaagaagaagaaatgagacaaatgtttgttatgagagtgaaggagaaagaagctgaacttaaggaggcagagaaagagcttcacgagaagtttgaccttctaaagcggacacaccaagaagaaaagaagaaagtggaagacaagaagaaggagcttgaggaggaggtgaacaacttccagaagaagaaagcagcggctcagttactacagtcccaggcccagcaatctggggcccagcaaaccaagaaagacaaggataagaaaaatgcaagcttcacataaagcctggcaagccaaggatgttcccgcattcacctgcttttgcagtaatatcgtatctctgccatgtgtgttctttagttttattttattttattttatttttttacccttcctcaaacaccagtaactattattaactcgttttgctgaatgttgttgggtggtagaaaatgatagaacaagggaataaccgcgaatgctctgtgcagctggactctgtttccggaaagtaaatgatttgctttttatgcctgttctgaatggcagcacgaagcaggcctgttacttgtatgtcgctttggacagaggaaagtggggtaaaatgctacctgtacgtctgacatgaaaacttctcaccgcctcagcagctgaactaaaaacctgaatagccatgacaagagtttgcattttcttgatgattcatctccatgagtgcacaatccctgaactcactgtcttttctccacacttgtcctaagccaaggtagatttgtacgtagacagactggtgagcaagcattatattttatttttacccttgcatgacattttcattttaatcaataacattatttggcctgagcttgtgggtctgttcagactgtctcctctcatggtttgaaactgcatctgaatgcctgccttcaatcctggccaagttggagtagactggtatgagaaaactatgattagttcacatttactggtgcatccttgatcctctcacagatagaggtcttaaaggttggatcatgtaacattgcttagtagaagaatcttcttctaaggatgatgggctttctacagcctgcttaccactaacagtaaggaatctttcataaacacacctcagtttgttcccagtgggcttagagggaggacctgatgactgattccaggatacttgtacttctaataacatttttcatgaatcatgagaaaatttccacagatacttcccttagaaaatttgctataaactctgtatcattggtagcacaaatttgagcgaggccttgtcaattttaaggtggaaataggaaggaccacaacatgacccgtaagtcaagaaggtagacatttcatatccagcttccttgcttagtctcctttcagtatttggcaat

SEQ ID NO: 4675 - protein, 89 aa, Homo sapiens; identical to SEQ ID NO: 4673

SEQ ID NO: 4676 - DNA, 4534 bp, Homo sapiens
gagcactagcagcagccggagtcggcgtaaagcacccgggcgcagccggagccggtgccgcagctgcgatggccgtggccgtggggagaccgtcttcttcaggagacatatgaagcaaaaaggaatgaattcctgggagaactgcagaagaaagaagaagaaatgagacaaatgtttgttatgagagtgaaggagaaagaagctgaacttaaggaggcagagaaagagcttcacgagaagtttgaccttctaaagcggacacaccaagaagaaaagaagaaagtggaagacaagaagaaggagcttgaggaggaggtgaacaacttccagaagaagaaagcagcggctcagttactacagtcccaggcccagcaatctggggcccagcaaaccaagaaagacaaggataagaaaaatgcaagcttcacataaagcctggcaagccaaggatgttcccgcattcacctgcttttgcagtaatatcgtatctctgccatgtgtgttctttagttttattttattttattttatttttttacccttcctcaaacaccagtaactattattaactcgttttgctgaatgttgttgggtggtagaaaatgatagaacaagggaataaccgcgaatgctctgtgcagctggactctgtttccggaaagtaaatgatttgctttttatgcctgttctgaatggcagcacgaagcaggcctgttacttgtatgtcgctttggacagaggaaagtggggtaaaatgctacctgtacgtctgacatgaaaacttctcaccgcctcagcagctgaactaaaaacctgaatagccatgacaagagtttgcattttcttgatgattcatctccatgagtgcacaatccctgaactcactgtcttttctccacacttgtcctaagccaaggtagatttgtacgtagacagactggtgagcaagcattatattttatttttacccttgcatgacattttcattttaatcaataacattatttggcctgagcttgtgggtctgttcagactgtctcctctcatggtttgaaactgcatctgaatgcctgccttcaatcctggccaagttggagtagactggtatgagaaaactatgattagttcacatttactggtgcatccttgatcctctcacagatagaggtcttaaaggttggatcatgtaacattgcttagtagaagaatcttcttctaaggatgatgggctttctacagcctgcttaccactaacagtaaggaatctttcataaacacacctcagtttgttcccagtgggcttagagggaggacctgatgactgattccaggatacttgtacttctaataacatttttcatgaatcatgagaaaatttccacagatacttcccttagaaaatttgctataaactctgtatcattggtagcacaaatttgagcgaggccttgtcaattttaaggtggaaataggaaggaccacaacatgacccgtaagtcaagaaggtagacatttcatatccagcttccttgcttagtctcctttcagtatttggcaataaaagaaagaagaaatagaacagctgaagtctcaaatcattgtctggaattttcctcaccttggctagctccacctgctctttgtctaaggcccttgcctcatcagggattagaactggcccatatgccagaacctgtactaaatgcctaatttgtatggaagagtgcatatttaatctcttttctatactgctcctttctgatgcttatcctttcatctgtgtgattgttttttcccctctactaacaagatcctcccagctttctctctacatgtagaaaggataacatttctcatgaacccactgcccctctgcattttcctcactggttagagattaagtaaataggatagaatatgctgcgtctcccctgacacacactttcttttttgaatgagcaagtctccattttgatttcagcaaagattttttctccttttctttgtcctcaaccatacttagaggaaagaaggaatggtcttccatgaactgattatgcttaattaagcaaagtaaggaaattagtttcatggaagcctaaacaaagctggaatagaaactacacactagacacagcagtagtcatagtcttcacaggtttaggagctactggaccaacattcttgtttttgcttttgtttttttaaataattctagtctggagctaactgtggagcagccaaatagtagctggcatgttgattcaaaccatgggctgaatttgctcataggctgtgcatcagacaaaagcttgaatatttgtgttgtatgcttgttccaaccaccgcttgtgtgagcatttttgtggcttgtacagaaagtacacttttaaattgtctcttgcatcactaaaatttttttaaaatgagcataacaacgaaaggcatccagctgactttttgattccaagattattgattggattgacttttttgcattaaatttttcccagcaaaataaatcatatggcgagtcagggaataaaaagtcaaaagaaacaaatagaagcttttttttttaaaaaatgtattgcttctgaacttttttctgccactgctccctagccctgtttagtttgttattgctgcttttcttttttctttctgtatctatgcctttttttcacagtagtccttggctctgcacggaataaatgataccctcaaatctaattggatgtgctttcgcctttgcatgtaagtacggtagtaagaaacctttgagatctttctgacttttcaaaattagagaaagcaaatgggatggatagattttttttttcttttcaaggggggcaggaaggtaatggtttgagtagcctttgtttaaaaaaaagactaaatatatttaaaaggccacatttatatttttttcacaagaaccacataataaattccacttcttgacctgaatttggaaatccgaaattactaatccaggccaggtgtggtggctcatgcctgtaatcccagcactttgagaggccgaggtgggcagatcacttgaggcctggagttcaagaccaccttggcgaacacggtgaaaccccgtctctacaaaaaatacaaaaattagccaggcgtggtggcacgtgcctgtagtcccagctacttgggaggctaagtcaggagaattgcttgaacttgggagatggaggttgcagtgagccaagattgcaccactgcattccaacctgggtgatgaagtgagactctccaaaaaaaaaaaagaaattattaatccctgcctgtgctctacatagcctcatgggcatcattggatagctcagagggcccttgattctggcaaggcaaataaagccagaatgagaaattaccatcttctactagagaaaaccaagagaaaaatttttatgctaggatgcctttatgaccacttaattttttaatcttagtttaatggtctctccctggtgctaactgctgacagtggccacctcttttttggggattgaggggcctacataactagctggccttaccccatatcttttgttcaaacataataccatctttttgcttcttctgaactttagatctccataacacatgtactgtagaatgtgatggaaaagcattgatgagaatttattggcagttcagattgtgttttcccaacttaggctctttattaattggttaaggttttctccaaaaagggcatttcaacaatgggaattatttaatgtaacagtgggcacagattacttatcttccttctctgctttgtgactcaccagcagtaacacacacaatccacatcttgtgcacctcaaatgaacagacttggtttccttgctttcttgacatttccatgactgtttcacatacaaactattgggtgaggtttttcagctgttaccgacccacgtcctgctgtctctgtgtggtcctacaaaaactgtccattcccacccctttgctttgccatttgcaagagtctggaattgtcaggtctcagcttcgaaaagtcctggttccactgacaggacacattctttagtgggaattaagacctacaaagtctagtttgtatgtaggtatgaagggaattttttaaataaattgaaaagctgtgaacagcattagaactttgtctatttcttaattttaaaatatgctgatatgccttaaactgtagttgtagatccttgtcattttgctgtttgaaaataaccaatgtgttttctaaaactgtcgtgtaatctactttcattgttaatgcagaattgtcatatatgtaagctgcatgttagacatttgtcttttttaaactaaagtaattgtattgatgtgaagcatatcattttttcaaatatgaaagtgatcacttagcaacatgcttggtaatttggcatctgttaaggtaggagagtggtgaacagataatctatgcatatatcactagtgccaagacataaagcgggggaaaatatatttttacccaaacatt

SEQ ID NO: 4677 - protein, 89 aa, Homo sapiens; identical to SEQ ID NO: 4673

SEQ ID NO: 4678 - DNA, 5568 bp, Homo sapiens
gagcactagcagcagccggagtcggcgtaaagcacccgggcgcagccggagccggtgccgcagctgcgatggccgtggccgtggggagaccgtcttcttcaggagacatatgaagcaaaaaggaatgaattcctgggagaactgcagaagaaagaagaagaaatgagacaaatgtttgttatgagagtgaaggagaaagaagctgaacttaaggaggcagagaaagagcttcacgagaagtttgaccttctaaagcggacacaccaagaagaaaagaagaaagtggaagacaagaagaaggagcttgaggaggaggtgaacaacttccagaagaagaaagcagcggctcagttactacagtcccaggcccagcaatctggggcccagcaaaccaagaaagacaaggataagaaaaatgcaagcttcacataaagcctggcaagccaaggatgttcccgcattcacctgcttttgcagtaatatcgtatctctgccatgtgtgttctttagttttattttattttattttatttttttacccttcctcaaacaccagtaactattattaactcgttttgctgaatgttgttgggtggtagaaaatgatagaacaagggaataaccgcgaatgctctgtgcagctggactctgtttccggaaagtaaatgatttgctttttatgcctgttctgaatggcagcacgaagcaggcctgttacttgtatgtcgctttggacagaggaaagtggggtaaaatgctacctgtacgtctgacatgaaaacttctcaccgcctcagcagctgaactaaaaacctgaatagccatgacaagagtttgcattttcttgatgattcatctccatgagtgcacaatccctgaactcactgtcttttctccacacttgtcctaagccaaggtagatttgtacgtagacagactggtgagcaagcattatattttatttttacccttgcatgacattttcattttaatcaataacattatttggcctgagcttgtgggtctgttcagactgtctcctctcatggtttgaaactgcatctgaatgcctgccttcaatcctggccaagttggagtagactggtatgagaaaactatgattagttcacatttactggtgcatccttgatcctctcacagatagaggtcttaaaggttggatcatgtaacattgcttagtagaagaatcttcttctaaggatgatgggctttctacagcctgcttaccactaacagtaaggaatctttcataaacacacctcagtttgttcccagtgggcttagagggaggacctgatgactgattccaggatacttgtacttctaataacatttttcatgaatcatgagaaaatttccacagatacttcccttagaaaatttgctataaactctgtatcattggtagcacaaatttgagcgaggccttgtcaattttaaggtggaaataggaaggaccacaacatgacccgtaagtcaagaaggtagacatttcatatccagcttccttgcttagtctcctttcagtatttggcaataaaagaaagaagaaatagaacagctgaagtctcaaatcattgtctggaattttcctcaccttggctagctccacctgctctttgtctaaggcccttgcctcatcagggattagaactggcccatatgccagaacctgtactaaatgcctaatttgtatggaagagtgcatatttaatctcttttctatactgctcctttctgatgcttatcctttcatctgtgtgattgttttttcccctctactaacaagatcctcccagctttctctctacatgtagaaaggataacatttctcatgaacccactgcccctctgcattttcctcactggttagagattaagtaaataggatagaatatgctgcgtctcccctgacacacactttcttttttgaatgagcaagtctccattttgatttcagcaaagattttttctccttttctttgtcctcaaccatacttagaggaaagaaggaatggtcttccatgaactgattatgcttaattaagcaaagtaaggaaattagtttcatggaagcctaaacaaagctggaatagaaactacacactagacacagcagtagtcatagtcttcacaggtttaggagctactggaccaacattcttgtttttgcttttgtttttttaaataattctagtctggagctaactgtggagcagccaaatagtagctggcatgttgattcaaaccatgggctgaatttgctcataggctgtgcatcagacaaaagcttgaatatttgtgttgtatgcttgttccaaccaccgcttgtgtgagcatttttgtggcttgtacagaaagtacacttttaaattgtctcttgcatcactaaaatttttttaaaatgagcataacaacgaaaggcatccagctgactttttgattccaagattattgattggattgacttttttgcattaaatttttcccagcaaaataaatcatatggcgagtcagggaataaaaagtcaaaagaaacaaatagaagcttttttttttaaaaaatgtattgcttctgaacttttttctgccactgctccctagccctgtttagtttgttattgctgcttttcttttttctttctgtatctatgcctttttttcacagtagtccttggctctgcacggaataaatgataccctcaaatctaattggatgtgctttcgcctttgcatgtaagtacggtagtaagaaacctttgagatctttctgacttttcaaaattagagaaagcaaatgggatggatagattttttttttcttttcaaggggggcaggaaggtaatggtttgagtagcctttgtttaaaaaaaagactaaatatatttaaaaggccacatttatatttttttcacaagaaccacataataaattccacttcttgacctgaatttggaaatccgaaattactaatccaggccaggtgtggtggctcatgcctgtaatcccagcactttgagaggccgaggtgggcagatcacttgaggcctggagttcaagaccaccttggcgaacacggtgaaaccccgtctctacaaaaaatacaaaaattagccaggcgtggtggcacgtgcctgtagtcccagctacttgggaggctaagtcaggagaattgcttgaacttgggagatggaggttgcagtgagccaagattgcaccactgcattccaacctgggtgatgaagtgagactctccaaaaaaaaaaaagaaattattaatccctgcctgtgctctacatagcctcatgggcatcattggatagctcagagggcccttgattctggcaaggcaaataaagccagaatgagaaattaccatcttctactagagaaaaccaagagaaaaatttttatgctaggatgcctttatgaccacttaattttttaatcttagtttaatggtctctccctggtgctaactgctgacagtggccacctcttttttggggattgaggggcctacataactagctggccttaccccatatcttttgttcaaacataataccatctttttgcttcttctgaactttagatctccataacacatgtactgtagaatgtgatggaaaagcattgatgagaatttattggcagttcagattgtgttttcccaacttaggctctttattaattggttaaggttttctccaaaaagggcatttcaacaatgggaattatttaatgtaacagtgggcacagattacttatcttccttctctgctttgtgactcaccagcagtaacacacacaatccacatcttgtgcacctcaaatgaacagacttggtttccttgctttcttgacatttccatgactgtttcacatacaaactattgggtgaggtttttcagctgttaccgacccacgtcctgctgtctctgtgtggtcctacaaaaactgtccattcccacccctttgctttgccatttgcaagagtctggaattgtcaggtctcagcttcgaaaagtcctggttccactgacaggacacattctttagtgggaattaagacctacaaagtctagtttgtatgtaggtatgaagggaattttttaaataaattgaaaagctgtgaacagcattagaactttgtctatttcttaattttaaaatatgctgatatgccttaaactgtagttgtagatccttgtcattttgctgtttgaaaataaccaatgtgttttctaaaactgtcgtgtaatctactttcattgttaatgcagaattgtcatatatgtaagctgcatgttagacatttgtcttttttaaactaaagtaattgtattgatgtgaagcatatcattttttcaaatatgaaagtgatcacttagcaacatgcttggtaatttggcatctgttaaggtaggagagtggtgaacagataatctatgcatatatcactagtgccaagacataaagcgggggaaaatatatttttacccaaacattatttgtgtgcccttttttgtgagttctttttagtcactgcttggtttgcatatgtacacgtgcttactggataaaagaaatagggataagagtctcatgctttcctgcctcgtgtggtagacttcaaatggctgccgtctgggttacaccagtttctcaaagatacgtgccatgtggtgtcctgtacttcacatatcatgttatcaccctttttcccccatgcctgtccctgtccaccctgccaattcatgtgccttggtgcccagctgaggcatcgtcttcttcactggcctcctcttccctgctgctgctcaccctcccgtcgagctcgaggaagtcaccccattaactgacacactgctgttctttcacagcttgttgtagagaagctccttttcttttcttaagccattaagaatcaaatttgaatctgaacctttcttttttctcttctgtagcttcttctttatgtaaccatcctgttgacaagccctactctctcctaatggacatagagcattagaagagcaggagctgtctgttcacacgtgttggggaagagttacctcatttccaccatcgcctcctgttcttttaaagtctgggtcaaatattgcactgctgtttgtacttgtcaatgtctgcccatagtggatactgaagtgacttaccactaccaaaaatagtcatattcaataatattaattaaaaaggaaaaaggaaattgactgaaacagaaaacgtgggccaagacccaaggtcttgtgctgggatccccttgcttagaactatcatgttcttgaagctgctgatccaagaactgatggactgaagacagcgtgtaccctaacctgagggggccaccacacccagggcccacaaacttgatctcatggtaactcctgtcctttctgtcccatgagccacattctgaacagcctgatcaggatcctcaaccgtcaggtcataagatccgagcaacattttccttccttttgttagttttatgggttgttttggtgtttggggttttt

SEQ ID NO: 4679 - protein, 89 aa, Homo sapiens; identical to SEQ ID NO: 4673

SEQ ID NO: 4680 - DNA, 467 bp, Homo sapiens
aggatgctctctatcaagagtcatgagaattgtcttcagagggtgctgaagagacatcaacctgtcttctttgagactcctagtgttggtgtggaagatgctactggagacaacaggttcctccaggcctgattgcttggtcaattgtgaatcacctttgatgaaacatactccggcataagatgagccagcgtgtggcacctggcatttcattaaacaattgcactgacttagaggatgcccaggaacccagaccactacatacaccaaatctcttttctgaaaatccatggagaaatttttccaggtaaagctgtgtttcatctggagcaatcattttgtttttactttatagatactataaatctgtcgtatgttaaactttttgcttgtgtttagcatataacacatgctcactaaatatctgctaatgaatgagtgaattaataaattttctccatgctctg

SEQ ID NO: 4681 - protein, 53 aa, Homo sapiens
MPRNPDHYIHQISFLKIHGEIFPGKAVFHLEQSFCFYFIDTINLSYVKLFACV

SEQ ID NO: 4682 - DNA, 963 bp, Homo sapiens
cacaaattcaagagtaagatcatgagtgaactggtcagcaatggggtccagatatatcagtttcccactgatgaagaaacggtggcagagattaacttcgagagatgctgatccgcgtgaacatggaggacttgcgagagcagactcacacccgccactatgaattgtaccgacgctgtaagcttgaagagatggggttcaaggacactgaccctgacagcaaacccttcagtcttcaggagacatatgaagcaaaaaggaatgaattcctgggagaactgcagaagaaagaagaagaaatgagacaaatgtttgttatgagagtgaaggagaaagaagctgaacttaaggaggcagagaaagagcttcacgagaagtttgaccttctaaagcggacacaccaagaagaaaagaagaaagtggaagacaagaagaaggagcttgaggaggaggtgaacaacttccagaagaagaaagcagcggctcagttactacagtcccaggcccagcaatctggggcccagcaaaccaagaaagacaaggataagaaaaatgcaagcttcacataaagcctggcaagccaaggatgttcccgcattcacctgcttttgcagtaatatcgtatctctgccatgtgtgttctttagttttattttattttattttatttttttacccttcctcaaacaccagtaactattattaactcgttttgctgaatgttgttgggtggtagaaaatgatagaacaagggaataaccgcgaatgctctgtgcagctggactctgtttccggaaagtaaatgatttgctttttatgcctgttctgaatggcagcacgaagcaggcctgttacttgtatgtcgctttggacagaggaaagtggggtaaaatgctacctgtacgtctgacatgaaaacttctcaccgcctcagcagctgaactaaaaacctgaatagccatg

SEQ ID NO: 4683 - protein, 154 aa, Homo sapiens [sequence omitted]

SEQ ID NO: 4684 - DNA, 1696 bp, Homo sapiens
cacaaattcaagagtaagatcatgagtgaactggtcagcaatggggtccagatatatcagtttcccactgatgaagaaacggtggcagagattaacttcgagagatgctgatccgcgtgaacatggaggacttgcgagagcagactcacacccgccactatgaattgtaccgacgctgtaagcttgaagagatggggttcaaggacactgaccctgacagcaaacccttcagtcttcaggagacatatgaagcaaaaaggaatgaattcctgggagaactgcagaagaaagaagaagaaatgagacaaatgtttgttatgagagtgaaggagaaagaagctgaacttaaggaggcagagaaagagcttcacgagaagtttgaccttctaaagcggacacaccaagaagaaaagaagaaagtggaagacaagaagaaggagcttgaggaggaggtgaacaacttccagaagaagaaagcagcggctcagttactacagtcccaggcccagcaatctggggcccagcaaaccaagaaagacaaggataagaaaaatgcaagcttcacataaagcctggcaagccaaggatgttcccgcattcacctgcttttgcagtaatatcgtatctctgccatgtgtgttctttagttttattttattttattttatttttttacccttcctcaaacaccagtaactattattaactcgttttgctgaatgttgttgggtggtagaaaatgatagaacaagggaataaccgcgaatgctctgtgcagctggactctgtttccggaaagtaaatgatttgctttttatgcctgttctgaatggcagcacgaagcaggcctgttacttgtatgtcgctttggacagaggaaagtggggtaaaatgctacctgtacgtctgacatgaaaacttctcaccgcctcagcagctgaactaaaaacctgaatagccatgacaagagtttgcattttcttgatgattcatctccatgagtgcacaatccctgaactcactgtcttttctccacacttgtcctaagccaaggtagatttgtacgtagacagactggtgagcaagcattatattttatttttacccttgcatgacattttcattttaatcaataacattatttggcctgagcttgtgggtctgttcagactgtctcctctcatggtttgaaactgcatctgaatgcctgccttcaatcctggccaagttggagtagactggtatgagaaaactatgattagttcacatttactggtgcatccttgatcctctcacagatagaggtcttaaaggttggatcatgtaacattgcttagtagaagaatcttcttctaaggatgatgggctttctacagcctgcttaccactaacagtaaggaatctttcataaacacacctcagtttgttcccagtgggcttagagggaggacctgatgactgattccaggatacttgtacttctaataacatttttcatgaatcatgagaaaatttccacagatacttcccttagaaaatttgctataaactctgtatcattggtagcacaaatttgagcgaggccttgtcaattttaaggtggaaataggaaggaccacaacatgacccgtaagtcaagaaggtagacatttcatatccagcttccttgcttagtctcctttcagtatttggcaat

SEQ ID NO: 4685 - protein, 154 aa, Homo sapiens [sequence omitted]

SEQ ID NO: 4686 - DNA, 4671 bp, Homo sapiens
cacaaattcaagagtaagatcatgagtgaactggtcagcaatggggtccagatatatcagtttcccactgatgaagaaacggtggcagagattaacttcgagagatgctgatccgcgtgaacatggaggacttgcgagagcagactcacacccgccactatgaattgtaccgacgctgtaagcttgaagagatggggttcaaggacactgaccctgacagcaaacccttcagtcttcaggagacatatgaagcaaaaaggaatgaattcctgggagaactgcagaagaaagaagaagaaatgagacaaatgtttgttatgagagtgaaggagaaagaagctgaacttaaggaggcagagaaagagcttcacgagaagtttgaccttctaaagcggacacaccaagaagaaaagaagaaagtggaagacaagaagaaggagcttgaggaggaggtgaacaacttccagaagaagaaagcagcggctcagttactacagtcccaggcccagcaatctggggcccagcaaaccaagaaagacaaggataagaaaaatgcaagcttcacataaagcctggcaagccaaggatgttcccgcattcacctgcttttgcagtaatatcgtatctctgccatgtgtgttctttagttttattttattttattttatttttttacccttcctcaaacaccagtaactattattaactcgttttgctgaatgttgttgggtggtagaaaatgatagaacaagggaataaccgcgaatgctctgtgcagctggactctgtttccggaaagtaaatgatttgctttttatgcctgttctgaatggcagcacgaagcaggcctgttacttgtatgtcgctttggacagaggaaagtggggtaaaatgctacctgtacgtctgacatgaaaacttctcaccgcctcagcagctgaactaaaaacctgaatagccatgacaagagtttgcattttcttgatgattcatctccatgagtgcacaatccctgaactcactgtcttttctccacacttgtcctaagccaaggtagatttgtacgtagacagactggtgagcaagcattatattttatttttacccttgcatgacattttcattttaatcaataacattatttggcctgagcttgtgggtctgttcagactgtctcctctcatggtttgaaactgcatctgaatgcctgccttcaatcctggccaagttggagtagactggtatgagaaaactatgattagttcacatttactggtgcatccttgatcctctcacagatagaggtcttaaaggttggatcatgtaacattgcttagtagaagaatcttcttctaaggatgatgggctttctacagcctgcttaccactaacagtaaggaatctttcataaacacacctcagtttgttcccagtgggcttagagggaggacctgatgactgattccaggatacttgtacttctaataacatttttcatgaatcatgagaaaatttccacagatacttcccttagaaaatttgctataaactctgtatcattggtagcacaaatttgagcgaggccttgtcaattttaaggtggaaataggaaggaccacaacatgacccgtaagtcaagaaggtagacatttcatatccagcttccttgcttagtctcctttcagtatttggcaataaaagaaagaagaaatagaacagctgaagtctcaaatcattgtctggaattttcctcaccttggctagctccacctgctctttgtctaaggcccttgcctcatcagggattagaactggcccatatgccagaacctgtactaaatgcctaatttgtatggaagagtgcatatttaatctcttttctatactgctcctttctgatgcttatcctttcatctgtgtgattgttttttcccctctactaacaagatcctcccagctttctctctacatgtagaaaggataacatttctcatgaacccactgcccctctgcattttcctcactggttagagattaagtaaataggatagaatatgctgcgtctcccctgacacacactttcttttttgaatgagcaagtctccattttgatttcagcaaagattttttctccttttctttgtcctcaaccatacttagaggaaagaaggaatggtcttccatgaactgattatgcttaattaagcaaagtaaggaaattagtttcatggaagcctaaacaaagctggaatagaaactacacactagacacagcagtagtcatagtcttcacaggtttaggagctactggaccaacattcttgtttttgcttttgtttttttaaataattctagtctggagctaactgtggagcagccaaatagtagctggcatgttgattcaaaccatgggctgaatttgctcataggctgtgcatcagacaaaagcttgaatatttgtgttgtatgcttgttccaaccaccgcttgtgtgagcatttttgtggcttgtacagaaagtacacttttaaattgtctcttgcatcactaaaatttttttaaaatgagcataacaacgaaaggcatccagctgactttttgattccaagattattgattggattgacttttttgcattaaatttttcccagcaaaataaatcatatggcgagtcagggaataaaaagtcaaaagaaacaaatagaagcttttttttttaaaaaatgtattgcttctgaacttttttctgccactgctccctagccctgtttagtttgttattgctgcttttcttttttctttctgtatctatgcctttttttcacagtagtccttggctctgcacggaataaatgataccctcaaatctaattggatgtgctttcgcctttgcatgtaagtacggtagtaagaaacctttgagatctttctgacttttcaaaattagagaaagcaaatgggatggatagattttttttttcttttcaaggggggcaggaaggtaatggtttgagtagcctttgtttaaaaaaaagactaaatatatttaaaaggccacatttatatttttttcacaagaaccacataataaattccacttcttgacctgaatttggaaatccgaaattactaatccaggccaggtgtggtggctcatgcctgtaatcccagcactttgagaggccgaggtgggcagatcacttgaggcctggagttcaagaccaccttggcgaacacggtgaaaccccgtctctacaaaaaatacaaaaattagccaggcgtggtggcacgtgcctgtagtcccagctacttgggaggctaagtcaggagaattgcttgaacttgggagatggaggttgcagtgagccaagattgcaccactgcattccaacctgggtgatgaagtgagactctccaaaaaaaaaaaagaaattattaatccctgcctgtgctctacatagcctcatgggcatcattggatagctcagagggcccttgattctggcaaggcaaataaagccagaatgagaaattaccatcttctactagagaaaaccaagagaaaaatttttatgctaggatgcctttatgaccacttaattttttaatcttagtttaatggtctctccctggtgctaactgctgacagtggccacctcttttttggggattgaggggcctacataactagctggccttaccccatatcttttgttcaaacataataccatctttttgcttcttctgaactttagatctccataacacatgtactgtagaatgtgatggaaaagcattgatgagaatttattggcagttcagattgtgttttcccaacttaggctctttattaattggttaaggttttctccaaaaagggcatttcaacaatgggaattatttaatgtaacagtgggcacagattacttatcttccttctctgctttgtgactcaccagcagtaacacacacaatccacatcttgtgcacctcaaatgaacagacttggtttccttgctttcttgacatttccatgactgtttcacatacaaactattgggtgaggtttttcagctgttaccgacccacgtcctgctgtctctgtgtggtcctacaaaaactgtccattcccacccctttgctttgccatttgcaagagtctggaattgtcaggtctcagcttcgaaaagtcctggttccactgacaggacacattctttagtgggaattaagacctacaaagtctagtttgtatgtaggtatgaagggaattttttaaataaattgaaaagctgtgaacagcattagaactttgtctatttcttaattttaaaatatgctgatatgccttaaactgtagttgtagatccttgtcattttgctgtttgaaaataaccaatgtgttttctaaaactgtcgtgtaatctactttcattgttaatgcagaattgtcatatatgtaagctgcatgttagacatttgtcttttttaaactaaagtaattgtattgatgtgaagcatatcattttttcaaatatgaaagtgatcacttagcaacatgcttggtaatttggcatctgttaaggtaggagagtggtgaacagataatctatgcatatatcactagtgccaagacataaagcgggggaaaatatatttttacccaaacatt

SEQ ID NO: 4687 - protein, 154 aa, Homo sapiens [sequence omitted]

SEQ ID NO: 4688 - DNA, 5705 bp, Homo sapiens
cacaaattcaagagtaagatcatgagtgaactggtcagcaatggggtccagatatatcagtttcccactgatgaagaaacggtggcagagattaacttcgagagatgctgatccgcgtgaacatggaggacttgcgagagcagactcacacccgccactatgaattgtaccgacgctgtaagcttgaagagatggggttcaaggacactgaccctgacagcaaacccttcagtcttcaggagacatatgaagcaaaaaggaatgaattcctgggagaactgcagaagaaagaagaagaaatgagacaaatgtttgttatgagagtgaaggagaaagaagctgaacttaaggaggcagagaaagagcttcacgagaagtttgaccttctaaagcggacacaccaagaagaaaagaagaaagtggaagacaagaagaaggagcttgaggaggaggtgaacaacttccagaagaagaaagcagcggctcagttactacagtcccaggcccagcaatctggggcccagcaaaccaagaaagacaaggataagaaaaatgcaagcttcacataaagcctggcaagccaaggatgttcccgcattcacctgcttttgcagtaatatcgtatctctgccatgtgtgttctttagttttattttattttattttatttttttacccttcctcaaacaccagtaactattattaactcgttttgctgaatgttgttgggtggtagaaaatgatagaacaagggaataaccgcgaatgctctgtgcagctggactctgtttccggaaagtaaatgatttgctttttatgcctgttctgaatggcagcacgaagcaggcctgttacttgtatgtcgctttggacagaggaaagtggggtaaaatgctacctgtacgtctgacatgaaaacttctcaccgcctcagcagctgaactaaaaacctgaatagccatgacaagagtttgcattttcttgatgattcatctccatgagtgcacaatccctgaactcactgtcttttctccacacttgtcctaagccaaggtagatttgtacgtagacagactggtgagcaagcattatattttatttttacccttgcatgacattttcattttaatcaataacattatttggcctgagcttgtgggtctgttcagactgtctcctctcatggtttgaaactgcatctgaatgcctgccttcaatcctggccaagttggagtagactggtatgagaaaactatgattagttcacatttactggtgcatccttgatcctctcacagatagaggtcttaaaggttggatcatgtaacattgcttagtagaagaatcttcttctaaggatgatgggctttctacagcctgcttaccactaacagtaaggaatctttcataaacacacctcagtttgttcccagtgggcttagagggaggacctgatgactgattccaggatacttgtacttctaataacatttttcatgaatcatgagaaaatttccacagatacttcccttagaaaatttgctataaactctgtatcattggtagcacaaatttgagcgaggccttgtcaattttaaggtggaaataggaaggaccacaacatgacccgtaagtcaagaaggtagacatttcatatccagcttccttgcttagtctcctttcagtatttggcaataaaagaaagaagaaatagaacagctgaagtctcaaatcattgtctggaattttcctcaccttggctagctccacctgctctttgtctaaggcccttgcctcatcagggattagaactggcccatatgccagaacctgtactaaatgcctaatttgtatggaagagtgcatatttaatctcttttctatactgctcctttctgatgcttatcctttcatctgtgtgattgttttttcccctctactaacaagatcctcccagctttctctctacatgtagaaaggataacatttctcatgaacccactgcccctctgcattttcctcactggttagagattaagtaaataggatagaatatgctgcgtctcccctgacacacactttcttttttgaatgagcaagtctccattttgatttcagcaaagattttttctccttttctttgtcctcaaccatacttagaggaaagaaggaatggtcttccatgaactgattatgcttaattaagcaaagtaaggaaattagtttcatggaagcctaaacaaagctggaatagaaactacacactagacacagcagtagtcatagtcttcacaggtttaggagctactggaccaacattcttgtttttgcttttgtttttttaaataattctagtctggagctaactgtggagcagccaaatagtagctggcatgttgattcaaaccatgggctgaatttgctcataggctgtgcatcagacaaaagcttgaatatttgtgttgtatgcttgttccaaccaccgcttgtgtgagcatttttgtggcttgtacagaaagtacacttttaaattgtctcttgcatcactaaaatttttttaaaatgagcataacaacgaaaggcatccagctgactttttgattccaagattattgattggattgacttttttgcattaaatttttcccagcaaaataaatcatatggcgagtcagggaataaaaagtcaaaagaaacaaatagaagcttttttttttaaaaaatgtattgcttctgaacttttttctgccactgctccctagccctgtttagtttgttattgctgcttttcttttttctttctgtatctatgcctttttttcacagtagtccttggctctgcacggaataaatgataccctcaaatctaattggatgtgctttcgcctttgcatgtaagtacggtagtaagaaacctttgagatctttctgacttttcaaaattagagaaagcaaatgggatggatagattttttttttcttttcaaggggggcaggaaggtaatggtttgagtagcctttgtttaaaaaaaagactaaatatatttaaaaggccacatttatatttttttcacaagaaccacataataaattccacttcttgacctgaatttggaaatccgaaattactaatccaggccaggtgtggtggctcatgcctgtaatcccagcactttgagaggccgaggtgggcagatcacttgaggcctggagttcaagaccaccttggcgaacacggtgaaaccccgtctctacaaaaaatacaaaaattagccaggcgtggtggcacgtgcctgtagtcccagctacttgggaggctaagtcaggagaattgcttgaacttgggagatggaggttgcagtgagccaagattgcaccactgcattccaacctgggtgatgaagtgagactctccaaaaaaaaaaaagaaattattaatccctgcctgtgctctacatagcctcatgggcatcattggatagctcagagggcccttgattctggcaaggcaaataaagccagaatgagaaattaccatcttctactagagaaaaccaagagaaaaatttttatgctaggatgcctttatgaccacttaattttttaatcttagtttaatggtctctccctggtgctaactgctgacagtggccacctcttttttggggattgaggggcctacataactagctggccttaccccatatcttttgttcaaacataataccatctttttgcttcttctgaactttagatctccataacacatgtactgtagaatgtgatggaaaagcattgatgagaatttattggcagttcagattgtgttttcccaacttaggctctttattaattggttaaggttttctccaaaaagggcatttcaacaatgggaattatttaatgtaacagtgggcacagattacttatcttccttctctgctttgtgactcaccagcagtaacacacacaatccacatcttgtgcacctcaaatgaacagacttggtttccttgctttcttgacatttccatgactgtttcacatacaaactattgggtgaggtttttcagctgttaccgacccacgtcctgctgtctctgtgtggtcctacaaaaactgtccattcccacccctttgctttgccatttgcaagagtctggaattgtcaggtctcagcttcgaaaagtcctggttccactgacaggacacattctttagtgggaattaagacctacaaagtctagtttgtatgtaggtatgaagggaattttttaaataaattgaaaagctgtgaacagcattagaactttgtctatttcttaattttaaaatatgctgatatgccttaaactgtagttgtagatccttgtcattttgctgtttgaaaataaccaatgtgttttctaaaactgtcgtgtaatctactttcattgttaatgcagaattgtcatatatgtaagctgcatgttagacatttgtcttttttaaactaaagtaattgtattgatgtgaagcatatcattttttcaaatatgaaagtgatcacttagcaacatgcttggtaatttggcatctgttaaggtaggagagtggtgaacagataatctatgcatatatcactagtgccaagacataaagcgggggaaaatatatttttacccaaacattatttgtgtgcccttttttgtgagttctttttagtcactgcttggtttgcatatgtacacgtgcttactggataaaagaaatagggataagagtctcatgctttcctgcctcgtgtggtagacttcaaatggctgccgtctgggttacaccagtttctcaaagatacgtgccatgtggtgtcctgtacttcacatatcatgttatcaccctttttcccccatgcctgtccctgtccaccctgccaattcatgtgccttggtgcccagctgaggcatcgtcttcttcactggcctcctcttccctgctgctgctcaccctcccgtcgagctcgaggaagtcaccccattaactgacacactgctgttctttcacagcttgttgtagagaagctccttttcttttcttaagccattaagaatcaaatttgaatctgaacctttcttttttctcttctgtagcttcttctttatgtaaccatcctgttgacaagccctactctctcctaatggacatagagcattagaagagcaggagctgtctgttcacacgtgttggggaagagttacctcatttccaccatcgcctcctgttcttttaaagtctgggtcaaatattgcactgctgtttgtacttgtcaatgtctgcccatagtggatactgaagtgacttaccactaccaaaaatagtcatattcaataatattaattaaaaaggaaaaaggaaattgactgaaacagaaaacgtgggccaagacccaaggtcttgtgctgggatccccttgcttagaactatcatgttcttgaagctgctgatccaagaactgatggactgaagacagcgtgtaccctaacctgagggggccaccacacccagggcccacaaacttgatctcatggtaactcctgtcctttctgtcccatgagccacattctgaacagcctgatcaggatcctcaaccgtcaggtcataagatccgagcaacattttccttccttttgttagttttatgggttgttttggtgtttggggttttt

SEQ ID NO: 4689 - protein, 154 aa, Homo sapiens [sequence omitted]

SEQ ID NO: 4690 - DNA, 394 bp, Homo sapiens
gccaccaacggtatttctatgatctacctactatggagctgaaaagtaaagatggaaataagcctatctacaaacaggatgctctctatcaagagtcatgagaattgtcttcagagggtgctgaagagacatcaacctgtcttctttgagactcctagtgttggtgtggaagatgctactggagacaacaggttcctccaggcctgattgcttggtcaattgtgttctcccaggaattcattcctttttgcttcatatgtctcctgaagactattgaaaatccacaaacgaaggacagcatcatgaaattgtatactaagaaatttcagttcacataatttctacctatctactttcaaaacatagataaagctgctgcttgccagatcaaagc

SEQ ID NO: 4691 - protein, 51 aa, Homo sapiens [sequence omitted]

SEQ ID NO: 4692 - DNA, 1194 bp, Homo sapiens
gcggacacaccaagaagaaaagaagaaagtgaaagacaaggataagaaaaatgcaagcttcacataaagcctggcaagccaaggatgttcccgcattcacctgcttttgcagtaatatcgtatctctgccatgtgtgttctttagttttattttattttattttatttttttacccttcctcaaacaccagtaactattattaactcgttttgctgaatgttgttgggtggtagaaaatgatagaacaagggaataaccgcgaatgctctgtgcagctggactctgtttccggaaagtaaatgatttgctttttatgcctgttctgaatggcagcacgaagcaggcctgttacttgtatgtcgctttggacagaggaaagtggggtaaaatgctacctgtacgtctgacatgaaaacttctcaccgcctcagcagctgaactaaaaacctgaatagccatgacaagagtttgcattttcttgatgattcatctccatgagtgcacaatccctgaactcactgtcttttctccacacttgtcctaagccaaggtagatttgtacgtagacagactggtgagcaagcattatattttatttttacccttgcatgacattttcattttaatcaataacattatttggcctgagcttgtgggtctgttcagactgtctcctctcatggtttgaaactgcatctgaatgcctgccttcaatcctggccaagttggagtagactggtatgagaaaactatgattagttcacatttactggtgcatccttgatcctctcacagatagaggtcttaaaggttggatcatgtaacattgcttagtagaagaatcttcttctaaggatgatgggctttctacagcctgcttaccactaacagtaaggaatctttcataaacacacctcagtttgttcccagtgggcttagagggaggacctgatgactgattccaggatacttgtacttctaataacatttttcatgaatcatgagaaaatttccacagatacttcccttagaaaatttgctataaactctgtatcattggtagcacaaatttgagcgaggccttgtcaattttaaggtggaaataggaaggaccacaacatgacccgtaagtcaagaaggtagacatttcatatccagcttccttgcttagtctcctttcagtatttggcaat

SEQ ID NO: 4693 - protein, 47 aa, Homo sapiens
MQASHKAWQAKDVPAFTCFCSNIVSLPCVFFSFILFYFIFLPFLKHQ

SEQ ID NO: 4694 - DNA, 4169 bp, Homo sapiens
gcggacacaccaagaagaaaagaagaaagtgaaagacaaggataagaaaaatgcaagcttcacataaagcctggcaagccaaggatgttcccgcattcacctgcttttgcagtaatatcgtatctctgccatgtgtgttctttagttttattttattttattttatttttttacccttcctcaaacaccagtaactattattaactcgttttgctgaatgttgttgggtggtagaaaatgatagaacaagggaataaccgcgaatgctctgtgcagctggactctgtttccggaaagtaaatgatttgctttttatgcctgttctgaatggcagcacgaagcaggcctgttacttgtatgtcgctttggacagaggaaagtggggtaaaatgctacctgtacgtctgacatgaaaacttctcaccgcctcagcagctgaactaaaaacctgaatagccatgacaagagtttgcattttcttgatgattcatctccatgagtgcacaatccctgaactcactgtcttttctccacacttgtcctaagccaaggtagatttgtacgtagacagactggtgagcaagcattatattttatttttacccttgcatgacattttcattttaatcaataacattatttggcctgagcttgtgggtctgttcagactgtctcctctcatggtttgaaactgcatctgaatgcctgccttcaatcctggccaagttggagtagactggtatgagaaaactatgattagttcacatttactggtgcatccttgatcctctcacagatagaggtcttaaaggttggatcatgtaacattgcttagtagaagaatcttcttctaaggatgatgggctttctacagcctgcttaccactaacagtaaggaatctttcataaacacacctcagtttgttcccagtgggcttagagggaggacctgatgactgattccaggatacttgtacttctaataacatttttcatgaatcatgagaaaatttccacagatacttcccttagaaaatttgctataaactctgtatcattggtagcacaaatttgagcgaggccttgtcaattttaaggtggaaataggaaggaccacaacatgacccgtaagtcaagaaggtagacatttcatatccagcttccttgcttagtctcctttcagtatttggcaataaaagaaagaagaaatagaacagctgaagtctcaaatcattgtctggaattttcctcaccttggctagctccacctgctctttgtctaaggcccttgcctcatcagggattagaactggcccatatgccagaacctgtactaaatgcctaatttgtatggaagagtgcatatttaatctcttttctatactgctcctttctgatgcttatcctttcatctgtgtgattgttttttcccctctactaacaagatcctcccagctttctctctacatgtagaaaggataacatttctcatgaacccactgcccctctgcattttcctcactggttagagattaagtaaataggatagaatatgctgcgtctcccctgacacacactttcttttttgaatgagcaagtctccattttgatttcagcaaagattttttctccttttctttgtcctcaaccatacttagaggaaagaaggaatggtcttccatgaactgattatgcttaattaagcaaagtaaggaaattagtttcatggaagcctaaacaaagctggaatagaaactacacactagacacagcagtagtcatagtcttcacaggtttaggagctactggaccaacattcttgtttttgcttttgtttttttaaataattctagtctggagctaactgtggagcagccaaatagtagctggcatgttgattcaaaccatgggctgaatttgctcataggctgtgcatcagacaaaagcttgaatatttgtgttgtatgcttgttccaaccaccgcttgtgtgagcatttttgtggcttgtacagaaagtacacttttaaattgtctcttgcatcactaaaatttttttaaaatgagcataacaacgaaaggcatccagctgactttttgattccaagattattgattggattgacttttttgcattaaatttttcccagcaaaataaatcatatggcgagtcagggaataaaaagtcaaaagaaacaaatagaagcttttttttttaaaaaatgtattgcttctgaacttttttctgccactgctccctagccctgtttagtttgttattgctgcttttcttttttctttctgtatctatgcctttttttcacagtagtccttggctctgcacggaataaatgataccctcaaatctaattggatgtgctttcgcctttgcatgtaagtacggtagtaagaaacctttgagatctttctgacttttcaaaattagagaaagcaaatgggatggatagattttttttttcttttcaaggggggcaggaaggtaatggtttgagtagcctttgtttaaaaaaaagactaaatatatttaaaaggccacatttatatttttttcacaagaaccacataataaattccacttcttgacctgaatttggaaatccgaaattactaatccaggccaggtgtggtggctcatgcctgtaatcccagcactttgagaggccgaggtgggcagatcacttgaggcctggagttcaagaccaccttggcgaacacggtgaaaccccgtctctacaaaaaatacaaaaattagccaggcgtggtggcacgtgcctgtagtcccagctacttgggaggctaagtcaggagaattgcttgaacttgggagatggaggttgcagtgagccaagattgcaccactgcattccaacctgggtgatgaagtgagactctccaaaaaaaaaaaagaaattattaatccctgcctgtgctctacatagcctcatgggcatcattggatagctcagagggcccttgattctggcaaggcaaataaagccagaatgagaaattaccatcttctactagagaaaaccaagagaaaaatttttatgctaggatgcctttatgaccacttaattttttaatcttagtttaatggtctctccctggtgctaactgctgacagtggccacctcttttttggggattgaggggcctacataactagctggccttaccccatatcttttgttcaaacataataccatctttttgcttcttctgaactttagatctccataacacatgtactgtagaatgtgatggaaaagcattgatgagaatttattggcagttcagattgtgttttcccaacttaggctctttattaattggttaaggttttctccaaaaagggcatttcaacaatgggaattatttaatgtaacagtgggcacagattacttatcttccttctctgctttgtgactcaccagcagtaacacacacaatccacatcttgtgcacctcaaatgaacagacttggtttccttgctttcttgacatttccatgactgtttcacatacaaactattgggtgaggtttttcagctgttaccgacccacgtcctgctgtctctgtgtggtcctacaaaaactgtccattcccacccctttgctttgccatttgcaagagtctggaattgtcaggtctcagcttcgaaaagtcctggttccactgacaggacacattctttagtgggaattaagacctacaaagtctagtttgtatgtaggtatgaagggaattttttaaataaattgaaaagctgtgaacagcattagaactttgtctatttcttaattttaaaatatgctgatatgccttaaactgtagttgtagatccttgtcattttgctgtttgaaaataaccaatgtgttttctaaaactgtcgtgtaatctactttcattgttaatgcagaattgtcatatatgtaagctgcatgttagacatttgtcttttttaaactaaagtaattgtattgatgtgaagcatatcattttttcaaatatgaaagtgatcacttagcaacatgcttggtaatttggcatctgttaaggtaggagagtggtgaacagataatctatgcatatatcactagtgccaagacataaagcgggggaaaatatatttttacccaaacatt

SEQ ID NO: 4695 - protein, 47 aa, Homo sapiens; identical to SEQ ID NO: 4693

SEQ ID NO: 4696 - DNA, 5203 bp, Homo sapiens
gcggacacaccaagaagaaaagaagaaagtgaaagacaaggataagaaaaatgcaagcttcacataaagcctggcaagccaaggatgttcccgcattcacctgcttttgcagtaatatcgtatctctgccatgtgtgttctttagttttattttattttattttatttttttacccttcctcaaacaccagtaactattattaactcgttttgctgaatgttgttgggtggtagaaaatgatagaacaagggaataaccgcgaatgctctgtgcagctggactctgtttccggaaagtaaatgatttgctttttatgcctgttctgaatggcagcacgaagcaggcctgttacttgtatgtcgctttggacagaggaaagtggggtaaaatgctacctgtacgtctgacatgaaaacttctcaccgcctcagcagctgaactaaaaacctgaatagccatgacaagagtttgcattttcttgatgattcatctccatgagtgcacaatccctgaactcactgtcttttctccacacttgtcctaagccaaggtagatttgtacgtagacagactggtgagcaagcattatattttatttttacccttgcatgacattttcattttaatcaataacattatttggcctgagcttgtgggtctgttcagactgtctcctctcatggtttgaaactgcatctgaatgcctgccttcaatcctggccaagttggagtagactggtatgagaaaactatgattagttcacatttactggtgcatccttgatcctctcacagatagaggtcttaaaggttggatcatgtaacattgcttagtagaagaatcttcttctaaggatgatgggctttctacagcctgcttaccactaacagtaaggaatctttcataaacacacctcagtttgttcccagtgggcttagagggaggacctgatgactgattccaggatacttgtacttctaataacatttttcatgaatcatgagaaaatttccacagatacttcccttagaaaatttgctataaactctgtatcattggtagcacaaatttgagcgaggccttgtcaattttaaggtggaaataggaaggaccacaacatgacccgtaagtcaagaaggtagacatttcatatccagcttccttgcttagtctcctttcagtatttggcaataaaagaaagaagaaatagaacagctgaagtctcaaatcattgtctggaattttcctcaccttggctagctccacctgctctttgtctaaggcccttgcctcatcagggattagaactggcccatatgccagaacctgtactaaatgcctaatttgtatggaagagtgcatatttaatctcttttctatactgctcctttctgatgcttatcctttcatctgtgtgattgttttttcccctctactaacaagatcctcccagctttctctctacatgtagaaaggataacatttctcatgaacccactgcccctctgcattttcctcactggttagagattaagtaaataggatagaatatgctgcgtctcccctgacacacactttcttttttgaatgagcaagtctccattttgatttcagcaaagattttttctccttttctttgtcctcaaccatacttagaggaaagaaggaatggtcttccatgaactgattatgcttaattaagcaaagtaaggaaattagtttcatggaagcctaaacaaagctggaatagaaactacacactagacacagcagtagtcatagtcttcacaggtttaggagctactggaccaacattcttgtttttgcttttgtttttttaaataattctagtctggagctaactgtggagcagccaaatagtagctggcatgttgattcaaaccatgggctgaatttgctcataggctgtgcatcagacaaaagcttgaatatttgtgttgtatgcttgttccaaccaccgcttgtgtgagcatttttgtggcttgtacagaaagtacacttttaaattgtctcttgcatcactaaaatttttttaaaatgagcataacaacgaaaggcatccagctgactttttgattccaagattattgattggattgacttttttgcattaaatttttcccagcaaaataaatcatatggcgagtcagggaataaaaagtcaaaagaaacaaatagaagcttttttttttaaaaaatgtattgcttctgaacttttttctgccactgctccctagccctgtttagtttgttattgctgcttttcttttttctttctgtatctatgcctttttttcacagtagtccttggctctgcacggaataaatgataccctcaaatctaattggatgtgctttcgcctttgcatgtaagtacggtagtaagaaacctttgagatctttctgacttttcaaaattagagaaagcaaatgggatggatagattttttttttcttttcaaggggggcaggaaggtaatggtttgagtagcctttgtttaaaaaaaagactaaatatatttaaaaggccacatttatatttttttcacaagaaccacataataaattccacttcttgacctgaatttggaaatccgaaattactaatccaggccaggtgtggtggctcatgcctgtaatcccagcactttgagaggccgaggtgggcagatcacttgaggcctggagttcaagaccaccttggcgaacacggtgaaaccccgtctctacaaaaaatacaaaaattagccaggcgtggtggcacgtgcctgtagtcccagctacttgggaggctaagtcaggagaattgcttgaacttgggagatggaggttgcagtgagccaagattgcaccactgcattccaacctgggtgatgaagtgagactctccaaaaaaaaaaaagaaattattaatccctgcctgtgctctacatagcctcatgggcatcattggatagctcagagggcccttgattctggcaaggcaaataaagccagaatgagaaattaccatcttctactagagaaaaccaagagaaaaatttttatgctaggatgcctttatgaccacttaattttttaatcttagtttaatggtctctccctggtgctaactgctgacagtggccacctcttttttggggattgaggggcctacataactagctggccttaccccatatcttttgttcaaacataataccatctttttgcttcttctgaactttagatctccataacacatgtactgtagaatgtgatggaaaagcattgatgagaatttattggcagttcagattgtgttttcccaacttaggctctttattaattggttaaggttttctccaaaaagggcatttcaacaatgggaattatttaatgtaacagtgggcacagattacttatcttccttctctgctttgtgactcaccagcagtaacacacacaatccacatcttgtgcacctcaaatgaacagacttggtttccttgctttcttgacatttccatgactgtttcacatacaaactattgggtgaggtttttcagctgttaccgacccacgtcctgctgtctctgtgtggtcctacaaaaactgtccattcccacccctttgctttgccatttgcaagagtctggaattgtcaggtctcagcttcgaaaagtcctggttccactgacaggacacattctttagtgggaattaagacctacaaagtctagtttgtatgtaggtatgaagggaattttttaaataaattgaaaagctgtgaacagcattagaactttgtctatttcttaattttaaaatatgctgatatgccttaaactgtagttgtagatccttgtcattttgctgtttgaaaataaccaatgtgttttctaaaactgtcgtgtaatctactttcattgttaatgcagaattgtcatatatgtaagctgcatgttagacatttgtcttttttaaactaaagtaattgtattgatgtgaagcatatcattttttcaaatatgaaagtgatcacttagcaacatgcttggtaatttggcatctgttaaggtaggagagtggtgaacagataatctatgcatatatcactagtgccaagacataaagcgggggaaaatatatttttacccaaacattatttgtgtgcccttttttgtgagttctttttagtcactgcttggtttgcatatgtacacgtgcttactggataaaagaaatagggataagagtctcatgctttcctgcctcgtgtggtagacttcaaatggctgccgtctgggttacaccagtttctcaaagatacgtgccatgtggtgtcctgtacttcacatatcatgttatcaccctttttcccccatgcctgtccctgtccaccctgccaattcatgtgccttggtgcccagctgaggcatcgtcttcttcactggcctcctcttccctgctgctgctcaccctcccgtcgagctcgaggaagtcaccccattaactgacacactgctgttctttcacagcttgttgtagagaagctccttttcttttcttaagccattaagaatcaaatttgaatctgaacctttcttttttctcttctgtagcttcttctttatgtaaccatcctgttgacaagccctactctctcctaatggacatagagcattagaagagcaggagctgtctgttcacacgtgttggggaagagttacctcatttccaccatcgcctcctgttcttttaaagtctgggtcaaatattgcactgctgtttgtacttgtcaatgtctgcccatagtggatactgaagtgacttaccactaccaaaaatagtcatattcaataatattaattaaaaaggaaaaaggaaattgactgaaacagaaaacgtgggccaagacccaaggtcttgtgctgggatccccttgcttagaactatcatgttcttgaagctgctgatccaagaactgatggactgaagacagcgtgtaccctaacctgagggggccaccacacccagggcccacaaacttgatctcatggtaactcctgtcctttctgtcccatgagccacattctgaacagcctgatcaggatcctcaaccgtcaggtcataagatccgagcaacattttccttccttttgttagttttatgggttgttttggtgtttggggttttt

SEQ ID NO: 4697 - protein, 47 aa, Homo sapiens; identical to SEQ ID NO: 4693

SEQ ID NO: 4698 - DNA, 1041 bp, Homo sapiens
cacaattgttaaaattattttcctattctgtgttgtaagacttcgtaagccagtcactgaaattctcgttcccaaaatgaaacatttggaagagctgctagtggccactagtttcctcaaaattcaatatgatgaattgttttattgtgaaatgggatccaaatgcctatccagttgacacctctgccaacctcaagccaaacctaaacccattcataaaaggttttttttaaatagggtcttaatgtcatgtgccaaagggtcagattctgctcttgagttggtcacttcctgtgatactccagtagcagctgcctgaaaccagtgggagatttaggcctcccttgacattctcctgtgatttgaagctctcctttgaatcatcataaagcctagttttatgtcaatgctatcggttttgacaggaagcacgatggtaagaataccactaacgaaaacctttgtggtgtctcaatgacaaatatgcagatgccaccctcctttgtctaatgtacggtgctttagggcagctatttaatataaagcaactcagaacttgtttcaggaagtgttgctctttcgccttacatgccaaggttctagggaaaaagctgaccatatgtaaaaacattgatgctcaagcacataaagaattacattctttaaacatagagtacataggatcaagtctctgcacaataattgagatgtgttatagggaaaagtgagcacagtgctattgtccacttagtcttggtgaatgtgcagtaggctcacccctaaggaatctcatgttgcctgcagtaaaaataaaaatggactgctacaatgacatactgagagagttttaaatcatgctttacaaactgacattttacagcttaggaaatgcaaagtcaagtttttcttttcaccctgaggcactcagtgcataaaggttcaagttttaaaactaagaatgtttccaaaagaccagcaatgttaaaagagtatttcgtgtatactagacgtgcctttaagcaataaaaattccaagagctg

SEQ ID NO: 4699 - protein, 72 aa, Homo sapiens [sequence omitted]

SEQ ID NO: 4700 - DNA, 1067 bp, Homo sapiens
ggttttaatttctgtcaattccataatcattgcatgagcattcaccatcactgaatgctggtgctgtcgctcctaattttcctttctttttaatttattattatttctaacttttttgttttgttttttaacttgcagtgcaagcttcacataaagcctggcaagccaaggatgttcccgcattcacctgcttttgcagtaatatcgtatctctgccatgtgtgttctttagttttattttattttattttatttttttacccttcctcaaacaccagtaactattattaactcgttttgctgaatgttgttgggtggtagaaaatgatagaacaagggaataaccgcgaatgctctgtgcagctggactctgtttccggaaagtaaatgatttgctttttatgcctgttctgaatggcagcacgaagcaggcctgttacttgtatgtcgctttggacagaggaaagtggggtaaaatgctacctgtacgtctgacatgaaaacttctcaccgcctcagcagctgaactaaaaacctgaatagccatgacaagagtttgcattttcttgatgattcatctccatgagtgcacaatccctgaactcactgtcttttctccacacttgtcctaagccaaggtagatttgtacgtagacagactgctgaccatctgcctcttgagagagagagaagtgggcatccttcctttaaattcaggaaccactgttgttttatttgactttttctgttacttgcatcccttatataagttgttttggatttgggactatgttttgggggagaaaaactccagttagttctgttttttgtattggttattcagcttacttttggtatcaaaattatgccagttttaagctcacttgagtgaagtttaagtcacaagattctgtttaacatgctttccttgttttggaaacaaccaaaaacttcccttttttgttacgggattttgacctacaaatcctaatcatgtttaaaatgtgccggtgttgggtagatgacttttctgcctctggggttcaatttatatttaaagatacctt

SEQ ID NO: 4701 - protein, 49 aa, Homo sapiens [sequence omitted]

SEQ ID NO: 4702 - DNA, 1609 bp, Homo sapiens
ggcaataaaagaaagaagaaatagaacagctgaagtctcaaatcattgtctggaattttcctcaccttggctagctccacctgctctttgtctaaggcccttgcctcatcagggattagaactggcccatatgccagaacctgtactaaatgcctaatttgtatggaagagtgcatatttaatctcttttctatactgctcctttctgatgcttatcctttcatctgtgtgattgttttttcccctctactaacaagatcctcccagctttctctctacatgtagaaaggataacatttctcatgaacccactgcccctctgcattttcctcactggttagagattaagtaaataggatagaatatgctgcgtctcccctgacacacactttcttttttgaatgagcaagtctccattttgatttcagcaaagattttttctccttttctttgtcctcaaccatacttagaggaaagaaggaatggtcttccatgaactgattatgcttaattaagcaaagtaaggaaattagtttcatggaagcctaaacaaagctggaatagaaactacacactagacacagcagtagtcatagtcttcacaggtttaggagctactggaccaacattcttgtttttgcttttgtttttttaaataattctagtctggagctaactgtggagcagccaaatagtagctggcatgttgattcaaaccatgggctgaatttgctcataggctgtgcatcagacaaaagcttgaatatttgtgttgtatgcttgttccaaccaccgcttgtgtgagcatttttgtggcttgtacagaaagtacacttttaaattgtctcttgcatcactaaaatttttttaaaatgagcataacaacgaaaggcatccagctgactttttgattccaagattattgattggattgacttttttgcattaaatttttcccagcaaaataaatcatatggcgagtcagggaataaaaagtcaaaagaaacaaatagaagcttttttttttaaaaaatgtattgcttctgaacttttttctgccactgctccctagccctgtttagtttgttattgctgcttttcttttttctttctgtatctatgcctttttttcacagtagtccttggctctgcacggaataaatgataccctcaaatctaattggatgtgctttcgcctttgcatctgaccatctgcctcttgagagagagagaagtgggcatccttcctttaaattcaggaaccactgttgttttatttgactttttctgttacttgcatcccttatataagttgttttggatttgggactatgttttgggggagaaaaactccagttagttctgttttttgtattggttattcagcttacttttggtatcaaaattatgccagttttaagctcacttgagtgaagtttaagtcacaagattctgtttaacatgctttccttgttttggaaacaaccaaaaacttcccttttttgttacgggattttgacctacaaatcctaatcatgtttaaaatgtgccggtgttgggtagatgacttttctgcctctggggttcaatttatatttaaagatacctt

SEQ ID NO: 4703 - protein, 39 aa, Homo sapiens
MIPSNLIGCAFAFASDHLPLERERSGHPSFKFRNHCCFI

SEQ ID NO: 4704 - DNA, 675 bp, Homo sapiens
aggtacaggttcctgattggctaggcactgctatttcaactagagaaaacaatagaaagaccaagaatacacttactgaaaataaaacatgaagaggatctgaatgtgatcgagggatataggttttagacataagaatttttctttcgtgatattttttcactggtgcacttcatctgaattgtaggagctctaagaagtttacaactgcatatgttcatagtatctgtaaaatgatacagatactatgaaacttcctcctatttaacagatgaggacatagttgtgttatgtagacagctagggataaaactgagtttagagtcagtatttcatttgtagtccagtagctgcaaattgagcagaatgttagaggacaataggattttcacttttcagtcttaaggttttcaacatttacaaattgctggtaagttagtttggaacacagcattcttctcatgggacaccgaatcaagtgggatagtgggctgctagccctcatgcctcagagcttatttaacccatcgttcagttcagtgatagttttggagacctggccctcaaaagcactgttaaaccttggccaccatttcagaggactgagcccacttcctcacaacttactgtgggcccttagagaactgtggcttgtgacagaaagagcctagtatt

SEQ ID NO: 4705 - protein, 69 aa, Homo sapiens
MGHRIKWDSGLLALMPQSLFNPSFSSVIVLETWPSKALLNLGHHFRGLSPLPHNLLWALRELWLVTERA

SEQ ID NO: 4706 - DNA, 1478 bp, Homo sapiens
cagatggatagctcccagttgatccattgtcgggagcttgtggcacatcacctttctactttgcagcctgtttctgtcatgtagtttcaacaagtgctacctttgagtgtaaactaaggtagactactttgggaatgagaacatgcaaaatcaggaaaggctgtagaaggaaatataccttaacaggctgatttggagtgagccagaaaaaaaaaataaaactctcattatttgtgtggctaattataattcagcgttatttaagcacataaagaccaaaaaaaaaaaaaagaaatccaaaagatccaaactttttttaaacttaaaaaatctctttgtagtatgtcagttgcactttttttctgccataatgtaacgtagcttgccccgtcaaaaattcaattaaaattcatggccagcaatcctgttccccctcagcatcctgatttaattttcctgttgcttttgcttgcttctccatttaatagttactgaactttatgcatgttgatctatattgattttcactgcagttgaatgaacaaattatttcagtgtgacagccatgactcaagttccaattagtctgaaaagggtactttggaattgtcccatattaatcagagatggcaaaagaaaaagttctcatattaccaggttgattttgtgtctcatttcaaattttaatttaaaattatggttttcatttttgtttaccttaaagtgatgcttaaaagtggcatgtaattaggacacttaggtttgttgaaagcattttcgacatttgtataaaagaatttgtgataaatatatccaggtgctcaccaaagaaacatgtattaacaacttaaattagatttttctaactgatagttttcactcatttataatcagtaggagagactgtctagatgttggggcagctctatgatttaagtctgtaacatgttataactgaatttagtaccctagttttgttaagctattaggattttctaatagaacttactccccctgcctccccagccttatgtttcttttaatgacttctggatcctgagctccctttgcagtctgaaaaaggtattgcagtcagaactgtgtactgatgataaaagcctctggtagcaataaaaagttgtccttaacttttgtttttgtgacttttttctggttgtgaagaggtacaggttcctgattggctaggcactgctatttcaactagagaaaacaatagaaagaccaagaatacacttactgaaaataaaacatgaagaggatctgaatgtgatcgagggatataggttttagacataagaatttttctttcgtgatattttttcactggtgcactgtgaatcctccaaatagtaaatttacatcttaatgtgactgcttgtgagagtaggctcagacccctatctttaaaatgtcatttttagccattttgtaatgttcagatttagcagaacaagagt

SEQ ID NO: 4707 - protein, 53 aa, Homo sapiens
MTQVPISLKRVLWNCPILIRDGKRKSSHITRLILCLISNFNLKLWFSFLFTLK

SEQ ID NO: 4708 - DNA, 1697 bp, Homo sapiens
aaaaaaaaaaaacagacgttggatacaaaaaagtagtttctgttctcatgtaaatgttcagcatacattgcaaatacaaaactcaagttccaaagataattatattagaaatacagatttggacctaatttctaagatgatgttgatggatgggtagctggataaataaatgagttggaggtagatgtggggagagaaaagactcagcggggacggaaagcacagggaggaaaaatggccaccagagataacagagcagcctatgttaattaatgatcaactgtgtgtggctttttttttttcctggcccagatggatagctcccagttgatccattgtcgggagcttgtggcacatcacctttctactctgcagtcttccctgcctctgaattccgtttatgtctaccgtcccctcaagcacaccctggtgacctgtgacaaaggagtgttcagattacatccctcctctgtcccaggcccagacttctccaaggacaacagcaagccagaagtgccagtcagaggtacagcagccttttaccatcatctcccagctgccagtgggtgcaagcagacctctactaaacgcaaagtagaggaaatggaagtggatgacttctatgatggaatcaaacggctctataatgaagataatcatcctgatttaattttcctgttgcttttgcttgcttctccatttaatagttactgaactttatgcatgttgatctatattgattttcactgcagttgaatgaacaaattatttcagtgtgacagccatgactcaagttccaattagtctgaaaagggtactttggaattgtcccatattaatcagagatggcaaaagaaaaagttctcatattaccaggttgattttgtgtctcatttcaaattttaatttaaaattatggttttcatttttgtttaccttaaagtgatgcttaaaagtggcatgtaattaggacacttaggtttgttgaaagcattttcgacatttgtataaaagaatttgtgataaatatatccaggtgctcaccaaagaaacatgtattaacaacttaaattagatttttctaactgatagttttcactcatttataatcagtaggagagactgtctagatgttggggcagctctatgatttaagtctgtaacatgttataactgaatttagtaccctagttttgttaagctattaggattttctaatagaacttactccccctgcctccccagccttatgtttcttttaatgacttctggatcctgagctccctttgcagtctgaaaaaggtattgcagtcagaactgtgtactgatgataaaagcctctggtagcaataaaaagttgtccttaacttttgtttttgtgacttttttctggttgtgaagaggtacaggttcctgattggctaggcactgctatttcaactagagaaaacaatagaaagaccaagaatacacttactgaaaataaaacatgaagaggatctgaatgtgatcgagggatataggttttagacataagaatttttctttcgtgatattttttcactggtgcactgtgaatcctccaaatagtaaatttacatcttaatgtgactgcttgtgagagtaggctcagacccctatctttaaaatgtcatttttagccattttgtaatgttcagatttagcagaacaagagt

SEQ ID NO: 4709 - protein, 133 aa, Homo sapiens
MDSSQLIHCRELVAHHLSTLQSSLPLNSVYVYRPLKHTLVTCDKGVFRLHPSSVPGPDFSKDNSKPEVPVRGTAAFYHHLPAASGCKQTSTKRKVEEMEVDDFYDGIKRLYNEDNHPDLIFLLLLLASPFNSY

SEQ ID NO: 4710 - DNA, 2078 bp, Homo sapiens
gattttcagttccatgccattgcagtgtcaactaggcctcagttacttttcagtttgcccaaattgagcccatctcaacatttggcagtccttaccaagcaactacttcactgtatggcctgcaaccaacttctgcaattcagaggatccatgcttgctctggccatggttagtctggaaatggagaaactcattcctgattggctttctcttacaattgaactgcttcagaaagcacagatggatagctcccagttgatccattgtcgggagcttgtggcacatcacctttctactctgcagtcttccctgcctctgaattccgtttatgtctaccgtcccctcaagcacaccctggtgacctgtgacaaaggagtgttcagattacatccctcctctgtcccaggcccagacttctccaaggacaacagcaagccagaagtgccagtcagaggtacagcagccttttaccatcatctcccagctgccagtgggtgcaagcagacctctactaaacgcaaagtagaggaaatggaagtggatgacttctatgatggaatcaaacggctctataatgaagataatgtctcagaaaatgtgggttctgtgtgtggcactgatttatcaagacaagagggacatgcttccccttgtccacctttgcagcctgtttctgtcatgtagtttcaacaagtgctacctttgagtgtaaactaaggtagactactttgggaatgagaacatgcaaaatcaggaaaggctgtagaaggaaatataccttaacaggctgatttggagtgagccagaaaaaaaaaataaaactctcattatttgtgtggctaattataattcagcgttatttaagcacataaagaccaaaaaaaaaaaaaagaaatccaaaagatccaaactttttttaaacttaaaaaatctctttgtagtatgtcagttgcactttttttctgccataatgtaacgtagcttgccccgtcaaaaattcaattaaaattcatggccagcaatcctgttccccctcagcatcctgatttaattttcctgttgcttttgcttgcttctccatttaatagttactgaactttatgcatgttgatctatattgattttcactgcagttgaatgaacaaattatttcagtgtgacagccatgactcaagttccaattagtctgaaaagggtactttggaattgtcccatattaatcagagatggcaaaagaaaaagttctcatattaccaggttgattttgtgtctcatttcaaattttaatttaaaattatggttttcatttttgtttaccttaaagtgatgcttaaaagtggcatgtaattaggacacttaggtttgttgaaagcattttcgacatttgtataaaagaatttgtgataaatatatccaggtgctcaccaaagaaacatgtattaacaacttaaattagatttttctaactgatagttttcactcatttataatcagtaggagagactgtctagatgttggggcagctctatgatttaagtctgtaacatgttataactgaatttagtaccctagttttgttaagctattaggattttctaatagaacttactccccctgcctccccagccttatgtttcttttaatgacttctggatcctgagctccctttgcagtctgaaaaaggtattgcagtcagaactgtgtactgatgataaaagcctctggtagcaataaaaagttgtccttaacttttgtttttgtgacttttttctggttgtgaagaggtacaggttcctgattggctaggcactgctatttcaactagagaaaacaatagaaagaccaagaatacacttactgaaaataaaacatgaagaggatctgaatgtgatcgagggatataggttttagacataagaatttttctttcgtgatattttttcactggtgcactgtgaatcctccaaatagtaaatttacatcttaatgtgactgcttgtgagagtaggctcagacccctatctttaaaatgtcatttttagccattttgtaatgttcagatttagcagaacaagagt

SEQ ID NO: 4711 - protein, 189 aa, Homo sapiens
MACNQLLQFRGSMLALAMVSLEMEKLIPDWLSLTIELLQKAQMDSSQLIHCRELVAHHLSTLQSSLPLNSVYVYRPLKHTLVTCDKGVFRLHPSSVPGPDFSKDNSKPEVPVRGTAAFYHHLPAASGCKQTSTKRKVEEMEVDDFYDGIKRLYNEDNVSENVGSVCGTDLSRQEGHASPCPPLQPVSVM

SEQ ID NO: 4712 - DNA, 1718 bp, Homo sapiens
gattttcagttccatgccattgcagtgtcaactaggcctcagttacttttcagtttgcccaaattgagcccatctcaacatttggcagtccttaccaagcaactacttcactgtatggcctgcaaccaacttctgcaattcagaggatccatgcttgctctggccatggttagtctggaaatggagaaactcattcctgattggcttttctataatgaagataatgtctcagaaaatgtgggttctgtgtgtggcactgatttatcaagacaagagggacatgcttccccttgtccacctttgcagcctgtttctgtcatgtagtttcaacaagtgctacctttgagtgtaaactaaggtagactactttgggaatgagaacatgcaaaatcaggaaaggctgtagaaggaaatataccttaacaggctgatttggagtgagccagaaaaaaaaaataaaactctcattatttgtgtggctaattataattcagcgttatttaagcacataaagaccaaaaaaaaaaaaaagaaatccaaaagatccaaactttttttaaacttaaaaaatctctttgtagtatgtcagttgcactttttttctgccataatgtaacgtagcttgccccgtcaaaaattcaattaaaattcatggccagcaatcctgttccccctcagcatcctgatttaattttcctgttgcttttgcttgcttctccatttaatagttactgaactttatgcatgttgatctatattgattttcactgcagttgaatgaacaaattatttcagtgtgacagccatgactcaagttccaattagtctgaaaagggtactttggaattgtcccatattaatcagagatggcaaaagaaaaagttctcatattaccaggttgattttgtgtctcatttcaaattttaatttaaaattatggttttcatttttgtttaccttaaagtgatgcttaaaagtggcatgtaattaggacacttaggtttgttgaaagcattttcgacatttgtataaaagaatttgtgataaatatatccaggtgctcaccaaagaaacatgtattaacaacttaaattagatttttctaactgatagttttcactcatttataatcagtaggagagactgtctagatgttggggcagctctatgatttaagtctgtaacatgttataactgaatttagtaccctagttttgttaagctattaggattttctaatagaacttactccccctgcctccccagccttatgtttcttttaatgacttctggatcctgagctccctttgcagtctgaaaaaggtattgcagtcagaactgtgtactgatgataaaagcctctggtagcaataaaaagttgtccttaacttttgtttttgtgacttttttctggttgtgaagaggtacaggttcctgattggctaggcactgctatttcaactagagaaaacaatagaaagaccaagaatacacttactgaaaataaaacatgaagaggatctgaatgtgatcgagggatataggttttagacataagaatttttctttcgtgatattttttcactggtgcactgtgaatcctccaaatagtaaatttacatcttaatgtgactgcttgtgagagtaggctcagacccctatctttaaaatgtcatttttagccattttgtaatgttcagatttagcagaacaagagt

SEQ ID NO: 4713 - protein, 69 aa, Homo sapiens
MACNQLLQFRGSMLALAMVSLEMEKLIPDWLFYNEDNVSENVGSVCGTDLSRQEGHASPCPPLQPVSVM

SEQ ID NO: 4714 - DNA, 2212 bp, Homo sapiens
agagaattccagtactaaaggtattggcaagagacagtttctgtggatgttcctcatctgaaattttgagaatggagagaattattctggataagttgaattgggatcttcacacagccacaccattggattttcttcatattttccatgccattgcagtgtcaactaggcctcagttacttttcagtttgcccaaattgagcccatctcaacatttggcagtccttaccaagcaactacttcactgtatggcctgcaaccaacttctgcaattcagaggatccatgcttgctctggccatggttagtctggaaatggagaaactcattcctgattggctttctcttacaattgaactgcttcagaaagcacagatggatagctcccagttgatccattgtcgggagcttgtggcacatcacctttctactctgcagtcttccctgcctctgaattccgtttatgtctaccgtcccctcaagcacaccctggtgacctgtgacaaaggagtgttcagattacatccctcctctgtcccaggcccagacttctccaaggacaacagcaagccagaagtgccagtcagaggtacagcagccttttaccatcatctcccagctgccagtgggtgcaagcagacctctactaaacgcaaagtagaggaaatggaagtggatgacttctatgatggaatcaaacggctctataatgaagataatgtctcagaaaatgtgggttctgtgtgtggcactgatttatcaagacaagagggacatgcttccccttgtccacctttgcagcctgtttctgtcatgtagtttcaacaagtgctacctttgagtgtaaactaaggtagactactttgggaatgagaacatgcaaaatcaggaaaggctgtagaaggaaatataccttaacaggctgatttggagtgagccagaaaaaaaaaataaaactctcattatttgtgtggctaattataattcagcgttatttaagcacataaagaccaaaaaaaaaaaaaagaaatccaaaagatccaaactttttttaaacttaaaaaatctctttgtagtatgtcagttgcactttttttctgccataatgtaacgtagcttgccccgtcaaaaattcaattaaaattcatggccagcaatcctgttccccctcagcatcctgatttaattttcctgttgcttttgcttgcttctccatttaatagttactgaactttatgcatgttgatctatattgattttcactgcagttgaatgaacaaattatttcagtgtgacagccatgactcaagttccaattagtctgaaaagggtactttggaattgtcccatattaatcagagatggcaaaagaaaaagttctcatattaccaggttgattttgtgtctcatttcaaattttaatttaaaattatggttttcatttttgtttaccttaaagtgatgcttaaaagtggcatgtaattaggacacttaggtttgttgaaagcattttcgacatttgtataaaagaatttgtgataaatatatccaggtgctcaccaaagaaacatgtattaacaacttaaattagatttttctaactgatagttttcactcatttataatcagtaggagagactgtctagatgttggggcagctctatgatttaagtctgtaacatgttataactgaatttagtaccctagttttgttaagctattaggattttctaatagaacttactccccctgcctccccagccttatgtttcttttaatgacttctggatcctgagctccctttgcagtctgaaaaaggtattgcagtcagaactgtgtactgatgataaaagcctctggtagcaataaaaagttgtccttaacttttgtttttgtgacttttttctggttgtgaagaggtacaggttcctgattggctaggcactgctatttcaactagagaaaacaatagaaagaccaagaatacacttactgaaaataaaacatgaagaggatctgaatgtgatcgagggatataggttttagacataagaatttttctttcgtgatattttttcactggtgcactgtgaatcctccaaatagtaaatttacatcttaatgtgactgcttgtgagagtaggctcagacccctatctttaaaatgtcatttttagccattttgtaatgttcagatttagcagaacaagagt

SEQ ID NO: 4715 - protein, 248 aa, Homo sapiens [sequence omitted]

SEQ ID NO: 4716 - DNA, 3380 bp, Homo sapiens
aagcaacccttccgctccttcaaggaaaatgagtccacggaccttcggcttttcttagccacgagaaaacgtcctccctccttccatcctagtgccaacgacttccccagcccgtctcctttcggccgcacttctctgtactttcgttggaccgggaaggcggcggggaggaacaggaagggtgaaagaccaagtccgcgtagtttacaaggagtgggcgagtctaggaatcggtccgcgagggcggagccgaggaagccggcacttcttcctcccttcccctctcttcccctccctccccagccttccccgcgagcggacgcggcagcgcctctgtctcgctttttcttatttttcccccctttcccctttctttttttttttttcttttcttttctcccctccccccctttcaccatttcccctcggaggcgctttccccgggcaggggcagagccggtctcaccccccgcctctccccggcccccgccgccctatggcgagagggagccccctcccaacccgggctcgagcggcggcggcctcaggccgggggtcatcatggaactaattcgctgaccgacccagcggccgcagccgtgcgtcccgctcgagcgccagcgcccgcgcccgcgccccccgatccgcttcccctttctccctcctcagttggccgagtcgtcccgcgcgcaccgcctccgcgcgcctatgagaatgaggtggtaacgggcccccggatgaccccgcgtcaccactgtgaggcctacagctctgccggggaggaggaggaggaggaagaggaggagaaggtagctacagcaagctgggtagcaggcagatccaaaggatatcatgaagtttccagggcctttggaaaaccagagattgtctttcctgttggaaaaggcaatcactagggaagcacagatgtggaaagtgaatgtgcggaaaatgccttcaaatcagaatgtttctccatcccagagagatgaagtaattcaatggctggccaaactcaagtaccaattcaacctttacccagaaacatttgctctggctagcagtcttttggataggtttttagctaccgtaaaggctcatccaaaatacttgagttgtattgcaatcagctgttttttcctagctgccaagactgttgaggaagatgagagaattccagtactaaaggtattggcaagagacagtttctgtggatgttcctcatctgaaattttgagaatggagagaattattctggataagttgaattgggatcttcacacagccacaccattggattttcttcatattttccatgccattgcagtgtcaactaggcctcagttacttttcagtttgcccaaattgagcccatctcaacatttggcagtccttaccaagcaactacttcactgtatggcctgcaaccaacttctgcaattcagaggatccatgcttgctctggccatggttagtctggaaatggagaaactcattcctgattggctttctcttacaattgaactgcttcagaaagcacagatggatagctcccagttgatccattgtcgggagcttgtggcacatcacctttctactctgcagtcttccctgcctctgaattccgtttatgtctaccgtcccctcaagcacaccctggtgacctgtgacaaaggagtgttcagattacatccctcctctgtcccaggcccagacttctccaaggacaacagcaagccagaagtgccagtcagaggtacagcagccttttaccatcatctcccagctgccagtgggtgcaagcagacctctactaaacgcaaagtagaggaaatggaagtggatgacttctatgatggaatcaaacggctctataatgaagataatgtctcagaaaatgtgggttctgtgtgtggcactgatttatcaagacaagagggacatgcttccccttgtccacctttgcagcctgtttctgtcatgtagtttcaacaagtgctacctttgagtgtaaactaaggtagactactttgggaatgagaacatgcaaaatcaggaaaggctgtagaaggaaatataccttaacaggctgatttggagtgagccagaaaaaaaaaataaaactctcattatttgtgtggctaattataattcagcgttatttaagcacataaagaccaaaaaaaaaaaaaagaaatccaaaagatccaaactttttttaaacttaaaaaatctctttgtagtatgtcagttgcactttttttctgccataatgtaacgtagcttgccccgtcaaaaattcaattaaaattcatggccagcaatcctgttccccctcagcatcctgatttaattttcctgttgcttttgcttgcttctccatttaatagttactgaactttatgcatgttgatctatattgattttcactgcagttgaatgaacaaattatttcagtgtgacagccatgactcaagttccaattagtctgaaaagggtactttggaattgtcccatattaatcagagatggcaaaagaaaaagttctcatattaccaggttgattttgtgtctcatttcaaattttaatttaaaattatggttttcatttttgtttaccttaaagtgatgcttaaaagtggcatgtaattaggacacttaggtttgttgaaagcattttcgacatttgtataaaagaatttgtgataaatatatccaggtgctcaccaaagaaacatgtattaacaacttaaattagatttttctaactgatagttttcactcatttataatcagtaggagagactgtctagatgttggggcagctctatgatttaagtctgtaacatgttataactgaatttagtaccctagttttgttaagctattaggattttctaatagaacttactccccctgcctccccagccttatgtttcttttaatgacttctggatcctgagctccctttgcagtctgaaaaaggtattgcagtcagaactgtgtactgatgataaaagcctctggtagcaataaaaagttgtccttaacttttgtttttgtgacttttttctggttgtgaagaggtacaggttcctgattggctaggcactgctatttcaactagagaaaacaatagaaagaccaagaatacacttactgaaaataaaacatgaagaggatctgaatgtgatcgagggatataggttttagacataagaatttttctttcgtgatattttttcactggtgcactgtgaatcctccaaatagtaaatttacatcttaatgtgactgcttgtgagagtaggctcagacccctatctttaaaatgtcatttttagccattttgtaatgttcagatttagcagaacaagagt

SEQ ID NO: 4717 - protein, 377 aa, Homo sapiens; identical to SEQ ID NO: 535

SEQ ID NO: 4718 - DNA, 1146 bp, Homo sapiens
cagatggatagctcccagttgatccattgtcgggagcttgtggcacatcacctttctactttgcagcctgtttctgtcatgtagtttcaacaagtgctacctttgagtgtaaactaaggtagactactttgggaatgagaacatgcaaaatcaggaaaggctgtagaaggaaatataccttaacaggctgatttggagtgagccagaaaaaaaaaataaaactctcattatttgtgtggctaattataattcagcgttatttaagcacataaagaccaaaaaaaaaaaaaagaaatccaaaagatccaaactttttttaaacttaaaaaatctctttgtagtatgtcagttgcactttttttctgccataatgtaacgtagcttgccccgtcaaaaattcaattaaaattcatggccagcaatcctgttccccctcagcatcctgatttaattttcctgttgcttttgcttgcttctccatttaatagttactgaactttatgcatgttgatctatattgattttcactgcagttgaatgaacaaattatttcagtgtgacagccatgactcaagttccaattagtctgaaaagggtactttggaattgtcccatattaatcagagatggcaaaagaaaaagttctcatattaccaggttgattttgtgtctcatttcaaattttaatttaaaattatggttttcatttttgtttaccttaaagtgatgcttaaaagtggcatgtaattaggacacttaggtttgttgaaagcattttcgacatttgtataaaagaatttgtgataaatatatccaggtgctcaccaaagaaacatgtattaacaacttaaattagatttttctaactgatagttttcactcatttataatcagtaggagagactgtctagatgttggggcagctctatgatttaagtctgtaacatgttataactgaatttagtaccctagttttgttaagctattaggattttctaatagaacttactccccctgcctccccagccttatgtttcttttaatgacttctggatcctgagctccctttgcagtctgaaaaaggtattgcagtcagaactgtgtactgatgataaaagcctctggtagcaataaaaagttgtcctt

SEQ ID NO: 4719 - protein, 53 aa, Homo sapiens; identical to SEQ ID NO: 4707

SEQ ID NO: 4720 - DNA, 1365 bp, Homo sapiens
aaaaaaaaaaaacagacgttggatacaaaaaagtagtttctgttctcatgtaaatgttcagcatacattgcaaatacaaaactcaagttccaaagataattatattagaaatacagatttggacctaatttctaagatgatgttgatggatgggtagctggataaataaatgagttggaggtagatgtggggagagaaaagactcagcggggacggaaagcacagggaggaaaaatggccaccagagataacagagcagcctatgttaattaatgatcaactgtgtgtggctttttttttttcctggcccagatggatagctcccagttgatccattgtcgggagcttgtggcacatcacctttctactctgcagtcttccctgcctctgaattccgtttatgtctaccgtcccctcaagcacaccctggtgacctgtgacaaaggagtgttcagattacatccctcctctgtcccaggcccagacttctccaaggacaacagcaagccagaagtgccagtcagaggtacagcagccttttaccatcatctcccagctgccagtgggtgcaagcagacctctactaaacgcaaagtagaggaaatggaagtggatgacttctatgatggaatcaaacggctctataatgaagataatcatcctgatttaattttcctgttgcttttgcttgcttctccatttaatagttactgaactttatgcatgttgatctatattgattttcactgcagttgaatgaacaaattatttcagtgtgacagccatgactcaagttccaattagtctgaaaagggtactttggaattgtcccatattaatcagagatggcaaaagaaaaagttctcatattaccaggttgattttgtgtctcatttcaaattttaatttaaaattatggttttcatttttgtttaccttaaagtgatgcttaaaagtggcatgtaattaggacacttaggtttgttgaaagcattttcgacatttgtataaaagaatttgtgataaatatatccaggtgctcaccaaagaaacatgtattaacaacttaaattagatttttctaactgatagttttcactcatttataatcagtaggagagactgtctagatgttggggcagctctatgatttaagtctgtaacatgttataactgaatttagtaccctagttttgttaagctattaggattttctaatagaacttactccccctgcctccccagccttatgtttcttttaatgacttctggatcctgagctccctttgcagtctgaaaaaggtattgcagtcagaactgtgtactgatgataaaagcctctggtagcaataaaaagttgtcctt

SEQ ID NO: 4721 - protein, 133 aa, Homo sapiens; identical to SEQ ID NO: 4709

SEQ ID NO: 4722 - DNA, 1746 bp, Homo sapiens
gattttcagttccatgccattgcagtgtcaactaggcctcagttacttttcagtttgcccaaattgagcccatctcaacatttggcagtccttaccaagcaactacttcactgtatggcctgcaaccaacttctgcaattcagaggatccatgcttgctctggccatggttagtctggaaatggagaaactcattcctgattggctttctcttacaattgaactgcttcagaaagcacagatggatagctcccagttgatccattgtcgggagcttgtggcacatcacctttctactctgcagtcttccctgcctctgaattccgtttatgtctaccgtcccctcaagcacaccctggtgacctgtgacaaaggagtgttcagattacatccctcctctgtcccaggcccagacttctccaaggacaacagcaagccagaagtgccagtcagaggtacagcagccttttaccatcatctcccagctgccagtgggtgcaagcagacctctactaaacgcaaagtagaggaaatggaagtggatgacttctatgatggaatcaaacggctctataatgaagataatgtctcagaaaatgtgggttctgtgtgtggcactgatttatcaagacaagagggacatgcttccccttgtccacctttgcagcctgtttctgtcatgtagtttcaacaagtgctacctttgagtgtaaactaaggtagactactttgggaatgagaacatgcaaaatcaggaaaggctgtagaaggaaatataccttaacaggctgatttggagtgagccagaaaaaaaaaataaaactctcattatttgtgtggctaattataattcagcgttatttaagcacataaagaccaaaaaaaaaaaaaagaaatccaaaagatccaaactttttttaaacttaaaaaatctctttgtagtatgtcagttgcactttttttctgccataatgtaacgtagcttgccccgtcaaaaattcaattaaaattcatggccagcaatcctgttccccctcagcatcctgatttaattttcctgttgcttttgcttgcttctccatttaatagttactgaactttatgcatgttgatctatattgattttcactgcagttgaatgaacaaattatttcagtgtgacagccatgactcaagttccaattagtctgaaaagggtactttggaattgtcccatattaatcagagatggcaaaagaaaaagttctcatattaccaggttgattttgtgtctcatttcaaattttaatttaaaattatggttttcatttttgtttaccttaaagtgatgcttaaaagtggcatgtaattaggacacttaggtttgttgaaagcattttcgacatttgtataaaagaatttgtgataaatatatccaggtgctcaccaaagaaacatgtattaacaacttaaattagatttttctaactgatagttttcactcatttataatcagtaggagagactgtctagatgttggggcagctctatgatttaagtctgtaacatgttataactgaatttagtaccctagttttgttaagctattaggattttctaatagaacttactccccctgcctccccagccttatgtttcttttaatgacttctggatcctgagctccctttgcagtctgaaaaaggtattgcagtcagaactgtgtactgatgataaaagcctctggtagcaataaaaagttgtcctt

SEQ ID NO: 4723 - protein, 189 aa, Homo sapiens; identical to SEQ ID NO: 4711

SEQ ID NO: 4724 - DNA, 1386 bp, Homo sapiens
gattttcagttccatgccattgcagtgtcaactaggcctcagttacttttcagtttgcccaaattgagcccatctcaacatttggcagtccttaccaagcaactacttcactgtatggcctgcaaccaacttctgcaattcagaggatccatgcttgctctggccatggttagtctggaaatggagaaactcattcctgattggcttttctataatgaagataatgtctcagaaaatgtgggttctgtgtgtggcactgatttatcaagacaagagggacatgcttccccttgtccacctttgcagcctgtttctgtcatgtagtttcaacaagtgctacctttgagtgtaaactaaggtagactactttgggaatgagaacatgcaaaatcaggaaaggctgtagaaggaaatataccttaacaggctgatttggagtgagccagaaaaaaaaaataaaactctcattatttgtgtggctaattataattcagcgttatttaagcacataaagaccaaaaaaaaaaaaaagaaatccaaaagatccaaactttttttaaacttaaaaaatctctttgtagtatgtcagttgcactttttttctgccataatgtaacgtagcttgccccgtcaaaaattcaattaaaattcatggccagcaatcctgttccccctcagcatcctgatttaattttcctgttgcttttgcttgcttctccatttaatagttactgaactttatgcatgttgatctatattgattttcactgcagttgaatgaacaaattatttcagtgtgacagccatgactcaagttccaattagtctgaaaagggtactttggaattgtcccatattaatcagagatggcaaaagaaaaagttctcatattaccaggttgattttgtgtctcatttcaaattttaatttaaaattatggttttcatttttgtttaccttaaagtgatgcttaaaagtggcatgtaattaggacacttaggtttgttgaaagcattttcgacatttgtataaaagaatttgtgataaatatatccaggtgctcaccaaagaaacatgtattaacaacttaaattagatttttctaactgatagttttcactcatttataatcagtaggagagactgtctagatgttggggcagctctatgatttaagtctgtaacatgttataactgaatttagtaccctagttttgttaagctattaggattttctaatagaacttactccccctgcctccccagccttatgtttcttttaatgacttctggatcctgagctccctttgcagtctgaaaaaggtattgcagtcagaactgtgtactgatgataaaagcctctggtagcaataaaaagttgtcctt

SEQ ID NO: 4725 - protein, 69 aa, Homo sapiens; identical to SEQ ID NO: 4713

SEQ ID NO: 4726 - DNA, 1880 bp, Homo sapiens
agagaattccagtactaaaggtattggcaagagacagtttctgtggatgttcctcatctgaaattttgagaatggagagaattattctggataagttgaattgggatcttcacacagccacaccattggattttcttcatattttccatgccattgcagtgtcaactaggcctcagttacttttcagtttgcccaaattgagcccatctcaacatttggcagtccttaccaagcaactacttcactgtatggcctgcaaccaacttctgcaattcagaggatccatgcttgctctggccatggttagtctggaaatggagaaactcattcctgattggctttctcttacaattgaactgcttcagaaagcacagatggatagctcccagttgatccattgtcgggagcttgtggcacatcacctttctactctgcagtcttccctgcctctgaattccgtttatgtctaccgtcccctcaagcacaccctggtgacctgtgacaaaggagtgttcagattacatccctcctctgtcccaggcccagacttctccaaggacaacagcaagccagaagtgccagtcagaggtacagcagccttttaccatcatctcccagctgccagtgggtgcaagcagacctctactaaacgcaaagtagaggaaatggaagtggatgacttctatgatggaatcaaacggctctataatgaagataatgtctcagaaaatgtgggttctgtgtgtggcactgatttatcaagacaagagggacatgcttccccttgtccacctttgcagcctgtttctgtcatgtagtttcaacaagtgctacctttgagtgtaaactaaggtagactactttgggaatgagaacatgcaaaatcaggaaaggctgtagaaggaaatataccttaacaggctgatttggagtgagccagaaaaaaaaaataaaactctcattatttgtgtggctaattataattcagcgttatttaagcacataaagaccaaaaaaaaaaaaaagaaatccaaaagatccaaactttttttaaacttaaaaaatctctttgtagtatgtcagttgcactttttttctgccataatgtaacgtagcttgccccgtcaaaaattcaattaaaattcatggccagcaatcctgttccccctcagcatcctgatttaattttcctgttgcttttgcttgcttctccatttaatagttactgaactttatgcatgttgatctatattgattttcactgcagttgaatgaacaaattatttcagtgtgacagccatgactcaagttccaattagtctgaaaagggtactttggaattgtcccatattaatcagagatggcaaaagaaaaagttctcatattaccaggttgattttgtgtctcatttcaaattttaatttaaaattatggttttcatttttgtttaccttaaagtgatgcttaaaagtggcatgtaattaggacacttaggtttgttgaaagcattttcgacatttgtataaaagaatttgtgataaatatatccaggtgctcaccaaagaaacatgtattaacaacttaaattagatttttctaactgatagttttcactcatttataatcagtaggagagactgtctagatgttggggcagctctatgatttaagtctgtaacatgttataactgaatttagtaccctagttttgttaagctattaggattttctaatagaacttactccccctgcctccccagccttatgtttcttttaatgacttctggatcctgagctccctttgcagtctgaaaaaggtattgcagtcagaactgtgtactgatgataaaagcctctggtagcaataaaaagttgtcctt

SEQ ID NO: 4727 - protein, 248 aa, Homo sapiens [sequence omitted]

SEQ ID NO: 4728 - DNA, 3048 bp, Homo sapiens
aagcaacccttccgctccttcaaggaaaatgagtccacggaccttcggcttttcttagccacgagaaaacgtcctccctccttccatcctagtgccaacgacttccccagcccgtctcctttcggccgcacttctctgtactttcgttggaccgggaaggcggcggggaggaacaggaagggtgaaagaccaagtccgcgtagtttacaaggagtgggcgagtctaggaatcggtccgcgagggcggagccgaggaagccggcacttcttcctcccttcccctctcttcccctccctccccagccttccccgcgagcggacgcggcagcgcctctgtctcgctttttcttatttttcccccctttcccctttctttttttttttttcttttcttttctcccctccccccctttcaccatttcccctcggaggcgctttccccgggcaggggcagagccggtctcaccccccgcctctccccggcccccgccgccctatggcgagagggagccccctcccaacccgggctcgagcggcggcggcctcaggccgggggtcatcatggaactaattcgctgaccgacccagcggccgcagccgtgcgtcccgctcgagcgccagcgcccgcgcccgcgccccccgatccgcttcccctttctccctcctcagttggccgagtcgtcccgcgcgcaccgcctccgcgcgcctatgagaatgaggtggtaacgggcccccggatgaccccgcgtcaccactgtgaggcctacagctctgccggggaggaggaggaggaggaagaggaggagaaggtagctacagcaagctgggtagcaggcagatccaaaggatatcatgaagtttccagggcctttggaaaaccagagattgtctttcctgttggaaaaggcaatcactagggaagcacagatgtggaaagtgaatgtgcggaaaatgccttcaaatcagaatgtttctccatcccagagagatgaagtaattcaatggctggccaaactcaagtaccaattcaacctttacccagaaacatttgctctggctagcagtcttttggataggtttttagctaccgtaaaggctcatccaaaatacttgagttgtattgcaatcagctgttttttcctagctgccaagactgttgaggaagatgagagaattccagtactaaaggtattggcaagagacagtttctgtggatgttcctcatctgaaattttgagaatggagagaattattctggataagttgaattgggatcttcacacagccacaccattggattttcttcatattttccatgccattgcagtgtcaactaggcctcagttacttttcagtttgcccaaattgagcccatctcaacatttggcagtccttaccaagcaactacttcactgtatggcctgcaaccaacttctgcaattcagaggatccatgcttgctctggccatggttagtctggaaatggagaaactcattcctgattggctttctcttacaattgaactgcttcagaaagcacagatggatagctcccagttgatccattgtcgggagcttgtggcacatcacctttctactctgcagtcttccctgcctctgaattccgtttatgtctaccgtcccctcaagcacaccctggtgacctgtgacaaaggagtgttcagattacatccctcctctgtcccaggcccagacttctccaaggacaacagcaagccagaagtgccagtcagaggtacagcagccttttaccatcatctcccagctgccagtgggtgcaagcagacctctactaaacgcaaagtagaggaaatggaagtggatgacttctatgatggaatcaaacggctctataatgaagataatgtctcagaaaatgtgggttctgtgtgtggcactgatttatcaagacaagagggacatgcttccccttgtccacctttgcagcctgtttctgtcatgtagtttcaacaagtgctacctttgagtgtaaactaaggtagactactttgggaatgagaacatgcaaaatcaggaaaggctgtagaaggaaatataccttaacaggctgatttggagtgagccagaaaaaaaaaataaaactctcattatttgtgtggctaattataattcagcgttatttaagcacataaagaccaaaaaaaaaaaaaagaaatccaaaagatccaaactttttttaaacttaaaaaatctctttgtagtatgtcagttgcactttttttctgccataatgtaacgtagcttgccccgtcaaaaattcaattaaaattcatggccagcaatcctgttccccctcagcatcctgatttaattttcctgttgcttttgcttgcttctccatttaatagttactgaactttatgcatgttgatctatattgattttcactgcagttgaatgaacaaattatttcagtgtgacagccatgactcaagttccaattagtctgaaaagggtactttggaattgtcccatattaatcagagatggcaaaagaaaaagttctcatattaccaggttgattttgtgtctcatttcaaattttaatttaaaattatggttttcatttttgtttaccttaaagtgatgcttaaaagtggcatgtaattaggacacttaggtttgttgaaagcattttcgacatttgtataaaagaatttgtgataaatatatccaggtgctcaccaaagaaacatgtattaacaacttaaattagatttttctaactgatagttttcactcatttataatcagtaggagagactgtctagatgttggggcagctctatgatttaagtctgtaacatgttataactgaatttagtaccctagttttgttaagctattaggattttctaatagaacttactccccctgcctccccagccttatgtttcttttaatgacttctggatcctgagctccctttgcagtctgaaaaaggtattgcagtcagaactgtgtactgatgataaaagcctctggtagcaataaaaagttgtcctt

SEQ ID NO: 4729 - protein, 377 aa, Homo sapiens; identical to SEQ ID NO: 535

SEQ ID NO: 4730 - DNA, 806 bp, Homo sapiens
gattttcagttccatgccattgcagtgtcaactaggcctcagttacttttcagtttgcccaaattgagcccatctcaacatttggcagtccttaccaagcaactacttcactgtatggcctgcaaccaacttctgcaattcagaggatccatgcttgctctggccatggttagtctggaaatggagaaactcattcctgattggctttctcttacaattgaactgcttcagaaagcacagatggatagctcccagttgatccattgtcgggagcttgtggcacatcacctttctactctgcagtcttccctgcctctgaattccgtttatgtctaccgtcccctcaagcacaccctggtgacctgtgacaaaggagtgttcagattacatccctcctctgtcccaggcccagacttctccaaggacaacagcaagccagaagtgccagtcagaggtacagcagccttttaccatcatctcccagctgccagtgggtgcaagcagacctctactaaacgcaaagtagaggaaatggaagtggatgacttctatgatggaatcaaacggctctataatgaagataatgtctcagaaaatgtgggttctgtgtgtggcactgatttatcaagacaagagggacatgcttccccttgtccacctttgcagcctgtttctgtcatgtagtttcaacaagtgctacctttgagtgtaaactaaggtagactactttgggaatgagaacatgcaaaatcaggaaaggctgtagaaggaaatataccttaacaggctgatttggagtgagccag

SEQ ID NO: 4731 - protein, 189 aa, Homo sapiens; identical to SEQ ID NO: 4711

SEQ ID NO: 4732 - DNA, 940 bp, Homo sapiens
agagaattccagtactaaaggtattggcaagagacagtttctgtggatgttcctcatctgaaattttgagaatggagagaattattctggataagttgaattgggatcttcacacagccacaccattggattttcttcatattttccatgccattgcagtgtcaactaggcctcagttacttttcagtttgcccaaattgagcccatctcaacatttggcagtccttaccaagcaactacttcactgtatggcctgcaaccaacttctgcaattcagaggatccatgcttgctctggccatggttagtctggaaatggagaaactcattcctgattggctttctcttacaattgaactgcttcagaaagcacagatggatagctcccagttgatccattgtcgggagcttgtggcacatcacctttctactctgcagtcttccctgcctctgaattccgtttatgtctaccgtcccctcaagcacaccctggtgacctgtgacaaaggagtgttcagattacatccctcctctgtcccaggcccagacttctccaaggacaacagcaagccagaagtgccagtcagaggtacagcagccttttaccatcatctcccagctgccagtgggtgcaagcagacctctactaaacgcaaagtagaggaaatggaagtggatgacttctatgatggaatcaaacggctctataatgaagataatgtctcagaaaatgtgggttctgtgtgtggcactgatttatcaagacaagagggacatgcttccccttgtccacctttgcagcctgtttctgtcatgtagtttcaacaagtgctacctttgagtgtaaactaaggtagactactttgggaatgagaacatgcaaaatcaggaaaggctgtagaaggaaatataccttaacaggctgatttggagtgagccag

SEQ ID NO: 4733 - protein, 248 aa, Homo sapiens [sequence omitted]

SEQ ID NO: 4734 - DNA, 2108 bp, Homo sapiens
aagcaacccttccgctccttcaaggaaaatgagtccacggaccttcggcttttcttagccacgagaaaacgtcctccctccttccatcctagtgccaacgacttccccagcccgtctcctttcggccgcacttctctgtactttcgttggaccgggaaggcggcggggaggaacaggaagggtgaaagaccaagtccgcgtagtttacaaggagtgggcgagtctaggaatcggtccgcgagggcggagccgaggaagccggcacttcttcctcccttcccctctcttcccctccctccccagccttccccgcgagcggacgcggcagcgcctctgtctcgctttttcttatttttcccccctttcccctttctttttttttttttcttttcttttctcccctccccccctttcaccatttcccctcggaggcgctttccccgggcaggggcagagccggtctcaccccccgcctctccccggcccccgccgccctatggcgagagggagccccctcccaacccgggctcgagcggcggcggcctcaggccgggggtcatcatggaactaattcgctgaccgacccagcggccgcagccgtgcgtcccgctcgagcgccagcgcccgcgcccgcgccccccgatccgcttcccctttctccctcctcagttggccgagtcgtcccgcgcgcaccgcctccgcgcgcctatgagaatgaggtggtaacgggcccccggatgaccccgcgtcaccactgtgaggcctacagctctgccggggaggaggaggaggaggaagaggaggagaaggtagctacagcaagctgggtagcaggcagatccaaaggatatcatgaagtttccagggcctttggaaaaccagagattgtctttcctgttggaaaaggcaatcactagggaagcacagatgtggaaagtgaatgtgcggaaaatgccttcaaatcagaatgtttctccatcccagagagatgaagtaattcaatggctggccaaactcaagtaccaattcaacctttacccagaaacatttgctctggctagcagtcttttggataggtttttagctaccgtaaaggctcatccaaaatacttgagttgtattgcaatcagctgttttttcctagctgccaagactgttgaggaagatgagagaattccagtactaaaggtattggcaagagacagtttctgtggatgttcctcatctgaaattttgagaatggagagaattattctggataagttgaattgggatcttcacacagccacaccattggattttcttcatattttccatgccattgcagtgtcaactaggcctcagttacttttcagtttgcccaaattgagcccatctcaacatttggcagtccttaccaagcaactacttcactgtatggcctgcaaccaacttctgcaattcagaggatccatgcttgctctggccatggttagtctggaaatggagaaactcattcctgattggctttctcttacaattgaactgcttcagaaagcacagatggatagctcccagttgatccattgtcgggagcttgtggcacatcacctttctactctgcagtcttccctgcctctgaattccgtttatgtctaccgtcccctcaagcacaccctggtgacctgtgacaaaggagtgttcagattacatccctcctctgtcccaggcccagacttctccaaggacaacagcaagccagaagtgccagtcagaggtacagcagccttttaccatcatctcccagctgccagtgggtgcaagcagacctctactaaacgcaaagtagaggaaatggaagtggatgacttctatgatggaatcaaacggctctataatgaagataatgtctcagaaaatgtgggttctgtgtgtggcactgatttatcaagacaagagggacatgcttccccttgtccacctttgcagcctgtttctgtcatgtagtttcaacaagtgctacctttgagtgtaaactaaggtagactactttgggaatgagaacatgcaaaatcaggaaaggctgtagaaggaaatataccttaacaggctgatttggagtgagccag

SEQ ID NO: 4735 - protein, 377 aa, Homo sapiens; identical to SEQ ID NO: 535

SEQ ID NO: 4736 - DNA, 1043 bp, Homo sapiens
ttcttcctcccttcccctctcttcccctccctccccagccttccccgcgagcggacgcggcagcgcctctgtctcgctttttcttatttttcccccctttcccctttctttttttttttttcttttcttttctcccctccccccctttcaccatttcccctcggaggcgctttccccgggcaggggcagagccggtctcaccccccgcctctccccggcccccgccgccctatggcgagagggagccccctcccaacccgggctcgagcggcggcggcctcaggccgggggtcatcatggaactaattcgctgaccgacccagcggccgcagccgtgcgtcccgctcgagcgccagcgcccgcgcccgcgccccccgatccgcttcccctttctccctcctcagttggccgagtcgtcccgcgcgcaccgcctccgcgcgcctatgagaatgaggtggtaacgggcccccggatgaccccgcgtcaccactgtgaggcctacagctctgccggggaggaggaggaggaggaagaggaggagaaggtagctacagcaagctgggtagcaggcagatccaaaggatatcatgaagtttccagggcctttggaaaaccagagattgtctttcctgttggaaaaggcaatcactagggaagcacagatgtggaaagtgaatgtgcggaaaatgccttcaaatcagaatgtttctccatcccagagagatgaagtaattcaatggctggccaaactcaagtaccaattcaacctttacccagaaacatttgctctggctagcagtcttttggataggtttttagctaccgtaaaggtaagtgttttaagatagacttacatataacctcatttgagtgtatgtatgctaaactagaggctattagtgaacattctgtaaggtagaaagaagtggagaactttgctggagaatgatgtatgtacccataagaagacatggtgatgtcttctgctattgtttattttatttttattttttgatagttttgctctgttgccctggctggag

SEQ ID NO: 4737 - protein, 86 aa, Homo sapiens
MKFPGPLENQRLSFLLEKAITREAQMWKVNVRKMPSNQNVSPSQRDEVIQWLAKLKYQFNLYPETFALASSLLDRFLATVKVSVLR

SEQ ID NO: 4738 - DNA, 593 bp, Homo sapiens
gcttaactcttcatccagaagtcttgtgattggctttacttggttctcagggatttttatggatccttagtccagaactagatcttaaagtagcctggatacagaattacagctagatatgaggaataacttctagtgttccataccattgtaggcttactatggttaacttaggaaatacaaatgaatatcatttccattatcatagttcatttatatttcctaagataagttaatggctacttgctgcgggagaaattcactgtattttcttaatcttaagaggtggggtaacttaactccaaattactatcagttgataatagtgttacttaaactttaaaatgttatattctctgagcacctaaatttaattcaactatggatatttggtgagatgacatagtgaaaattttaataaagagtaggagaatattggatattgatattaaatgtgataatacataaagttttatttcatgtgtctcaagtctgatagattttgaataaccttaacatttttaaatatattttgtagtattacctaaccttttatgagagagaattctaaacatactcttgatgatagctca

SEQ ID NO: 4739 - protein, 35 aa, Homo sapiens
MATCCGRNSLYFLNLKRWGNLTPNYYQLIIVLLKL

SEQ ID NO: 4740 - DNA, 785 bp, Homo sapiens
ttcttcctcccttcccctctcttcccctccctccccagccttccccgcgagcggacgcggcagcgcctctgtctcgctttttcttatttttcccccctttcccctttctttttttttttttcttttcttttctcccctccccccctttcaccatttcccctcggaggcgctttccccgggcaggggcagagccggtctcaccccccgcctctccccggcccccgccgccctatggcgagagggagccccctcccaacccgggctcgagcggcggcggcctcaggccgggggtcatcatggaactaattcgctgaccgacccagcggccgcagccgtgcgtcccgctcgagcgccagcgcccgcgcccgcgccccccgatccgcttcccctttctccctcctcagttggccgagtcgtcccgcgcgcaccgcctccgcgcgcctatgagaatgaggtggtaacgggcccccggatgaccccgcgtcaccactgtgaggcctacagctctgccggggaggaggaggaggaggaagaggaggagaaggtagctacagcaagctgggtagcaggcagatccaaaggatatcatgaagtttccagggcctttggaaaaccagagattgtctttcctgttggaaaaggcaatcactagggaagcacagatgtggaaagtgaatgtgcggaaaatgccttcaaatcaggtaatgatttttctcttaagacagatgaattttattagaaataaacatactactgccatacataataatatcttgacactacat

SEQ ID NO: 4741 - protein, 59 aa, Homo sapiens [sequence omitted]

SEQ ID NO: 4742 - DNA, 503 bp, Homo sapiens
agtttccttattactagcatggaggggtgggactagaagacttctagtttcctcccagctcaatgaaagcaaagaatgctttcttcttaagttttattagtgtttctcagtatttctttaaccttccgtggatgaactgcctgatacactggaagtgcacaaatagatttaaaagtttcacttatgaggggaagattaacattcaactaaaggatactctgaatgatcattctacttgtgcatctgacagagtctaactctgtcacctaagcaggagtacagtggcatgaacatagcttgctgcagcttcaaactcctatgctcaagtggttttcctgcctcagcttcctgagtaactaggactacaggtgcgtgccacgcagcgtgaggacagactaatacacagaactgagatcatcactgcatcacaggccagcaagtgatgggaggcaatatgacagagtctttaagaagatgaacgctggagccatacttccagggta

SEQ ID NO: 4743 - protein, 64 aa, Homo sapiens
MKAKNAFFLSFISVSQYFFNLPWMNCLIHWKCTNRFKSFTYEGKINIQLKDTLNDHSTCASDRV

SEQ ID NO: 4744 - DNA, 8268 bp, Homo sapiens
ccattagccgcacaaattcgcagcaggcggctggggcggcggctggggcagcggctgcagcagcggcggacgctctgcattacccagtcttgcgtcctcggcaggcgcccgaagctgagtgcgcatcctctaccgcacccaagcttcgtctgtctcgtcaagctcttcatgctgcccaactaaaaggaaaacatgggcacaggggattttatctgcatttccatgactggaggggcgccctgggggttcagattgcaaggtggcaaggagcagaagcagcccttacaagttgcaaagattcgaaatcagagcaaagcctctgggtctgggctctgtgagggagatgaagtggtttccatcaatggcaacccttgtgcagatctcacctaccctgaagtcatcaagctcatggaaagcataacagactctctccaaatgctcatcaaaagaccatccagtggaataagtgaggctttgatatctgaaaatgaaaacaaaaacctcgagcatctcacacatgggggttatgtggaaagtaccaccctgcagattcgaccggccacaaagacccagtgcacagaattcttcctcgcccctgtcaagactgaagttcccctagctgagaaccaaagaagtggtcccgactgtgcaggcagcttgaaagaagaaacaggcccgagctaccaaagggctccccaaatgcctgactcccaaagaggacgcgtggcagaagagctgatcttaagggagaaggtagaagcggtacagcctgggcctgtggttgagctgcaactgtccctttcacaggagagacataagggcgctagtggccctttagtggctctcccgggagctgaaaaatctaagtctcctgacccagaccctaacttgtcacatgacaggattgtccacataaattcgatccctactaatgagaaagcagaccctttcctgaggtccagcaagataatccagatctccagtggcagagagttgagagtgatccaggaaagtgaagcaggagatgcgggactgccccgggtggaagtgatcctcgactgctctgacaggcagaagacagaagggtgcaggcttcaggcaggaaaggagtgtgtggattctccagtggaaggagggcagtcagaagcacctccttctctggtatcctttgccgtctcatcagaaggcacagagcagggagaagatccacgctcggaaaaagatcacagcagacctcacaagcaccgagcgcggcatgcacggctcaggaggagtgaaagcctgtcagaaaaacaagtgaaggaagcaaaatctaaatgcaaaagcattgcccttcttctaacggatgctcccaaccccaactccaagggggtgttgatgtttaagaagcgacgtcggagggccaggaaatacaccctagttagctacggtactggcgagcttgagcgagaggcggacgaggaggaagaaggtgacaaggaggatacatgtgaagtagcatttcttggtgcaagcgaatcagaggtggatgaagagttattgtctgacgttgacgacaacacacaagttgtgaactttgactgggattctggactggtggacattgaaaagaaactgaacagaggggacaagatggagatgttaccagacaccacaggcaagggagccctcatgtttgccaagaggagggagagaatggatcagatcacagcccaaaaagaagaggacaaggtaggtggaacgccaagcagagaacaagatgctgcccagaccgatggcctgagaaccacgacttcttaccaaagaaaggaggaagagtcggtaagaacgcagagctctgtgagcaaaagctacatcgaggtgagtcatggtcttggccatgttccccaacagaatggcttcagtgggacatctgagacagcaaacatccagaggatggtccccatgaatagaacggccaaacccttcccagggtctgtgaatcagccagctacccccttctcgccaacccgaaacatgacgagtcccattgctgactttcctgcacctccaccttactctgcagtcactcctccccctgacgccttctccagaggggtttcaagtccgattgctggcccagcacagccccctccatggccccagcctgccccgtggtcccagccagccttttacgattcgtctgagcgaatagcttcccgagatgagaggatctcagtgccagcaaaaagaacaggaatattgcaggaggccaaaaggagaagcacgacaaaacccatgtttacttttaaagagcccaaagtaagcccaaatcctgaactcttgtcactccttcaaaattcagaaggcaaacggggcactggagctggaggtgattccggaccggaagaagactacctcagcttgggggcagaggcttgtaatttcatgcaaagctcctctgccaaacaaaagacccctcctcctgttgctccaaaacctgcagtcaagtcctcatcctcccaaccagtaactccagtttccccagtctggtctccaggagtggctcccacccaacctcctgccttccccacatccaacccatcaaagggcaccgttgtctcctccatcaaaatagcccagccttcttaccctcctgcccggcctgcaagtactttgaacgtggctggtcccttcaaaggaccacaagcagcagtagccagtcagaattacacacccaaaccaacagtttccacaccaacagtcaatgctgttcagcctggtgcagtgggaccatccaatgagcttccaggaatgagtgggagaggagctcagctctttgctaaaaggcagtcgagaatggagaagtatgtggtcgattcagacacggtgcaggcccacgctgctcgagctcagtctcccactccatctctcccggccagttggaagtactcctccaatgtccgagcacctcctcctgtggcctataatcctatccactcgccgtcttacccactggctgctctcaagtctcagccatcagctgcacagccctccaaaatgggcaagaaaaagggaaagaaacccctcaatgcattagatgtcatgaagcaccaaccgtatcagctcaatgcatccttgtttactttccaacctccagatgcaaaggatggcctcccccagaagtcatcagtcaaggtcaattcagccctggccatgaagcaagctcttcctccccggccagtgaatgctgcctcacctacgaatgtgcaggcttcgtcagtgtactcggtaccagcctatacctctcctccttccttctttgcagaggcctcctcaccagtcagtgcatccccagtgcctgtgggcattcccacctcgccaaagcaagaatcagcctcatcatcttattttgtggcaccaaggccaaagttctcagccaagaaaagtggtgtcacaattcaggtgtggaaaccatctgttgtggaagagtaatcttgtagctgaagctgagtgtccactttgcttgaaatgaattgtttgcagtgtttcttgagtccctgagaatgcctagcaaagtcctcaacttacttaatttcagatatgtcacctcctaatctgggtccaaggagtataatatttttaatgagtcaaaaatccaactcagattgacctaaaatatatttatcttctttgcacacttaaaaaatccaggagcaccccaaaatagacatgtaccgttatattaagtaagcaggagacttaggatttgtgctgtagccacaagaaagacagtgatcagtgatatcaaacatcaggaatcagcctttatgtaacataacagctgtcctcctatggtgaaaggttcaaatgtagtgaaggtataacctatattgactgagatttcccttttaggtagtgccttatctctattactagtgttaaaggaataaggaatctatgaaggacagggagcagctctggtctgtcaatctcagccacctgtttgatatcacagagaagatactcggaggattgttggaatgtatatagtttagtaagaagtgggtaagaaagagggtcttaattactgagcacttattatgtattaggttctttgccagatgtttttacatatataaactcatttcagaaaacttatttaaagtaaatggggccgggtatggtggttcatgcctggaatcctagcactttgggaggctgaggtaggaggactgcttgaggccgggagttggagaccagcctgagcaacatagtgagaccctgtctcaataataataataataatagtaataatgaagtaaatgggataaggaaagaaggataattatctttaaaggttgattcccaccctccctccccagttacttaaggaactaagtgagtacatctccagttgcccatgaaagcataagtttgttttcctcagctgaggcaagtggtagagtatacaggataacgaagtaacatgtaaaaggcaggacgcacataaaggtgtacatggctattgtttcacctggagaaaccacatgattgggacctgaaggtttactgactgactacaggggctgattgtgaagcacgaggaaccccatgtgtgtggagactgtagggtgagagcacacaattattagcatcatttctgagtgatctcacagattttttttcttgtgtttgctttgctttttgacaactgcttctcccacgttccttgcaattctattctctcaccttcactttactatttgtattcgatggaccaggataattcaggcaaggttaccttgtaaactttaattggccacacaccatgttgtcacccagctggctatgaagtgaataatggtactgaaagtaaacctgaagacctttctcagatctattttaagtctgagtctgaccaaccatggaaaatattcgacatgaattaatgtagagaactataaagcatttatgacagctccaagaaaaatcatctactctatgcaggagatatgtttagagacctctcagaaaaacttgcctggtttgagggtacacagtaccattttaatcttctgaaaatatctgtattcctgctctttttctgctgtcactgtcaatctgctatatttttcactatcctattaaaatattactgtctcctttatctgttcaatgtccatattttaaaaaaatcttccttgtatgagctattctgatctaaataatttctctgatatttctctatatggctcccacaacaatttcattgttgttagcatatctatttctccatacattgtaaaactgtaatccttaggtatttctaaaacataaagaggagaattaagtcagctgcagaacaatggggctgattcttctgctttttctctggaaaatctttcattgcttttggtggaaatttacctagaggttacaaccacaggatgtagcttggtctcttatttgcctttttgggaaaccaattaagattaatacaggataaaggaaaaaagcaatctattcattatataacacagttgtttgtattacttgttccctgcaaaggaaatctgttgaatgcttgcattttgaattcttttctaatagaacaaccaaaaaaggcttcttatggtgcagcaggaaaaaagatcatttttatagctttgcattcttaacatagcatttaaagagcggcatgaattagaggaaagacatggaacacacaggtagtcggtttgagatcatcggcttaaaagtatcctaggatggtaatgacccagaagtatttccagttgtctagtggtgtggtatgcaggaatgagaagtgttttctttccatttcctgttggacaggtggcaatcttagcagagccactatttggagttgataactaaagatgcaaataacatgactatgccttctggtcatcctaggactatttggagttctccaaaaccttgtaagaggcatgtcaggcatgcagtaaaagcatctacaacttcagctgggcactggcagcataggtctcatcttggaccatacagtcccactttatagaagagggtggaagttctccaaaacaatatccacaacaaagtctgacctcactctgagggagatgggaagtgggaggaagaaggactaaccagctccctggagtaagaggaatttgctttccctgtctgcccaccaggggctatatgtgccacctttcaggttggggccaaggaagtgatgtcagtgtgacagaagggagagttagacctccagacgtcagcctccctcccatggggtacattttcaatctgagtgttgttgccttagctgtgttggtattagcttgattggttggtccgctggttatgaggtgtagggaggcagtttttgtttagtttttaggactttgcctcttcctttgtccttagcataatttctaggcagagcatccacgaagtcggttttcattgccagctcaagagcgacaatcatttacgagttcctatgttatgttaggtgccttatgtatattatcccaaatccactgcatggtttaaatacaggcactggaatataaatgaaaaaggtcattacagtcactgactttctgcaggaccttaaacatttctctttccacaagtttccccttaatcatgtgtcaaacctctcttcctgacgggaatgttgtgctataatgaatctgcataacgcttgggattctaggaggaaggaaggttccatggacatgtaagtacagcatattcccctcagtcttctaggagggcagagtgaatcccagaactggtaagattgggaatctgagcattgccactttaatcttagaatatttatcattttgacacatcctgttttttagagaggaaaacaaacacagtttctgcattggtagtgtaaagcataccttgttaggaacgtgttttgtaagacacatttgggttgtcactctagagcatgtcaaactttgtacttcaaaatatatttagtatgattgttagtggtaacatatatcaaggctttgaattaactgttttatttaattttcacaagaagcacttattttagccataggaaaaccaatctgagctacaaatagttctttaaaataagcccaggttatttagctattctagaaagtgccgacttctttcaagaagcaggcattgtaggacagctgagaattatcacatagcctaaattctagcctggcagcaagagtcacatctgagatgtccaaaaaaaaaaaaaaaacacctgatctacattgaaagggggtagactaacgtatgtgagaccattttcctatttgcagttacaaggttaaagaactttgaaggtcattcggctgctaagaggcatgtcgaacactctgtgtggctctttcacagtaaaccctcctaagagcagaagacacatggctgttagtgtctgcgtttagatttaatttctcaaataaaggcccttggctgcgtatcatttcatccagttataaactagggctcctgcaagcacccccattctaagggtgaattattgaaatcagttgctatttgatgagtcacaactggcccagcaggcagggcatttgaagtcatggtcatcaaaaagaaatgattgttttttgaaaagctaaatgcttaaaatgcttctagagggaagtcgtggggcgtgtgctcattctctttaaaatcagggttgttgagtttgtttttaaacatttttataagttcatgagaaaaaatatataaattctaagaaccaacactgtattcccagaaacatgaccctcgctggtcttgggtccacatatcattggactctgggggacacaaagatgcctgtgacactttggtgttgccgagttagtcaacaattattctgggaaaaagcagaattgaattcttctctagatgtcctaccagggttggccaagggccacaaagcaggctaataaattcccacaggatccagacaccaggcaaaattgctctaagaagccagttactgtcatccctctatggttctagaaaaaatagtacaaaaatgacaggtcatcctatgagcgtcatgccaatgaaaccccatcttctggagaagcccttgaatcagaattatcttttttcttgatgtcgtcagatgcagccagtttcttaatttttttaaaaactgtatgtttctgtggtatgtatatttgtacacctaactacctggcacttggaaatcacagcactactcagaggcaattgaataaagagaaatttaatttt

SEQ ID NO: 4745 - protein, 1093 aa, Homo sapiens
MGTGDFICISMTGGAPWGFRLQGGKEQKQPLQVAKIRNQSKASGSGLCEGDEVVSINGNPCADLTYPEVIKLMESITDSLQMLIKRPSSGISEALISENENKNLEHLTHGGYVESTTLQIRPATKTQCTEFFLAPVKTEVPLAENQRSGPDCAGSLKEETGPSYQRAPQMPDSQRGRVAEELILREKVEAVQPGPVVELQLSLSQERHKGASGPLVALPGAEKSKSPDPDPNLSHDRIVHINSIPTNEKADPFLRSSKIIQISSGRELRVIQESEAGDAGLPRVEVILDCSDRQKTEGCRLQAGKECVDSPVEGGQSEAPPSLVSFAVSSEGTEQGEDPRSEKDHSRPHKHRARHARLRRSESLSEKQVKEAKSKCKSIALLLTDAPNPNSKGVLMFKKRRRRARKYTLVSYGTGELEREADEEEEGDKEDTCEVAFLGASESEVDEELLSDVDDNTQVVNFDWDSGLVDIEKKLNRGDKMEMLPDTTGKGALMFAKRRERMDQITAQKEEDKVGGTPSREQDAAQTDGLRTTTSYQRKEEESVRTQSSVSKSYIEVSHGLGHVPQQNGFSGTSETANIQRMVPMNRTAKPFPGSVNQPATPFSPTRNMTSPIADFPAPPPYSAVTPPPDAFSRGVSSPIAGPAQPPPWPQPAPWSQPAFYDSSERIASRDERISVPAKRTGILQEAKRRSTTKPMFTFKEPKVSPNPELLSLLQNSEGKRGTGAGGDSGPEEDYLSLGAEACNFMQSSSAKQKTPPPVAPKPAVKSSSSQPVTPVSPVWSPGVAPTQPPAFPTSNPSKGTVVSSIKIAQPSYPPARPASTLNVAGPFKGPQAAVASQNYTPKPTVSTPTVNAVQPGAVGPSNELPGMSGRGAQLFAKRQSRMEKYVVDSDTVQAHAARAQSPTPSLPASWKYSSNVRAPPPVAYNPIHSPSYPLAALKSQPSAAQPSKMGKKKGKKPLNALDVMKHQPYQLNASLFTFQPPDAKDGLPQKSSVKVNSALAMKQALPPRPVNAASPTNVQASSVYSVPAYTSPPSFFAEASSPVSASPVPVGIPTSPKQESASSSYFVAPRPKFSAKKSGVTIQVWKPSVVEE

SEQ ID NO: 4746 - DNA, 9932 bp, Homo sapiens
ccattagccgcacaaattcgcagcaggcggctggggcggcggctggggcagcggctgcagcagcggcggacgctctgcattacccagtcttgcgtcctcggcaggcgcccgaagctgagtgcgcatcctctaccgcacccaagcttcgtctgtctcgtcaagctcttcatgctgcccaactaaaaggaaaacatgggcacaggggattttatctgcatttccatgactggaggggcgccctgggggttcagattgcaaggtggcaaggagcagaagcagcccttacaagttgcaaagattcgaaatcagagcaaagcctctgggtctgggctctgtgagggagatgaagtggtttccatcaatggcaacccttgtgcagatctcacctaccctgaagtcatcaagctcatggaaagcataacagactctctccaaatgctcatcaaaagaccatccagtggaataagtgaggctttgatatctgaaaatgaaaacaaaaacctcgagcatctcacacatgggggttatgtggaaagtaccaccctgcagattcgaccggccacaaagacccagtgcacagaattcttcctcgcccctgtcaagactgaagttcccctagctgagaaccaaagaagtggtcccgactgtgcaggcagcttgaaagaagaaacaggcccgagctaccaaagggctccccaaatgcctgactcccaaagaggacgcgtggcagaagagctgatcttaagggagaaggtagaagcggtacagcctgggcctgtggttgagctgcaactgtccctttcacaggagagacataagggcgctagtggccctttagtggctctcccgggagctgaaaaatctaagtctcctgacccagaccctaacttgtcacatgacaggattgtccacataaattcgatccctactaatgagaaagcagaccctttcctgaggtccagcaagataatccagatctccagtggcagagagttgagagtgatccaggaaagtgaagcaggagatgcgggactgccccgggtggaagtgatcctcgactgctctgacaggcagaagacagaagggtgcaggcttcaggcaggaaaggagtgtgtggattctccagtggaaggagggcagtcagaagcacctccttctctggtatcctttgccgtctcatcagaaggcacagagcagggagaagatccacgctcggaaaaagatcacagcagacctcacaagcaccgagcgcggcatgcacggctcaggaggagtgaaagcctgtcagaaaaacaagtgaaggaagcaaaatctaaatgcaaaagcattgcccttcttctaacggatgctcccaaccccaactccaagggggtgttgatgtttaagaagcgacgtcggagggccaggaaatacaccctagttagctacggtactggcgagcttgagcgagaggcggacgaggaggaagaaggtgacaaggaggatacatgtgaagtagcatttcttggtgcaagcgaatcagaggtggatgaagagttattgtctgacgttgacgacaacacacaagttgtgaactttgactgggattctggactggtggacattgaaaagaaactgaacagaggggacaagatggagatgttaccagacaccacaggcaagggagccctcatgtttgccaagaggagggagagaatggatcagatcacagcccaaaaagaagaggacaaggtaggtggaacgccaagcagagaacaagatgctgcccagaccgatggcctgagaaccacgacttcttaccaaagaaaggaggaagagtcggtaagaacgcagagctctgtgagcaaaagctacatcgaggtgagtcatggtcttggccatgttccccaacagaatggcttcagtgggacatctgagacagcaaacatccagaggatggtccccatgaatagaacggccaaacccttcccagggtctgtgaatcagccagctacccccttctcgccaacccgaaacatgacgagtcccattgctgactttcctgcacctccaccttactctgcagtcactcctccccctgacgccttctccagaggggtttcaagtccgattgctggcccagcacagccccctccatggccccagcctgccccgtggtcccagccagccttttacgattcgtctgagcgaatagcttcccgagatgagaggatctcagtgccagcaaaaagaacaggaatattgcaggaggccaaaaggagaagcacgacaaaacccatgtttacttttaaagagcccaaagtaagcccaaatcctgaactcttgtcactccttcaaaattcagaaggcaaacggggcactggagctggaggtgattccggaccggaagaagactacctcagcttgggggcagaggcttgtaatttcatgcaaagctcctctgccaaacaaaagacccctcctcctgttgctccaaaacctgcagtcaagtcctcatcctcccaaccagtaactccagtttccccagtctggtctccaggagtggctcccacccaacctcctgccttccccacatccaacccatcaaagggcaccgttgtctcctccatcaaaatagcccagccttcttaccctcctgcccggcctgcaagtactttgaacgtggctggtcccttcaaaggaccacaagcagcagtagccagtcagaattacacacccaaaccaacagtttccacaccaacagtcaatgctgttcagcctggtgcagtgggaccatccaatgagcttccaggaatgagtgggagaggagctcagctctttgctaaaaggcagtcgagaatggagaagtatgtggtcgattcagacacggtgcaggcccacgctgctcgagctcagtctcccactccatctctcccggccagttggaagtactcctccaatgtccgagcacctcctcctgtggcctataatcctatccactcgccgtcttacccactggctgctctcaagtctcagccatcagctgcacagccctccaaaatgggcaagaaaaagggaaagaaacccctcaatgcattagatgtcatgaagcaccaaccgtatcagctcaatgcatccttgtttactttccaacctccagatgcaaaggatggcctcccccagaagtcatcagtcaaggtcaattcagccctggccatgaagcaagctcttcctccccggccagtgaatgctgcctcacctacgaatgtgcaggcttcgtcagtgtactcggtaccagcctatacctctcctccttccttctttgcagaggcctcctcaccagtcagtgcatccccagtgcctgtgggcattcccacctcgccaaagcaagaatcagcctcatcatcttattttgtggcaccaaggccaaagttctcagccaagaaaagtggtgtcacaattcaggtgtggaaaccatctgttgtggaagagtaatcttgtagctgaagctgagtgtccactttgcttgaaatgaattgtttgcagtgtttcttgagtccctgagaatgcctagcaaagtcctcaacttacttaatttcagatatgtcacctcctaatctgggtccaaggagtataatatttttaatgagtcaaaaatccaactcagattgacctaaaatatatttatcttctttgcacacttaaaaaatccaggagcaccccaaaatagacatgtaccgttatattaagtaagcaggagacttaggatttgtgctgtagccacaagaaagacagtgatcagtgatatcaaacatcaggaatcagcctttatgtaacataacagctgtcctcctatggtgaaaggttcaaatgtagtgaaggtataacctatattgactgagatttcccttttaggtagtgccttatctctattactagtgttaaaggaataaggaatctatgaaggacagggagcagctctggtctgtcaatctcagccacctgtttgatatcacagagaagatactcggaggattgttggaatgtatatagtttagtaagaagtgggtaagaaagagggtcttaattactgagcacttattatgtattaggttctttgccagatgtttttacatatataaactcatttcagaaaacttatttaaagtaaatggggccgggtatggtggttcatgcctggaatcctagcactttgggaggctgaggtaggaggactgcttgaggccgggagttggagaccagcctgagcaacatagtgagaccctgtctcaataataataataataatagtaataatgaagtaaatgggataaggaaagaaggataattatctttaaaggttgattcccaccctccctccccagttacttaaggaactaagtgagtacatctccagttgcccatgaaagcataagtttgttttcctcagctgaggcaagtggtagagtatacaggataacgaagtaacatgtaaaaggcaggacgcacataaaggtgtacatggctattgtttcacctggagaaaccacatgattgggacctgaaggtttactgactgactacaggggctgattgtgaagcacgaggaaccccatgtgtgtggagactgtagggtgagagcacacaattattagcatcatttctgagtgatctcacagattttttttcttgtgtttgctttgctttttgacaactgcttctcccacgttccttgcaattctattctctcaccttcactttactatttgtattcgatggaccaggataattcaggcaaggttaccttgtaaactttaattggccacacaccatgttgtcacccagctggctatgaagtgaataatggtactgaaagtaaacctgaagacctttctcagatctattttaagtctgagtctgaccaaccatggaaaatattcgacatgaattaatgtagagaactataaagcatttatgacagctccaagaaaaatcatctactctatgcaggagatatgtttagagacctctcagaaaaacttgcctggtttgagggtacacagtaccattttaatcttctgaaaatatctgtattcctgctctttttctgctgtcactgtcaatctgctatatttttcactatcctattaaaatattactgtctcctttatctgttcaatgtccatattttaaaaaaatcttccttgtatgagctattctgatctaaataatttctctgatatttctctatatggctcccacaacaatttcattgttgttagcatatctatttctccatacattgtaaaactgtaatccttaggtatttctaaaacataaagaggagaattaagtcagctgcagaacaatggggctgattcttctgctttttctctggaaaatctttcattgcttttggtggaaatttacctagaggttacaaccacaggatgtagcttggtctcttatttgcctttttgggaaaccaattaagattaatacaggataaaggaaaaaagcaatctattcattatataacacagttgtttgtattacttgttccctgcaaaggaaatctgttgaatgcttgcattttgaattcttttctaatagaacaaccaaaaaaggcttcttatggtgcagcaggaaaaaagatcatttttatagctttgcattcttaacatagcatttaaagagcggcatgaattagaggaaagacatggaacacacaggtagtcggtttgagatcatcggcttaaaagtatcctaggatggtaatgacccagaagtatttccagttgtctagtggtgtggtatgcaggaatgagaagtgttttctttccatttcctgttggacaggtggcaatcttagcagagccactatttggagttgataactaaagatgcaaataacatgactatgccttctggtcatcctaggactatttggagttctccaaaaccttgtaagaggcatgtcaggcatgcagtaaaagcatctacaacttcagctgggcactggcagcataggtctcatcttggaccatacagtcccactttatagaagagggtggaagttctccaaaacaatatccacaacaaagtctgacctcactctgagggagatgggaagtgggaggaagaaggactaaccagctccctggagtaagaggaatttgctttccctgtctgcccaccaggggctatatgtgccacctttcaggttggggccaaggaagtgatgtcagtgtgacagaagggagagttagacctccagacgtcagcctccctcccatggggtacattttcaatctgagtgttgttgccttagctgtgttggtattagcttgattggttggtccgctggttatgaggtgtagggaggcagtttttgtttagtttttaggactttgcctcttcctttgtccttagcataatttctaggcagagcatccacgaagtcggttttcattgccagctcaagagcgacaatcatttacgagttcctatgttatgttaggtgccttatgtatattatcccaaatccactgcatggtttaaatacaggcactggaatataaatgaaaaaggtcattacagtcactgactttctgcaggaccttaaacatttctctttccacaagtttccccttaatcatgtgtcaaacctctcttcctgacgggaatgttgtgctataatgaatctgcataacgcttgggattctaggaggaaggaaggttccatggacatgtaagtacagcatattcccctcagtcttctaggagggcagagtgaatcccagaactggtaagattgggaatctgagcattgccactttaatcttagaatatttatcattttgacacatcctgttttttagagaggaaaacaaacacagtttctgcattggtagtgtaaagcataccttgttaggaacgtgttttgtaagacacatttgggttgtcactctagagcatgtcaaactttgtacttcaaaatatatttagtatgattgttagtggtaacatatatcaaggctttgaattaactgttttatttaattttcacaagaagcacttattttagccataggaaaaccaatctgagctacaaatagttctttaaaataagcccaggttatttagctattctagaaagtgccgacttctttcaagaagcaggcattgtaggacagctgagaattatcacatagcctaaattctagcctggcagcaagagtcacatctgagatgtccaaaaaaaaaaaaaaaacacctgatctacattgaaagggggtagactaacgtatgtgagaccattttcctatttgcagttacaaggttaaagaactttgaaggtcattcggctgctaagaggcatgtcgaacactctgtgtggctctttcacagtaaaccctcctaagagcagaagacacatggctgttagtgtctgcgtttagatttaatttctcaaataaaggcccttggctgcgtatcatttcatccagttataaactagggctcctgcaagcacccccattctaagggtgaattattgaaatcagttgctatttgatgagtcacaactggcccagcaggcagggcatttgaagtcatggtcatcaaaaagaaatgattgttttttgaaaagctaaatgcttaaaatgcttctagagggaagtcgtggggcgtgtgctcattctctttaaaatcagggttgttgagtttgtttttaaacatttttataagttcatgagaaaaaatatataaattctaagaaccaacactgtattcccagaaacatgaccctcgctggtcttgggtccacatatcattggactctgggggacacaaagatgcctgtgacactttggtgttgccgagttagtcaacaattattctgggaaaaagcagaattgaattcttctctagatgtcctaccagggttggccaagggccacaaagcaggctaataaattcccacaggatccagacaccaggcaaaattgctctaagaagccagttactgtcatccctctatggttctagaaaaaatagtacaaaaatgacaggtcatcctatgagcgtcatgccaatgaaaccccatcttctggagaagcccttgaatcagaattatcttttttcttgatgtcgtcagatgcagccagtttcttaatttttttaaaaactgtatgtttctgtggtatgtatatttgtacacctaactacctggcacttggaaatcacagcactactcagaggcaattgaataaagagaaatttaattttaaatatcaagtcctgtcaaacatttctcaaacttctgattttatcaaaggtttgccagccaataaagtgcatcccaagtatacaggggagaaagctagactcctacagggtcctagagtttaagtaatttttttgttattaatataggtaataatttttctaatttttattttttggttccaaatgtaaagctccttgtgtttacctctgtttatgtcattcttgacatgtttatctaaattatgtgtgctctgtgacaggtgaaatgtaaatctgggatccatagtcaagatatcataaggacctacttcccagcctacctttcttcctctacctgataatgataatactcaaaataacaacattcaaaggaaacacaaagaaatcctgctttcacatctcctatttcttgggctccttaataactactgatggtttgttcatgaaaaaaaatttttaaatcaaaagattgtacttggccctgagttgaaaaaatttcaaaaatcaaaagtttgtacttggccctgagttgaaaaaaaaaattcacattctaagaataaacagaaaaatgttcttcttggaagtaaataacaaaagccatagtgttttcatttgtcttttcttcaggatacacggtagaagtcagagaatctttgatacttttatttggtgcaataatcaaggccatgcaacaacccaaaatcaagcattttggttcaagtcaggatgacatgagtggggacagaagctgtggcagtcattcaaataatctcatgggtcctgaggaaaagacaggagttaatgtattaagtttctactatatgcaggaactgtgttaaatattttacataagttttgataatagctaacattagctgagcacaaaatttgggccctgatttgtgctgagtatctttcacagattactgcttttaatcagcagtccttgtgagctaggtatgatcattatccccattttatagattacagatgagattctgaggcacaaagaggctaagtaacttgccaaagatcatacgatgttaagtaatggcccctggattcagtctgcagcctgaattcttaaccaattatactgtgatttcattattcttcagaattacactaaaaagaaggtattattcccattttacagatgaggtatctaagctcagagaagctaaacaacttgtgcaacaatcactaagcttataagcagtggattagggttagatttagatatttgtctggcatccaaacctgtgctctccctacagtaccacatggtttccacagtctcatcagaccccggaatttcactccctgagactgcttaattgtgaatttcccaaactgattcaccaagagcctactgtctctgctttgtagatagctttgaccacattcaatgacattaggaaagactccatttcccaagatggctcagaaaatcagatgctatgacgcatgttgaaagtgaaaacccatctctgagaaagaagcatctgttttattagtaaaaaaaaaaaatgaaatttacagcaatgttgtgtgacttctcaaaattctttcattttcttatttcagaatgaatagtgttgttcgttggctgggaatggggaagaatgtgatttttaaaaataaagcataatcaaactctgcat

SEQ ID NO: 4747 - protein, 1093 aa, Homo sapiens; identical to SEQ ID NO: 4745

SEQ ID NO: 4748 - DNA, 7040 bp, Homo sapiens
ccattagccgcacaaattcgcagcaggcggctggggcggcggctggggcagcggctgcagcagcggcggacgctctgcattacccagtcttgcgtcctcggcaggcgcccgaagctgagtgcgcatcctctaccgcacccaagcttcgtctgtctcgtcaagctcttcatgctgcccaactaaaaggaaaacatgggcacaggggattttatctgcatttccatgactggaggggcgccctgggggttcagattgcaaggtggcaaggagcagaagcagcccttacaagttgcaaagattcgaaatcagagcaaagcctctgggtctgggctctgtgagggagatgaagtggtttccatcaatggcaacccttgtgcagatctcacctaccctgaagtcatcaagctcatggaaagcataacagactctctccaaatgctcatcaaaagaccatccagtggaataagtgaggctttgatatctgaaaatgaaaacaaaaacctcgagcatctcacacatgggggttatgtggaaagtaccaccctgcagattcgaccggccacaaagacccagtgcacagaattcttcctcgcccctgtcaagactgaagttcccctagctgagaaccaaagaagtggtcccgactgtgcaggcagcttgaaagaagaaacaggcccgagctaccaaagggctccccaaatgcctgactcccaaagaggacgcgtggcagaagagctgatcttaagggagaaggtagaagcggtacagcctgggcctgtggttgagctgcaactgtccctttcacaggagagacataagggcgctagtggccctttagtggctctcccgggagctgaaaaatctaagtctcctgacccagaccctaacttgtcacatgacaggattgtccacataaattcgatccctactaatgagaaagcagaccctttcctgaggtccagcaagataatccagatctccagtggcagagagttgagagtgatccaggaaagtgaagcaggagatgcgggactgccccgggtggaagtgatcctcgactgctctgacaggcagaagacagaagggtgcaggcttcaggcaggaaaggagtgtgtggattctccagtggaaggagggcagtcagaagcacctccttctctggtatcctttgccgtctcatcagaaggcacagagcagggagaagatccacgctcggaaaaagatcacagcagacctcacaagcaccgagcgcggcatgcacggctcaggaggagtgaaagcctgtcagaaaaacaagtgaaggaagcaaaatctaaatgcaaaagcattgcccttcttctaacggatgctcccaaccccaactccaagggggtgttgatgtttaagaagcgacgtcggagggccaggaaatacaccctagttagctacggtactggcgagcttgagcgagaggcggacgaggaggaagaaggtgacaaggaggatacatgtgaagtagcatttcttggtgcaagcgaatcagaggtggatgaagagttattgtctgacgttgacgacaacacacaagttgtgaactttgactgggattctggactggtggacattgaaaagaaactgaacagaggggacaagatggagatgttaccagacaccacaggcaagggagccctcatgtttgccaagaggagggagagaatggatcagatcacagcccaaaaagaagaggacaaggtaggtggaacgccaagcagagaacaagatgctgcccagaccgatggcctgagaaccacgacttcttaccaaagaaaggaggaagagtcggtaagaacgcagagctctgtgagcaaaagctacatcgaggtgagtcatggtcttggccatgttccccaacagaatggcttcagtgggacatctgagacagcaaacatccagaggatggtccccatgaatagaacggccaaacccttcccagggtctgtgaatcagccagctacccccttctcgccaacccgaaacatgacgagtcccattgctgactttcctgcacctccaccttactctgcagtcactcctccccctgacgccttctccagaggggtttcaagtccgattgctggcccagcacagccccctccatggccccagcctgccccgtggtcccagccagccttttacgattcgtctgagcgaatagcttcccgagatgagaggatctcagtgccagcaaaaagaacaggaatattgcaggaggccaaaaggagaagcacgacaaaacccatgtttacttttaaagagcccaaagtaagcccaaatcctgaactcttgtcactccttcaaaattcagaaggcaaacggggcactggagctggaggtgattccggaccggaagaagactacctcagcttgggggcagaggcttgtaatttcatgcaaagctcctctgccaaacaaaagacccctcctcctgttgctccaaaacctgcagtcaagtcctcatcctcccaaccagtaactccagtttccccagtctggtctccaggagtggctcccacccaacctcctgccttccccacatccaacccatcaaagggcaccgttgtctcctccatcaaaatagcccagccttcttaccctcctgcccggcctgcaagtactttgaacgtggctggtcccttcaaaggaccacaagcagcagtagccagtcagaattacacacccaaaccaacagtttccacaccaacagtcaatgctgttcagcctggtgcagtgggaccatccaatgagcttccaggaatgagtgggagaggagctcagctctttgctaaaaggcagtcgagaatggagaagtatgtggtcgattcagacacggtgcaggcccacgctgctcgagctcagtctcccactccatctctcccggccagttggaagtactcctccaatgtccgagcacctcctcctgtggcctataatcctatccactcgccgtcttacccactggctgctctcaagtctcagccatcagctgcacagccctccaaaatgggcaagaaaaagggaaagaaacccctcaatgcattagatgtcatgaagcaccaaccgtatcagctcaatgcatccttgtttactttccaacctccagatgcaaaggatggcctcccccagaagtcatcagtcaaggtcaattcagccctggccatgaagcaagctcttcctccccggccagtgaatgctgcctcacctacgaatgtgcaggcttcgtcagtgtactcggtaccagcctatacctctcctccttccttctttgcagaggcctcctcaccagtcagtgcatccccagtgcctgtgggcattcccacctcgccaaagcaagaatcagcctcatcatcttattttgtggcaccaaggccaaagttctcagccaagaaaagtggtgtcacaattcaggagagtgggcgctccctttctcttcctggaagatcagtcccaccccccatttctacatctccttgggtataccagcctacttatagttactctagtaaaccaaccgatggactagagaaagcaaacaagagaccaactccttgggaagcagcagcaaagtctcctctcggtctagtggatgatgctttccaacccagaaacatccaggaatccattgtggcaaatgtggtttcagcagctcggaggaaggtgcttccagggcctccagaggattggaatgaaagactgtcctatattcctcaaacccagaaggcctatatgggctcatgtggaaggcaagagtataatgtcacagccaataataatatgtccaccacctcccaatatggttcacagttgccatatgcatattataggcaggcttcaagaaatgattctgcaatcatgtccatggaaaccaggtctgattactgtcttccagtgagtgtgaatacttccttgttggctgatccatagagcattacttggaagaaaatttcactatttgcattgatgtgctggcatttatatgtaattcataattttgattccattaataggtagtctatgcaacaaactctactcaattaaagtaaaactaagtatttcttcattgtaccttagtccaggaagaaattaatggaatatggtgtgctaattatcactacctataacatgaggaatataacattgcagaaatttctcataggggcatgccagtgagcaattactttataaaaatattttccttggtgttaagtatttctctgcaacttttttttttttttttttttttttttgagatggagtcttgctctgtcccacccagtctggagtgcaatggtgcgatcttggctcactgcaacctgcgcctcctgggttcaagcaattctcctgcctcagcctcctgagtagctgggattacaggcatgaaccaccacacctggataatttttgtatttttagtagacacaaagtttcaccatgttggtcagactggtcttgaactcctgacctcgtgatctgcccgcctcagcctcccaaagtgctgggattacaggcgtgagccaccacacctggcctttctgcaacatttttttaaaaaaatctaataaatcttagatttttaaaaaagaattaaaatgtgggagttctcagaaagaaataaacacatgagaataagattattacacattttggaaggacttttgaggaatgatgtgatgtgtagagaatagaaagatttagatatatgcctgtgacaggaatagattctgggttcaggggtccccatctgtcaaatgagaagattggattatctaatcttttagatccttaacaactctgatattctgagattctctcatttgtagaatgcccgctgatgcattgtttattttttttgctcataatataaatatcagattatgtttaggagtggattaggtaattagtgtcactacatgtatcattaaaggtcctaaaaggaattgttaggcggcaggctttgtgttacgtgttacatggagtgagggtagatgtgaagatttaaaacgattgatggatttaaggaagtggtacataaatatgtctgttattatgcaatcgtaggtcatgataatttattcagttatagaaaacatgccacagaagcctatgtaacaagtggtgcttctttagaaagttgtcattagaatgttctgaggaagttaagcagctgcttcatcaatcccatgacacatgccttgttagcatgcccatcaaataatcagatcaaacacctgctccttattgccatacccacgaactgttaaatataaaaaaattcaaagtatttgacatcttaagcaaatatccagaatatttttaagtaaaaaaccatcttaagtattcaaaatttccttggttttttaaaggtgataattttgctttgtgttacttttttgctcttgaatgtatcgttatgatggtctcttataatcatggtatctttcacagaataaaaattaaaaataatgccagggtgcaagtgaccaaggccttatcttgaaagttaaaaaaaaaaagtaaagaaatcacagtaagttctattagtgatgatagaaccagatataaaattgttcagtgatggagaaaagaaacgataaatactttccaaggttatattgttaaattatcttaaattatcaaggtgtaagatgtaatgatcccaagagtttttatagaatcctaaaaaataacgcctgatgtatagattagttagcaaattctcagaaatcccccacataaaagccttactttgttcaaaatttattatagtggtttaatcattttagatttgaatgttttaagataggagagacttagcagaaaatacttggcttgccagggccacgttctacttcattgctttcttttataagtgcaaggagttatttccatcagttgacatagatattattcactaaaattttcagcagactcaaaatagagaggagactttaaacttacatgttagcataaaacagacttctctctcattgcatgcactagatcaatattatcatctgtattaagctatctgaatttattcgagacattaagaaaaagacagtacatggtgggaaagctgcacatttctcacaaggaaaaaaacattctatatttgtagcagaaatcagtggtttgaaaagtcatactttgcagatatgaacctgaaaatcaaagtgccattgttaaatcatcctaaagtgtactgtgggtattctccagcatacttgaaaatgaataaagttagattgctcacattgaagctaatggttgagacaagacacctgccagagtgaagtttgattcctatgggtgagaagatgtagatgactattgttctcactaaagttctaaaataatagcaagtgtagagaagagccgttgctttgaaaatacataccacatttgttataaagcatttgtttgttagtatcaatcacataggtagaaagagtttgagttttactgtggattaaaaagccttccctaaaaagagagcatgccagtcatagagacactaatttggcacttttcctccttcttaggtttaaatgttataccaatgcatgtgtttgaaatatccattaagatgatttaaaatttgtcttgtattttgagtttcttaaatgcgtggattcttgttcatttatctctgaatatgtctcttttatattttggcacaattatacacattggaaagggccaacctattagggctcaagtatgtatatgcaaaaaaaaaaagttatatcaaacaggcacagttattacaactagagagaaattccagaaatatttgtttttttaagagaaagtaaattttcacattagatttctattcaaagtactaatatctacatggtccacacttttctattttaaaaaattgtgttctcttgttaaatagattaacatttccacttctgtttatcacaaaagactgtatttgaaatatgcatacggaaaattgaaattatattagtaataaatgtaacttgaaaaatcaa

SEQ ID NO: 4749 - protein, 1255 aa, Homo sapiens
MGTGDFICISMTGGAPWGFRLQGGKEQKQPLQVAKIRNQSKASGSGLCEGDEVVSINGNPCADLTYPEVIKLMESITDSLQMLIKRPSSGISEALISENENKNLEHLTHGGYVESTTLQIRPATKTQCTEFFLAPVKTEVPLAENQRSGPDCAGSLKEETGPSYQRAPQMPDSQRGRVAEELILREKVEAVQPGPVVELQLSLSQERHKGASGPLVALPGAEKSKSPDPDPNLSHDRIVHINSIPTNEKADPFLRSSKIIQISSGRELRVIQESEAGDAGLPRVEVILDCSDRQKTEGCRLQAGKECVDSPVEGGQSEAPPSLVSFAVSSEGTEQGEDPRSEKDHSRPHKHRARHARLRRSESLSEKQVKEAKSKCKSIALLLTDAPNPNSKGVLMFKKRRRRARKYTLVSYGTGELEREADEEEEGDKEDTCEVAFLGASESEVDEELLSDVDDNTQVVNFDWDSGLVDIEKKLNRGDKMEMLPDTTGKGALMFAKRRERMDQITAQKEEDKVGGTPSREQDAAQTDGLRTTTSYQRKEEESVRTQSSVSKSYIEVSHGLGHVPQQNGFSGTSETANIQRMVPMNRTAKPFPGSVNQPATPFSPTRNMTSPIADFPAPPPYSAVTPPPDAFSRGVSSPIAGPAQPPPWPQPAPWSQPAFYDSSERIASRDERISVPAKRTGILQEAKRRSTTKPMFTFKEPKVSPNPELLSLLQNSEGKRGTGAGGDSGPEEDYLSLGAEACNFMQSSSAKQKTPPPVAPKPAVKSSSSQPVTPVSPVWSPGVAPTQPPAFPTSNPSKGTVVSSIKIAQPSYPPARPASTLNVAGPFKGPQAAVASQNYTPKPTVSTPTVNAVQPGAVGPSNELPGMSGRGAQLFAKRQSRMEKYVVDSDTVQAHAARAQSPTPSLPASWKYSSNVRAPPPVAYNPIHSPSYPLAALKSQPSAAQPSKMGKKKGKKPLNALDVMKHQPYQLNASLFTFQPPDAKDGLPQKSSVKVNSALAMKQALPPRPVNAASPTNVQASSVYSVPAYTSPPSFFAEASSPVSASPVPVGIPTSPKQESASSSYFVAPRPKFSAKKSGVTIQESGRSLSLPGRSVPPPISTSPWVYQPTYSYSSKPTDGLEKANKRPTPWEAAAKSPLGLVDDAFQPRNIQESIVANVVSAARRKVLPGPPEDWNERLSYIPQTQKAYMGSCGRQEYNVTANNNMSTTSQYGSQLPYAYYRQASRNDSAIMSMETRSDYCLPVSVNTSLLADP

SEQ ID NO: 4750 - DNA, 7291 bp, Homo sapiens
ccattagccgcacaaattcgcagcaggcggctggggcggcggctggggcagcggctgcagcagcggcggacgctctgcattacccagtcttgcgtcctcggcaggcgcccgaagctgagtgcgcatcctctaccgcacccaagcttcgtctgtctcgtcaagctcttcatgctgcccaactaaaaggaaaacatgggcacaggggattttatctgcatttccatgactggaggggcgccctgggggttcagattgcaaggtggcaaggagcagaagcagcccttacaagttgcaaagattcgaaatcagagcaaagcctctgggtctgggctctgtgagggagatgaagtggtttccatcaatggcaacccttgtgcagatctcacctaccctgaagtcatcaagctcatggaaagcataacagactctctccaaatgctcatcaaaagaccatccagtggaataagtgaggctttgatatctgaaaatgaaaacaaaaacctcgagcatctcacacatgggggttatgtggaaagtaccaccctgcagattcgaccggccacaaagacccagtgcacagaattcttcctcgcccctgtcaagactgaagttcccctagctgagaaccaaagaagtggtcccgactgtgcaggcagcttgaaagaagaaacaggcccgagctaccaaagggctccccaaatgcctgactcccaaagaggacgcgtggcagaagagctgatcttaagggagaaggtagaagcggtacagcctgggcctgtggttgagctgcaactgtccctttcacaggagagacataagggcgctagtggccctttagtggctctcccgggagctgaaaaatctaagtctcctgacccagaccctaacttgtcacatgacaggattgtccacataaattcgatccctactaatgagaaagcagaccctttcctgaggtccagcaagataatccagatctccagtggcagagagttgagagtgatccaggaaagtgaagcaggagatgcgggactgccccgggtggaagtgatcctcgactgctctgacaggcagaagacagaagggtgcaggcttcaggcaggaaaggagtgtgtggattctccagtggaaggagggcagtcagaagcacctccttctctggtatcctttgccgtctcatcagaaggcacagagcagggagaagatccacgctcggaaaaagatcacagcagacctcacaagcaccgagcgcggcatgcacggctcaggaggagtgaaagcctgtcagaaaaacaagtgaaggaagcaaaatctaaatgcaaaagcattgcccttcttctaacggatgctcccaaccccaactccaagggggtgttgatgtttaagaagcgacgtcggagggccaggaaatacaccctagttagctacggtactggcgagcttgagcgagaggcggacgaggaggaagaaggtgacaaggaggatacatgtgaagtagcatttcttggtgcaagcgaatcagaggtggatgaagagttattgtctgacgttgacgacaacacacaagttgtgaactttgactgggattctggactggtggacattgaaaagaaactgaacagaggggacaagatggagatgttaccagacaccacaggcaagggagccctcatgtttgccaagaggagggagagaatggatcagatcacagcccaaaaagaagaggacaaggtaggtggaacgccaagcagagaacaagatgctgcccagaccgatggcctgagaaccacgacttcttaccaaagaaaggaggaagagtcggtaagaacgcagagctctgtgagcaaaagctacatcgaggtgagtcatggtcttggccatgttccccaacagaatggcttcagtgggacatctgagacagcaaacatccagaggatggtccccatgaatagaacggccaaacccttcccagggtctgtgaatcagccagctacccccttctcgccaacccgaaacatgacgagtcccattgctgactttcctgcacctccaccttactctgcagtcactcctccccctgacgccttctccagaggggtttcaagtccgattgctggcccagcacagccccctccatggccccagcctgccccgtggtcccagccagccttttacgattcgtctgagcgaatagcttcccgagatgagaggatctcagtgccagcaaaaagaacaggaatattgcaggaggccaaaaggagaagcacgacaaaacccatgtttacttttaaagagcccaaagtaagcccaaatcctgaactcttgtcactccttcaaaattcagaaggcaaacggggcactggagctggaggtgattccggaccggaagaagactacctcagcttgggggcagaggcttgtaatttcatgcaaagctcctctgccaaacaaaagacccctcctcctgttgctccaaaacctgcagtcaagtcctcatcctcccaaccagtaactccagtttccccagtctggtctccaggagtggctcccacccaacctcctgccttccccacatccaacccatcaaagggcaccgttgtctcctccatcaaaatagcccagccttcttaccctcctgcccggcctgcaagtactttgaacgtggctggtcccttcaaaggaccacaagcagcagtagccagtcagaattacacacccaaaccaacagtttccacaccaacagtcaatgctgttcagcctggtgcagtgggaccatccaatgagcttccaggaatgagtgggagaggagctcagctctttgctaaaaggcagtcgagaatggagaagtatgtggtcgattcagacacggtgcaggcccacgctgctcgagctcagtctcccactccatctctcccggccagttggaagtactcctccaatgtccgagcacctcctcctgtggcctataatcctatccactcgccgtcttacccactggctgctctcaagtctcagccatcagctgcacagccctccaaaatgggcaagaaaaagggaaagaaacccctcaatgcattagatgtcatgaagcaccaaccgtatcagctcaatgcatccttgtttactttccaacctccagatgcaaaggatggcctcccccagaagtcatcagtcaaggtcaattcagccctggccatgaagcaagctcttcctccccggccagtgaatgctgcctcacctacgaatgtgcaggcttcgtcagtgtactcggtaccagcctatacctctcctccttccttctttgcagaggcctcctcaccagtcagtgcatccccagtgcctgtgggcattcccacctcgccaaagcaagaatcagcctcatcatcttattttgtggcaccaaggccaaagttctcagccaagaaaagtggtgtcacaattcaggagagtgggcgctccctttctcttcctggaagatcagtcccaccccccatttctacatctccttgggtataccagcctacttatagttactctagtaaaccaaccgatggactagagaaagcaaacaagagaccaactccttgggaagcagcagcaaagtctcctctcggtctagtggatgatgctttccaacccagaaacatccaggaatccattgtggcaaatgtggtttcagcagctcggaggaaggtgcttccagggcctccagaggattggaatgaaagactgtcctatattcctcaaacccagaaggcctatatgggctcatgtggaaggcaagagtataatgtcacagccaataataatatgtccaccacctcccaatatggttcacagttgccatatgcatattataggcaggcttcaagaaatgattctgcaatcatgtccatggaaaccaggtctgattactgtcttccagtagctgattacaactacaacccacacccaaggggatggagacgccaaacatgaaagttagaagaacggatcatgtgccaactgtagttttttaaaaaaaacgctcctttgtagggttttaaacttttctaatagatttagattcacttttggtcttggcttgttctcataagtcatttatctaagtttgtgtttctgtgtgtgtgtgtgtgtgtgtatgtatgtgaatatacacacacacacacacacaggtgagtgtgaatacttccttgttggctgatccatagagcattacttggaagaaaatttcactatttgcattgatgtgctggcatttatatgtaattcataattttgattccattaataggtagtctatgcaacaaactctactcaattaaagtaaaactaagtatttcttcattgtaccttagtccaggaagaaattaatggaatatggtgtgctaattatcactacctataacatgaggaatataacattgcagaaatttctcataggggcatgccagtgagcaattactttataaaaatattttccttggtgttaagtatttctctgcaacttttttttttttttttttttttttttgagatggagtcttgctctgtcccacccagtctggagtgcaatggtgcgatcttggctcactgcaacctgcgcctcctgggttcaagcaattctcctgcctcagcctcctgagtagctgggattacaggcatgaaccaccacacctggataatttttgtatttttagtagacacaaagtttcaccatgttggtcagactggtcttgaactcctgacctcgtgatctgcccgcctcagcctcccaaagtgctgggattacaggcgtgagccaccacacctggcctttctgcaacatttttttaaaaaaatctaataaatcttagatttttaaaaaagaattaaaatgtgggagttctcagaaagaaataaacacatgagaataagattattacacattttggaaggacttttgaggaatgatgtgatgtgtagagaatagaaagatttagatatatgcctgtgacaggaatagattctgggttcaggggtccccatctgtcaaatgagaagattggattatctaatcttttagatccttaacaactctgatattctgagattctctcatttgtagaatgcccgctgatgcattgtttattttttttgctcataatataaatatcagattatgtttaggagtggattaggtaattagtgtcactacatgtatcattaaaggtcctaaaaggaattgttaggcggcaggctttgtgttacgtgttacatggagtgagggtagatgtgaagatttaaaacgattgatggatttaaggaagtggtacataaatatgtctgttattatgcaatcgtaggtcatgataatttattcagttatagaaaacatgccacagaagcctatgtaacaagtggtgcttctttagaaagttgtcattagaatgttctgaggaagttaagcagctgcttcatcaatcccatgacacatgccttgttagcatgcccatcaaataatcagatcaaacacctgctccttattgccatacccacgaactgttaaatataaaaaaattcaaagtatttgacatcttaagcaaatatccagaatatttttaagtaaaaaaccatcttaagtattcaaaatttccttggttttttaaaggtgataattttgctttgtgttacttttttgctcttgaatgtatcgttatgatggtctcttataatcatggtatctttcacagaataaaaattaaaaataatgccagggtgcaagtgaccaaggccttatcttgaaagttaaaaaaaaaaagtaaagaaatcacagtaagttctattagtgatgatagaaccagatataaaattgttcagtgatggagaaaagaaacgataaatactttccaaggttatattgttaaattatcttaaattatcaaggtgtaagatgtaatgatcccaagagtttttatagaatcctaaaaaataacgcctgatgtatagattagttagcaaattctcagaaatcccccacataaaagccttactttgttcaaaatttattatagtggtttaatcattttagatttgaatgttttaagataggagagacttagcagaaaatacttggcttgccagggccacgttctacttcattgctttcttttataagtgcaaggagttatttccatcagttgacatagatattattcactaaaattttcagcagactcaaaatagagaggagactttaaacttacatgttagcataaaacagacttctctctcattgcatgcactagatcaatattatcatctgtattaagctatctgaatttattcgagacattaagaaaaagacagtacatggtgggaaagctgcacatttctcacaaggaaaaaaacattctatatttgtagcagaaatcagtggtttgaaaagtcatactttgcagatatgaacctgaaaatcaaagtgccattgttaaatcatcctaaagtgtactgtgggtattctccagcatacttgaaaatgaataaagttagattgctcacattgaagctaatggttgagacaagacacctgccagagtgaagtttgattcctatgggtgagaagatgtagatgactattgttctcactaaagttctaaaataatagcaagtgtagagaagagccgttgctttgaaaatacataccacatttgttataaagcatttgtttgttagtatcaatcacataggtagaaagagtttgagttttactgtggattaaaaagccttccctaaaaagagagcatgccagtcatagagacactaatttggcacttttcctccttcttaggtttaaatgttataccaatgcatgtgtttgaaatatccattaagatgatttaaaatttgtcttgtattttgagtttcttaaatgcgtggattcttgttcatttatctctgaatatgtctcttttatattttggcacaattatacacattggaaagggccaacctattagggctcaagtatgtatatgcaaaaaaaaaaagttatatcaaacaggcacagttattacaactagagagaaattccagaaatatttgtttttttaagagaaagtaaattttcacattagatttctattcaaagtactaatatctacatggtccacacttttctattttaaaaaattgtgttctcttgttaaatagattaacatttccacttctgtttatcacaaaagactgtatttgaaatatgcatacggaaaattgaaattatattagtaataaatgtaacttgaaaaatcaa

SEQ ID NO: 4751 - protein, 1261 aa, Homo sapiens
MGTGDFICISMTGGAPWGFRLQGGKEQKQPLQVAKIRNQSKASGSGLCEGDEVVSINGNPCADLTYPEVIKLMESITDSLQMLIKRPSSGISEALISENENKNLEHLTHGGYVESTTLQIRPATKTQCTEFFLAPVKTEVPLAENQRSGPDCAGSLKEETGPSYQRAPQMPDSQRGRVAEELILREKVEAVQPGPVVELQLSLSQERHKGASGPLVALPGAEKSKSPDPDPNLSHDRIVHINSIPTNEKADPFLRSSKIIQISSGRELRVIQESEAGDAGLPRVEVILDCSDRQKTEGCRLQAGKECVDSPVEGGQSEAPPSLVSFAVSSEGTEQGEDPRSEKDHSRPHKHRARHARLRRSESLSEKQVKEAKSKCKSIALLLTDAPNPNSKGVLMFKKRRRRARKYTLVSYGTGELEREADEEEEGDKEDTCEVAFLGASESEVDEELLSDVDDNTQVVNFDWDSGLVDIEKKLNRGDKMEMLPDTTGKGALMFAKRRERMDQITAQKEEDKVGGTPSREQDAAQTDGLRTTTSYQRKEEESVRTQSSVSKSYIEVSHGLGHVPQQNGFSGTSETANIQRMVPMNRTAKPFPGSVNQPATPFSPTRNMTSPIADFPAPPPYSAVTPPPDAFSRGVSSPIAGPAQPPPWPQPAPWSQPAFYDSSERIASRDERISVPAKRTGILQEAKRRSTTKPMFTFKEPKVSPNPELLSLLQNSEGKRGTGAGGDSGPEEDYLSLGAEACNFMQSSSAKQKTPPPVAPKPAVKSSSSQPVTPVSPVWSPGVAPTQPPAFPTSNPSKGTVVSSIKIAQPSYPPARPASTLNVAGPFKGPQAAVASQNYTPKPTVSTPTVNAVQPGAVGPSNELPGMSGRGAQLFAKRQSRMEKYVVDSDTVQAHAARAQSPTPSLPASWKYSSNVRAPPPVAYNPIHSPSYPLAALKSQPSAAQPSKMGKKKGKKPLNALDVMKHQPYQLNASLFTFQPPDAKDGLPQKSSVKVNSALAMKQALPPRPVNAASPTNVQASSVYSVPAYTSPPSFFAEASSPVSASPVPVGIPTSPKQESASSSYFVAPRPKFSAKKSGVTIQESGRSLSLPGRSVPPPISTSPWVYQPTYSYSSKPTDGLEKANKRPTPWEAAAKSPLGLVDDAFQPRNIQESIVANVVSAARRKVLPGPPEDWNERLSYIPQTQKAYMGSCGRQEYNVTANNNMSTTSQYGSQLPYAYYRQASRNDSAIMSMETRSDYCLPVADYNYNPHPRGWRRQT

SEQ ID NO: 4752 - DNA, 556 bp, Homo sapiens
ttagccgcacaaattcgcagcaggcggctggggcggcggctggggcagcggctgcagcagcggcggacgctctgcattacccagtcttgcgtcctcggcaggcgcccgaagctgagtgcgcatcctctaccgcacccaagcttcgtctgtctcgtcaagctcttcatgctgcccaactaaaaggaaaacatgggcacaggggattttatctgcatttccatgactggaggggcgccctgggggttcagattgcaaggtggcaaggagcagaagcagcccttacaagttgcaaagattcgaaatcagagcaaagcctctgggtctgggctctgtgagggagatgaagtggtttccatcaatggcaacccttgtgcagatctcacctaccctgaagtcatcaagctcatggaaagcataacagactctctccaaatgctcatcaaaagcaatttttaggacttttcctcctgttggaaatttgatgagcatgaagaaaaagcttaatggaagaaacaaatccgaggagagagtttatggaaaatggagaaaggacaat

SEQ ID NO: 4753 - protein, 88 aa, Homo sapiens
MGTGDFICISMTGGAPWGFRLQGGKEQKQPLQVAKIRNQSKASGSGLCEGDEVVSINGNPCADLTYPEVIKLMESITDSLQMLIKSNF

SEQ ID NO: 4754 - DNA, 8520 bp, Homo sapiens
cttgtggaaattgttgattacccggacgtcttaaaaccaagaaacctgtgaacaggttcattaagaatctgctgtcttgaaaaatgcatattatgaatgctttgaattaagaaggtgttaacagtggttgtcatttctgccacataagagactataatctgaaacagttcctggcagttgcccagatgcctgaaactggcacgatctagtactcttgagtgatcatccttcaacgagaaatacagagctacttacatactgtacctcataccgtataaatgtaatctctctgatgccatttaatgcagtggacctcttttcagaatctaattgtcagatgcagaattaacacttggaatctggagaagcattttgtacaaattgaaagattgggttttttctttagttttccacatgtattgtctcatctctgttcttgaaacatccacaatcacataaactccagttataaccatggagttatgtgactcattaaaatttaggaaaagtgttgctgagctgtggaatcaggcgtttctccctcagttcaacaactaatacatagactgctgatcaagaataaggaaccaaataaagtcatgcacgttctgttgacagaggaactctgtggctgttgaattttactgtaactagttactctgtcttcagagtcaacttaatatacaagttatgtcataatggatggaaagacctgtgttgatgtatccagactctagcaaatgaagataaaaaacccgttatgactaatccttgggaagagaaagtctgcaaaatggctcaaaccagtttactgcaagggaagcagttttactgtagggagtgggttttccacaagcttcagcattgcctccaggagaaaagtaactgctgcaatagtgctgtcaatgcaccatcacttgtaatgaattctgggaataatgctagtggtgtctctggaaagggagctgcctggggtgtgttgttggtaggagggcctggcagtggcaagacggccctatgtactgaactcttatggccaagttcacctgcaagtttgcagagaggtttacatcgccaagctttggcctttcatttctgcaaagcccaggactctgatactttgtgtgttggagggtttattagaggtctagtagcccagatctgccgcagtggactactccaaggatatgaggacaagctaagggatccagcagtccaaagcctcttacagcctggggagtgcgagagaaacccagccgaagcatttaaaaggtgtgttctactccctcttctgggaatgaagcctccccagcaaagcctatacctgcttgttgattctgttgatgaagggtgtaacattactgaaggtgaacaaacgtctaccagcttatctgggactgttgcagcacttttagctggtcaccatgagttctttccaccatggctattgcttctctgttctgcccgaaagcagagtaaggctgttactaaaatgtttactggttttcgaaaaataagtttagatgaccttcggaaggcatatatcgtcaaggatgttcagcagtacattcttcatcgtttagatcaagaagaagctttgcgacaacacctcacaaaagaaactgcagagatgttaaatcaactgcacattaaaagcagtggatgctttctttacctagaacgagttttagatggagttgtagaaaattttattatgttaagagaaattcgtgacatcccaggaactctaaatggtttatatctctggctgtgccaaagactttttgtaagaaaacaatttgcaaaggttcagcctattttgaatgtgattcttgcagcctgccgacctttgaccataacggaattatatcacgcagtatggaccaaaaacatgtcgttaactttggaagattttcaacgcaagttagatatcctctccaaacttcttgttgatggactaggaaatacaaaaatactgtttcattatagttttgccgagtggcttctggatgtgaaacactgtactcagaagtatttatgtaatgcagcagaaggacacagaatgttggctatgagttatacctgtcaagccaagaatttaacaccattggaagcacaagaatttgcattgcacttaattaactcaaacttacaattagagacagcggagttagctctgtggatgatatggaatggtacacctgtcagagattccctttctactttgatacccaaggaacaagaagtgctacagctgttggttaaagctggggctcatgtcaacagtgaagacgatcgcacatcatgcatagttcgacaagccttagaaagagaggattccattcggacattattagataatggagcttcagtaaatcagtgtgattcaaatgggagaacattattggctaatgctgcatatagtggcagtcttgatgtagtcaatttacttgtctctaggggagcagatttagagatagaagatgctcatggacatacaccactcactctagcggctagacagggacataccaaggtggttaattgtttgattgggtgtggagcaaatattaatcatactgatcaagatggttggacagcattaagatctgctgcttggggtggccatactgaggtagtttctgcactactttatgctggcgtaaaagtggattgtgcagatgctgatagccgaacagctttgagagcagcagcatggggaggacacgaggatattgtactgaatttgctacaacatggcgctgaagtgaacaaagctgataatgaaggtagaactgctttgatagcagcagcatacatgggacatagagagattgtggaacacctactggaccatggagcagaagtaaatcatgaggatgttgatggcaggactgcactctctgtagctgcactttgtgtgcctgcaagtaaagggcacgcatcagttgttagccttttaattgatcgaggtgctgaagtagatcattgtgataaagatggcatgactccactgctggtagctgcctatgaaggacatgttgatgtggttgacttgcttctagaagggggagcagatgtagatcacacagataacaatggccgtacacccctcttagcagcagcgtctatgggtcatgcatcagttgtaaatacacttttgttttggggtgcagctgtggatagtattgatagtgaaggtaggacagtcctcagtatagcttcagcacaaggaaatgttgaggtggtacgtactctactggatagagggttagatgaaaatcacagagatgatgctggatggacacctttgcacatggcagcttttgaagggcacagattgatatgtgaagcacttattgaacaaggtgctagaacaaatgagattgacaatgatggacgaatccctttcatattagcttcacaagagggtcattatgattgtgttcaaatattactggaaaacaaatccaacattgatcaaagaggttatgatggaagaaatgcactgcgggttgctgcattagaagggcacagggacattgttgaattgctttttagccatggtgctgatgttaactgcaaagatgctgatggtcggcctacactttatatcttggccttagaaaatcagcttacaatggccgaatattttttagaaaatggtgcaaacgtagaagcaagtgatgctgaaggaaggacagcacttcatgtgtcttgttggcaaggccatatggaaatggtgcaggtcctgatagcataccatgctgacgtcaatgctgcagacaatgaaaagcgctctgctttgcagtctgcagcctggcagggccatgtaaaagtggttcagcttctgattgagcatggtgctgtagttgaccatacatgtaaccaaggtgcaactgcactctgtattgcagcccaggaagggcacattgatgttgttcaggtcttattagagcatggtgctgatccaaaccatgctgatcaatttggacgcactgctatgcgtgttgcagccaaaaatggacattctcagataattaaattattagaaaaatatggtgcatctagtttgaatggctgttccccatctcctgttcacacaatggagcaaaaacctctacagtcattgtcttcaaaagtgcagtcattaacaattaaatcaaatagctctggtagtactggtggaggggatatgcagccttcgttacgtggtttacctaatgggcctactcatgcttttagttctccttcagaatctccagattctacagttgaccggcagaagtcatcactgtcaaataattccctgaaaagctcaaaaaattcatctttgagaactacttcatctacagcaacggctcaaacagtgccaattgatagctttcataacttgtcatttacagaacaaattcagcagcattcattgccacgcagtagaagtcgacagtcaattgtttccccatcttccacaacacagtccttaggacagagtcataattcaccaagtagtgaatttgagtggagtcaagtaaagcccagtttgaagtcaactaaagcaagtaaaggggggaaatcagaaaattctgccaagtctggatcagctgggaaaaaagcgaaacaaagtaattcttcacagccaaaggttttagaatatgaaatgactcagtttgatagaagaggacctatagccaaatccgggactgctgcaccacctaaacaaatgccagcagaatctcaatgcaaaattatgataccttcagctcagcaggaaattggtcgatctcaacagcagtttcttattcaccaacaaagtggggaacagaagaagagaaatggaataatgacaaatccaaattatcatcttcagagcaaccaggtttttcttggtagggtttcagtcccacgaacaatgcaagatagagggcatcaggaagtgttggagggatacccttcctcagagacagaattaagccttaaacaagctctgaagcttcagattgaaggttctgaccctagcttcaactataaaaaggaaacaccattataaaagtttcctattctgtgaaacagaagacattgtgatggagtggttcttcagctactggatggaaacatatgcctgttgatttgctgaaaaaacaaaaaaaatgaagaatgtgatctctgcagtacagttaccttaattactgtaatgtgcctaaatagtaaggctgccttctcaatgtaaccctctgtgcttaaaaaatttcattttgtgtgctttgtattcactacacaggaataagcactttttaaaaatgcagatacatactgcagttccctgataaaagctgaaaagaaaatttgagtattttaagttaagatgtgataaaaaatgtgcatgtgccataatcaaatatatatgaaaaggcagtgttccttgtatttatttttttttctttttgtggcaaaagaaacttaaacatactgtttcagtcacattgcattgtagtgtatggcctgtttcttgtatctttaaagacgttgctcaataaaacaaatcttgcaactgttctatgttcactacaccttcagcattggataaaaatcattttctatataaatatcacattgaaatgaaaaaatgatttcttggcagtttaaaaaaaatattttatagtagtttagggagctgctttaagtagtttaaatctggattttcccagtagaattcttctcatctctggctaaacatgtcagaacaaacaaccaaccagtctgtaggcagaacaaagtcctatttcatccgctgggatacaatttcatcttccattcactttgtcattccacctctaagaagacagactatcattcctgaggcatgaaaattctcagggacaaagccatgcctcagtcacatgtgtgtgcagagagaaatgcacctgtctatctaagggtagatttttgatccctgaataattcattgactaaactgacctcttcctcctggctaaataaattaattttgctggcttctctctcagcggtttctattttgtaaattgctgcatgaccaaaatagccccactcaaaatcaattggattaattttaatggtttggttggatgaatattctggatgaatataaaatgtgctgcccttcacagatgacaccactcccctgtcaatcatagcacatgtgtactttttattgttacttaatagtgatggatttgcacttttctatcctcatactctttcctgttttcttctttgtacaattgcatgcaggagggctggatgccagggttaagagagaaattcatgacaaggaaggtaaaattggttcaaatgagcatgtgtcccacagccttagtctccttactcttaaatcagtggagctgtagcttagatgggtcgtttatatgtctggaaaagttgtcataacagtttagaagccaaggttgtggatttgatcttagaatgggcctgttaatcttatagaacccagaaattctgttcttttcatgtactgttgatgaggaatgaggaaagagaatttggagattcagcacaaaaccattgctacttctagaacaaaatctttagaatatgtcctaataacaaaggtcagtaatgtcatcttcatatatgaaggacacatgtgatacattgttcgtggaaatagaaatgtataattatgataaatgtttcacttgaatcttattgtaaggcttttcttgcttttattttttaaagtcagcaaaactcattttgtctgtcatctataagtcatagtgaggactacgagataagttgataagttcaattgatattaaggtgacatggcaatattaataactcaaatgtgaatgtttcaagtattgaattcttgtccctatgggacatttattaaataaaattaatgggactcttgcaaagtagccttaaaagtgttaatgagtctattaataaatatgaacacatactattattagaaccaactttactcatatctcaaatacagtacatttacattactgtagaggatgaagctctaatttctattacatgtaattttctttagaaagagaaccctgaaagctgccagtttttctattaactttgaattattgaaattgtatttatttaattttattgtttttacaaaattgcaccttgtgtccaaagggcgaagatatgacattgcataagggatttatgtttttcaaagagctaactgttttcatatccatactatatacacttgaagcaattggtaggaagagaacctattggaaaaatacgattttcaaaagtaagtattcctcgggatgtttttatataaattatgttttggaatagaacataaatgactttgagttaggataaggatgataggatgggtgctggagatgccctgccttgcttatttgtttctgtgggggatttaatactataaatgaaaatggcttctgctccattaaaaagtaaaaattgtcctccaaatataaaactccttaatagatatttttgaaattaaaatctttaaattttataaatcagctgttgccactacacaactatgatggcatgtgcttataacatttttataacattccgtctgtgtctattccctaaatatcatgagtttataataaggaaagtgataaaaatacagtaatgaaataaaaatctgaatgtttctaagaaaggttttggaaggaaaaatgacctgaaatcagtgcgtactgcaaagtacagccaataatttttgttctttgttttcacccccaccctcactggaattctcaccaaaaatagtttgatacttaaaaaacagaagtaaatacttttctcaatattgttttggctatgcaaatatttgttttgcttaatgtcctccatttacacttctcagcaaatgtagttgcaaacaaatgctttctttttatttttcccttggtttgaggtatgtaaatagccaaaaatgtacattgaatttcacattgtaaaagttttattttatcccttgtatgatattactcaaaaaatccctgtgtatatgaaagtgcataataaatatatttgctttacagagaagatcttgttttaattttgtccttgaaccagtagaacatgcatgatatgcatatagcataaacaactgttagttgttttaagttattatcttaaataaatcctgagcaaatgaatttggaaacattttgcaaagaagaaagtgaaatataacactgtccaaaggaaggtagaaaaacaaagatttactgtttatgtcttcctaagcctttttaaagacttaatgttcttttcccccccgtgactgattatatactatatcacaccatgtcaggttttgtgcctctgagaattgcagtaatccaataacttttgtatatgtgtgctccttgatcatcagaatattatggccatcttatggcggatattttgggagtttattgcaaacatggtcattcattttctaaataaaatttgtgtgtttcttcactcagtaaa

SEQ ID NO: 4755 - protein, 1429 aa, Homo sapiens; identical to SEQ ID NO: 541

SEQ ID NO: 4756 - DNA, 8083 bp, Homo sapiens
cttgtggaaattgttgattacccggacgtcttaaaaccaagaaacctgtgaacaggttcattaagaatctgctgtcttgaaaaatgcatattatgaatgctttgaattaagaaggtgttaacagtggttgtcatttctgccacataagagactataatctgaaacagttcctggcagttgcccagatgcctgaaactggcacgatctagtactcttgagtgatcatccttcaacgagaaatacagagctacttacatactgtacctcataccgtataaatgtaatctctctgatgccatttaatgcagtggacctcttttcagaatctaattgtcagatgcagaattaacacttggaatctggagaagcattttgtacaaattgaaagattgggttttttctttagttttccacatgtattgtctcatctctgttcttgaaacatccacaatcacataaactccagttataaccatggagttatgtgactcattaaaatttaggaaaagtgttgctgagctgtggaatcaggcgtttctccctcagttcaacaactaatacatagactgctgatcaagaataaggaaccaaataaagtcatgcacgttctgttgacagaggaactctgtggctgttgaattttactgtaactagttactctgtcttcagagtcaacttaatatacaagttatgtcataatggatggaaagacctgtgttgatgtatccagactctagcaaatgaagataaaaaacccgttatgactaatccttgggaagagaaagtctgcaaaatggctcaaaccagtttactgcaagggaagcagttttactgtagggagtgggttttccacaagcttcagcattgcctccaggagaaaagtaactgctgcaatagtgctgtcaatgcaccatcacttgtaatgaattctgggaataatgctagtggtgtctctggaaagggagctgcctggggtgtgttgttggtaggagggcctggcagtggcaagacggccctatgtactgaactcttatggccaagttcacctgcaagtttgcagagaggtttacatcgccaagctttggcctttcatttctgcaaagcccaggactctgatactttgtgtgttggagggtttattagaggtctagtagcccagatctgccgcagtggactactccaaggatatgaggacaagctaagggatccagcagtccaaagcctcttacagcctggggagtgcgagagaaacccagccgaagcatttaaaaggtgtgttctactccctcttctgggaatgaagcctccccagcaaagcctatacctgcttgttgattctgttgatgaagggtgtaacattactgaaggtgaacaaacgtctaccagcttatctgggactgttgcagcacttttagctggtcaccatgagttctttccaccatggctattgcttctctgttctgcccgaaagcagagtaaggctgttactaaaatgtttactggttttcgaaaaataagtttagatgaccttcggaaggcatatatcgtcaaggatgttcagcagtacattcttcatcgtttagatcaagaagaagctttgcgacaacacctcacaaaagaaactgcagagatgttaaatcaactgcacattaaaagcagtggatgctttctttacctagaacgagttttagatggagttgtagaaaattttattatgttaagagaaattcgtgacatcccaggaactctaaatggtttatatctctggctgtgccaaagactttttgtaagaaaacaatttgcaaaggttcagcctattttgaatgtgattcttgcagcctgccgacctttgaccataacggaattatatcacgcagtatggaccaaaaacatgtcgttaactttggaagattttcaacgcaagttagatatcctctccaaacttcttgttgatggactaggaaatacaaaaatactgtttcattatagttttgccgagtggcttctggatgtgaaacactgtactcagaagtatttatgtaatgcagcagaaggacacagaatgttggctatgagttatacctgtcaagccaagaatttaacaccattggaagcacaagaatttgcattgcacttaattaactcaaacttacaattagagacagcggagttagctctgtggatgatatggaatggtacacctgtcagagattccctttctactttgatacccaaggaacaagaagtgctacagctgttggttaaagctggggctcatgtcaacagtgaagacgatcgcacatcatgcatagttcgacaagccttagaaagagaggattccattcggacattattagataatggagcttcagtaaatcagtgtgattcaaatgggagaacattattggctaatgctgcatatagtggcagtcttgatgtagtcaatttacttgtctctaggggagcagatttagagatagaagatgctcatggacatacaccactcactctagcggctagacagggacataccaaggtggttaattgtttgattgggtgtggagcaaatattaatcatactgatcaagatggttggacagcattaagatctgctgcttggggtggccatactgaggtagtttctgcactactttatgctggcgtaaaagtggattgtgcagatgctgatagccgaacagctttgagagcagcagcatggggaggacacgaggatattgtactgaatttgctacaacatggcgctgaagtgaacaaagctgataatgaaggtagaactgctttgatagcagcagcatacatgggacatagagagattgtggaacacctactggaccatggagcagaagtaaatcatgaggatgttgatggcaggactgcactctctgtagctgcactttgtgtgcctgcaagtaaagggcacgcatcagttgttagccttttaattgatcgaggtgctgaagtagatcattgtgataaagatggcatgactccactgctggtagctgcctatgaaggacatgttgatgtggttgacttgcttctagaagggggagcagatgtagatcacacagataacaatggccgtacacccctcttagcagcagcgtctatgggtcatgcatcagttgtaaatacacttttgttttggggtgcagctgtggatagtattgatagtgaaggtaggacagtcctcagtatagcttcagcacaaggaaatgttgaggtggtacgtactctactggatagagggttagatgaaaatcacagagatgatgctggatggacacctttgcacatggcagcttttgaagggcacagattgatatgtgaagcacttattgaacaaggtgctagaacaaatgagattgacaatgatggacgaatccctttcatattagcttcacaagagggtcattatgattgtgttcaaatattactggaaaacaaatccaacattgatcaaagaggttatgatggaagaaatgcactgcgggttgctgcattagaagggcacagggacattgttgaattgctttttagccatggtgctgatgttaactgcaaagatgctgatggtcggcctacactttatatcttggccttagaaaatcagcttacaatggccgaatattttttagaaaatggtgcaaacgtagaagcaagtgatgctgaaggaaggacagcacttcatgtgtcttgttggcaaggccatatggaaatggtgcaggtcctgatagcataccatgctgacgtcaatgctgcagacaatgaaaagcgctctgctttgcagtctgcagcctggcagggccatgtaaaagtggttcagcttctgattgagcatggtgctgtagttgaccatacatgtaaccaaggtgcaactgcactctgtattgcagcccaggaagggcacattgatgttgttcaggtcttattagagcatggtgctgatccaaaccatgctgatcaatttggacgcactgctatgcgtgttgcagccaaaaatggacattctcagataattaaattattagaaaaatatggtgcatctagtttgaatggctgttccccatctcctgttcacacaatggagcaaaaacctctacagtcattgtcttcaaaagtgcagtcattaacaattaaatcaaatagctctggtagtactggtggaggggatatgcagccttcgttacgtggtttacctaatgggcctactcatgcttttagttctccttcagaatctccagattctacagttgaccggcagaagtcatcactgtcaaataattccctgaaaagctcaaaaaattcatctttgagaactacttcatctacagcaacggctcaaacagtgccaattgatagctttcataacttgtcatttacagaacaaattcagcagcattcattgccacgcagtagaagtcgacagtcaattgtttccccatcttccacaacacagtccttaggacagagtcataattcaccaagtagtgaatttgagtggagtcaagtaaagcccagtttgaagtcaactaaagcaagtaaaggggggaaatcagaaaattctgccaagtctggatcagctgggaaaaaagcgaaacaaagtaattcttcacagccaaaggttttagaatatgaaatgactcagtttgatagaagaggacctatagccaaatccgggactgctgcaccacctaaacaaatgccagcagaatctcaatgcaaaattatgataccttcagctcagcaggaaattggtcgatctcaacagcagtttcttattcaccaacaaagtggggaacagaagaagagaaatggaataatgacaaatccaaattatcatcttcagagcaaccaggtttttcttggtagggtttcagtcccacgaacaatgcaagatagagggcatcaggaagtgttggagggatacccttcctcagagacagaattaagccttaaacaagctctgaagcttcagattgaaggttctgaccctagcttcaactataaaaaggaaacaccattataaaagtttcctattctgtgaaacagaagacattgtgatggagtggttcttcagctactggatggaaacatatgcctgttgatttgctgaaaaaacaaaaaaaatgaagaatgtgatctctgcagtacagttaccttaattactgtaatgtgcctaaatagtaaggctgccttctcaatgtaaccctctgtgcttaaaaaatttcattttgtgtgctttgtattcactacacaggaataagcactttttaaaaatgcagatacatactgcagttccctgataaaagctgaaaagaaaatttgagtattttaagttaagatgtgataaaaaatgtgcatgtgccataatcaaatatatatgaaaaggcagtgttccttgtatttatttttttttctttttgtggcaaaagaaacttaaacatactgtttcagtcacattgcattgtagtgtatggcctgtttcttgtatctttaaagacgttgctcaataaaacaaatcttgcaactgttctatgttcactacaccttcagcattggataaaaatcattttctatataaatatcacattgaaatgaaaaaatgatttcttggcagtttaaaaaaaatattttatagtagtttagggagctgctttaagtagtttaaatctggattttcccagtagaattcttctcatctctggctaaacatgtcagaacaaacaaccaaccagtctgtaggcagaacaaagtcctatttcatccgctgggatacaatttcatcttccattcactttgtcattccacctctaagaagacagactatcattcctgaggcatgaaaattctcagggacaaagccatgcctcagtcacatgtgtgtgcagagagaaatgcacctgtctatctaagggtagatttttgatccctgaataattcattgactaaactgacctcttcctcctggctaaataaattaattttgctggcttctctctcagcggtttctattttgtaaattgctgcatgaccaaaatagccccactcaaaatcaattggattaattttaatggtttggttggatgaatattctggatgaatataaaatgtgctgcccttcacagatgacaccactcccctgtcaatcatagcacatgtgtactttttattgttacttaatagtgatggatttgcacttttctatcctcatactctttcctgttttcttctttgtacaattgcatgcaggagggctggatgccagggttaagagagaaattcatgacaaggaaggtaaaattggttcaaatgagcatgtgtcccacagccttagtctccttactcttaaatcagtggagctgtagcttagatgggtcgtttatatgtctggaaaagttgtcataacagtttagaagccaaggttgtggatttgatcttagaatgggcctgttaatcttatagaacccagaaattctgttcttttcatgtactgttgatgaggaatgaggaaagagaatttggagattcagcacaaaaccattgctacttctagaacaaaatctttagaatatgtcctaataacaaaggtcagtaatgtcatcttcatatatgaaggacacatgtgatacattgttcgtggaaatagaaatgtataattatgataaatgtttcacttgaatcttattgtaaggcttttcttgcttttattttttaaagtcagcaaaactcattttgtctgtcatctataagtcatagtgaggactacgagataagttgataagttcaattgatattaaggtgacatggcaatattaataactcaaatgtgaatgtttcaagtattgaattcttgtccctatgggacatttattaaataaaattaatgggactcttgcaaagtagccttaaaagtgttaatgagtctattaataaatatgaacacatactattattagaaccaactttactcatatctcaaatacagtacatttacattactgtagaggatgaagctctaatttctattacatgtaattttctttagaaagagaaccctgaaagctgccagtttttctattaactttgaattattgaaattgtatttatttaattttattgtttttacaaaattgcaccttgtgtccaaagggcgaagatatgacattgcataagggatttatgtttttcaaagagctaactgttttcatatccatactatatacacttgaagcaattggtaggaagagaacctattggaaaaatacgattttcaaaagtaagtattcctcgggatgtttttatataaattatgttttggaatagaacataaatgactttgagttaggataaggatgataggatgggtgctggagatgccctgccttgcttatttgtttctgtgggggatttaatactataaatgaaaatggcttctgctccattaaaaagtaaaaattgtcctccaaatataaaactccttaatagatatttttgaaattaaaatctttaaattttataaatcagctgttgccactacacaactatgatggcatgtgcttataacatttttataacattccgtctgtgtctattccctaaatatcatgagtttataataaggaaagtgataaaaatacagtaatgaaataaaaatctgaatgtttctaagaaaggttttggaaggaaaaatgacctgaaatcagtgcgtactgcaaagtacagccaataatttttgttctttgttttcacccccaccctcactggaattctcaccaaaaatagtttgatacttaaaaaacagaagtaaatacttttctcaatattgttttggctatgcaaatatttgttttgcttaatgtcctccatttacacttctcagcaaatgtagttgcaaacaaatgctttctttttatttttcccttggtttgaggtatgtaaatagccaaaaatgtacattgaatttcacattgtaaaagttttattttatcccttgtatgatattactcaaaaaatccctgtgtatatgaaagtgcataataaatatatttgctttacagag

SEQ ID NO: 4757 - protein, 1429 aa, Homo sapiens; identical to SEQ ID NO: 541

SEQ ID NO: 4758 - DNA, 852 bp, Homo sapiens
agaataaggaaccaaataaagtcatgcacgttctgttgacagaggaactctgtggctgttgaattttactgtaactagttactctgtcttcagagtcaacttaatatacaagttatgtcataatggatggaaagacctgtgttgatgtatccagactctagcaaatgaagataaaaaacccgttatgactaatccttgggaagagaaagtctgcaaaatggctcaaaccagtttactgcaagggaagcagttttactgtagggagtgggttttccacaagcttcagcattgcctccaggagaaaagtaactgctgcaatagtgctgtcaatgcaccatcacttgtaatgaattctgggaataatgctagtggtgtctctggaaagggagctgcctggggtgtgttgttggtaggagggcctggcagtggcaagacggccctatgtactgaactcttatggccaagttcacctgcaagtttgcagagaggtttacatcgccaagctttggcctttcatttctgcaaagcccaggactctgatactttgtgtgttggagggtttattagaggtctagtagcccagatctgccgcagtggactactccaaggatatgaggacaagctaagggatccagcagtccaaagcctcttacagcctggggagtgcgagagaaacccagccgaagcatttaaaagttattagctaattgaagaggaagaagaagcaattagagctgtgtgtaaaaaccataccagccctgcttttctgattgacagaaggagccaatcactttgcattcccagtttacactttaataaaagagaaggctttagtctttctacttggaccat

SEQ ID NO: 4759 - protein, 172 aa, Homo sapiens [sequence omitted]

SEQ ID NO: 4760 - DNA, 454 bp, Homo sapiens
agttacttgtggaaattgttgattacccggacgtcttaaaaccaagaaacctgtgaacaggttcattaagaatctgctgtcttgaaaaatgcatattatgaatgctttgaattaagaaggtgttaacagtggttgtcatttctgccacataagagactataatctgaaacagttcctggcagttgcccagatgcctgaaactggcacgatctagtactcttgagtgatcatccttcaacgagaaatacagagctcttacagcctggggagtgcgagagaaacccagccgaagcatttaaaagttattagctaattgaagaggaagaagaagcaattagagctgtgtgtaaaaaccataccagccctgcttttctgattgacagaaggagccaatcactttgcattcccagtttacactttaataaaagagaaggctttagtctttctacttgga

SEQ ID NO: 4761 - protein, 36 aa, Homo sapiens [sequence omitted]

SEQ ID NO: 4762 - DNA, 1601 bp, Homo sapiens
gacggcggcggcggcggcggttggccggtgggggctggggcgagcacgaccgattctgctgggaaagctggaactggcagccgccgggggccaagaggaggatccggagctgggagcgtgccccgggcccggcggaggaggcggctgcagttggagtggagtcttgggagcgctgctggcagcgacttctcagcgaagcaagtgtctgagactgagagtccctaacagcggcagcggcggccacggcggcggctggggccgagttacttgtggaaattgttgattacccggacgtcttaaaaccaagaaacctgtgaacaggttcattaagaatctgctgtcttgaaaaatgcatattatgaatgctttgaattaagaaggtgttaacagtggttgtcatttctgccacataagagactataatctgaaacagttcctggcagttgcccagatgcctgaaactggcacgatctagtactcttgagtgatcatccttcaacgagaaatacagagctacttacatactgtacctcataccgtataaatgtaatctctctgatgccatttaatgcagtggacctcttttcagaatctaattgtcagatgcagaattaacacttggaatctggagaagcattttgtacaaattgaaagattgggttttttctttagttttccacatgtattgtctcatctctgttcttgaaacatccacaatcacataaactccagttataaccatggagttatgtgactcattaaaatttaggaaaagtgttgctgagctgtggaatcaggcgtttctccctcagttcaacaactaatacatagactgctgatcaagaataaggaaccaaataaagtcatgcacgttctgttgacagaggaactctgtggctgttgaattttactgtaactagttactctgtcttcagagtcaacttaatatacaagttatgtcataatggatggaaagacctgtgttgatgtatccagactctagcaaatgaagataaaaaacccgttatgactaatccttgggaagagaaagtctgcaaaatggctcaaaccagtttactgcaagggaagcagttttactgtagggagtgggttttccacaagcttcagcattgcctccaggagaaaagtaactgctgcaatagtgctgtcaatgcaccatcacttgtaatgaattctgggaataatgctagtggtgtctctggaaagggagctgcctggggtgtgttgttggtaggagggcctggcagtggcaagacggccctatgtactgaactcttatggccaagttcacctgcaagtttgcagagaggtttacatcgccaagctttggcctttcatttctgcaaagcccaggactctgatactttgtgtgttggagggtttattagaggtctagtagcccagatctgccgcagtggactactccaaggatatgaggacaagctaagggatccagcagtccaaagcctcttacagcctggggagtgcgagagaaacccagccgaagcatttaaaaggtaacaataaaaatgtcatggtgttcagatttctatgctgaaattaaattaatttttagttgt

SEQ ID NO: 4763 - protein, 171 aa, Homo sapiens
MTNPWEEKVCKMAQTSLLQGKQFYCREWVFHKLQHCLQEKSNCCNSAVNAPSLVMNSGNNASGVSGKGAAWGVLLVGGPGSGKTALCTELLWPSSPASLQRGLHRQALAFHFCKAQDSDTLCVGGFIRGLVAQICRSGLLQGYEDKLRDPAVQSLLQPGECERNPAEAFKR

SEQ ID NO: 4764 - DNA, 427 bp, Homo sapiens
caggcggcatgggtgaccctgaggcgactgtgctctgaggacccagagctacctgcaagggcaaagaatagagacagcagccagcaggatcgagttcccggccatctttctcacggaactatttgtagagcgcacgggaagataaatggcgcttcttgactttgaatgctgaccttccttatcggtcctgaaggctgggaagtccaagatgacagtgctggccaatcagttcctggtgagggccctcttcctggtttgcagaaggacaccttcatgttggagacagagaaagagatcaaaagaagctttagagtctttcctgttgctatcgacccattgagatcggctctgcagccagaggcctcgctgtgatccgccgaacgccagggattagtgaagattccacaagagatttgaacagtaccca

SEQ ID NO: 4765 - protein, 68 aa, Homo sapiens [sequence omitted]

SEQ ID NO: 4766 - DNA, 737 bp, Homo sapiens
gagctacagccctgcccgctggccgtgggagaggcttaaaacaaacgccggaagcaactcccagccccataaagatctgtgaccggcagccccagacctgcctgccttcctgacttctgttccagagcaaaggtcattcagccgcttgaatcagccttttccccccacccggtccccaactttgtttacccgataaggaaggtcagcattcaaagtcaagaagcgccatttatcttcccgtgcgctctacaaatagttccgtgagaaagatggccgggaactcgatcctgctggctgctgtctctattctctcggcctgtcagcaaagttattttgctttgcaagttggaaaggcaagattaaaatacaaagttacgcccccagcagtcactgggtcaccagagtttgagagagtatttcgggcacatttttgctacttgtctgggtctggtgtacatatatggccgtcacctatacttctggggatattcagaagctgctaaaaaacggatcaccggtttccgactgagtctggggattttggccttgttgaccctcctaggtgccctgggaattgcaaacagctttctggatgaatatctggacctcaatattgccaagaaactgaggcggcaattctaactttttctcttccctttaatacttgcagaagctgttcccaccatgaaggtaatatggtatcatttgttaaataaaaataaagtctttattctgtt

SEQ ID NO: 4767 - protein, 77 aa, Homo sapiens
MAGNSILLAAVSILSACQQSYFALQVGKARLKYKVTPPAVTGSPEFERVFRAHFCYLSGSGVHIWPSPILLGIFRSC

SEQ ID NO: 4768 - DNA, 717 bp, Homo sapiens
gagctacagccctgcccgctggccgtgggagaggcttaaaacaaacgccggaagcaactcccagccccataaagatctgtgaccggcagccccagacctgcctgccttcctgacttctgttccagagcaaaggtcattcagccgcttgaatcagccttttccccccacccggtccccaactttgtttacccgataaggaaggtcagcattcaaagtcaagaagcgccatttatcttcccgtgcgctctacaaatagttccgtgagaaagatggccgggaactcgatcctgctggctgctgtctctattctctcggcctgtcagcaaaacaaaactgtgtggagttttatcctatattcataattacattgtggatggctgggtggtatttcaaccaagtttttgctacttgtctgggtctggtgtacatatatggccgtcacctatacttctggggatattcagaagctgctaaaaaacggatcaccggtttccgactgagtctggggattttggccttgttgaccctcctaggtgccctgggaattgcaaacagctttctggatgaatatctggacctcaatattgccaagaaactgaggcggcaattctaactttttctcttccctttaatacttgcagaagctgttcccaccatgaaggtaatatggtatcatttgttaaataaaaataaagtctttattctgtttttcttgaa

SEQ ID NO: 4769 - protein, 79 aa, Homo sapiens
MAGWYFNQVFATCLGLVYIYGRHLYFWGYSEAAKKRITGFRLSLGILALLTLLGALGIANSFLDEYLDLNIAKKLRRQF

SEQ ID NO: 4770 - DNA, 818 bp, Homo sapiens
gagctacagccctgcccgctggccgtgggagaggcttaaaacaaacgccggaagcaactcccagccccataaagatctgtgaccggcagccccagacctgcctgccttcctgacttctgttccagagcaaaggtcattcagccgcttgaatcagccttttccccccacccggtccccaactttgtttacccgataaggaaggtcagcattcaaagtcaagaagcgccatttatcttcccgtgcgctctacaaatagttccgtgagaaagatggccgggaactcgatcctgctggctgctgtctctattctctcggcctgtcagcaaagttattttgctttgcaagttggaaaggcaagattaaaatacaaagttacgcccccagcagtcactgggtcaccagagtttgagagagtatttcgggcacaacaaaactgtgtggagttttatcctatattcataattacattgtggatggctgggtggtatttcaaccaagtttttgctacttgtctgggtctggtgtacatatatggccgtcacctatacttctggggatattcagaagctgctaaaaaacggatcaccggtttccgactgagtctggggattttggccttgttgaccctcctaggtgccctgggaattgcaaacagctttctggatgaatatctggacctcaatattgccaagaaactgaggcggcaattctaactttttctcttccctttaatacttgcagaagctgttcccaccatgaaggtaatatggtatcatttgttaaataaaaataaagtctttattctgtttttcttgaaa

SEQ ID NO: 4771 - protein, 147 aa, Homo sapiens; identical to SEQ ID NO: 545

SEQ ID NO: 4772 - DNA, 829 bp, Homo sapiens
gagctacagccctgcccgctggccgtgggagaggcttaaaacaaacgccggaagcaactcccagccccataaagatctgtgaccggcagccccagacctgcctgccttcctgacttctgttccagagcaaaggtcattcagccgcttgaatcagccttttccccccacccggtccccaactttgtttacccgataaggaaggtcagcattcaaagtcaagaagcgccatttatcttcccgtgcgctctacaaatagttccgtgagaaagatggccgggaactcgatcctgctggctgctgtctctattctctcggcctgtcagcaaagttattttgctttgcaagttggaaaggcaagattaaaatacaaagttacgcccccagcagtcactgggtcaccagagtttgagagagtatttcgggcacaacaaaactgtgtggagttttatcctatattcataattacattgtggatggctgggtggtatttcaaccaagtttttgctacttgtctgggtctggtgtacatatatggccgtcacctatacttctggggatattcagaagctgctaaaaaacggatcaccggtttccgactgagtctggggattttggccttgttgaccctcctaggtgccctgggaattgcaaacagctttctggatgaatatctggacctcaatattgccaagaaactgaggcggcaattctaactttttctcttccctttaatacttgcagaagctgttcccaccatgaaggcttgaagccacagtgcatggccagaaccagccagacctttggagttcaagaactcgagaggtgggtg

SEQ ID NO: 4773 - protein, 147 aa, Homo sapiens; identical to SEQ ID NO: 545

SEQ ID NO: 4774 - DNA, 850 bp, Homo sapiens
cccagccccataaagatctgtgaccggcagccccagacctgcctgccttcctgacttctgttccagagcaaaggtcattcagccgcttgaatcagccttttccccccacccggtccccaactttgtttacccgataaggaaggtcagcattcaaagtcaagaagcgccatttatcttcccgtgcgctctacaaatagttccgtgagaaagatggccgggaactcgatcctgctggctgctgtctctattctctcggcctgtcagcaaagttattttgctttgcaagttggaaaggcaagattaaaatacaaagttacgcccccagcagtcactgggtcaccagagtttgagagagtatttcgggcacagtaagtaatgcttcttccacccttcatggatctgtgcctgccatacagacacaattcctgactaggggaaagggatatggagaagaccctaagttcatgtgcaatatctagttataacaagtcactcttcacagccaagaccgttctcagaatccagaaagtttgaagggttcggggcatgaagtctctgcccacatctattaccaattcagcagggtatatttacagaaaaggctgggatctcaggagggactgctgtgtctcccaaggagggtcactgggtcaaagaggccccctggagccttgtgagaccacaatagtctgaagttggattcgttatgctacaattttctatcttattttttcctccctacttcaaaacagaggtagatcaggattaatcttttgccagtttctctgtgaaccatttcttaaaatcagaaacctgtaagaatgagaaagcttgccagctcacatgcatg

SEQ ID NO: 4775 - protein, 53 aa, Homo sapiens
MAGNSILLAAVSILSACQQSYFALQVGKARLKYKVTPPAVTGSPEFERVFRAQ

SEQ ID NO: 4776 - DNA, 798 bp, Homo sapiens
cccagccccataaagatctgtgaccggcagccccagacctgcctgccttcctgacttctgttccagagcaaaggtcattcagccgcttgaatcagccttttccccccacccggtccccaactttgtttacccgataaggaaggtcagcattcaaagtcaagaagcgccatttatcttcccgtgcgctctacaaatagttccgtgagaaagatggccgggaactcgatcctgctggctgctgtctctattctctcggcctgtcagcaaaacctactgctctgtcgcccgggctggagtgcagtggtgtgatctcagctcaactgcagcctctgcctcccaaggtcaagcaattctcctgcctcagcctcccgagtagctgggactacaggttattttgctttgcaagttggaaaggcaagattaaaatacaaagttacgcccccagcagtcactgggtcaccagagtttgagagagtatttcgggcacatttttgctacttgtctgggtctggtgtacatatatggccgtcacctatacttctggggatattcagaagctgctaaaaaacggatcaccggtttccgactgagtctggggattttggccttgttgaccctcctaggtgccctgggaattgcaaacagctttctggatgaatatctggacctcaatattgccaagaaactgaggcggcaattctaactttttctcttccctttaatacttgcagaagctgttcccaccatgaaggtaatatggtatcatttgttaaataaaaataaagtctttattctgtt

SEQ ID NO: 4777 - protein, 32 aa, Homo sapiens
MAGNSILLAAVSILSACQQNLLLCRPGWSAVV

SEQ ID NO: 4778 - DNA, 741 bp, Homo sapiens
cccagccccataaagatctgtgaccggcagccccagacctgcctgccttcctgacttctgttccagagcaaaggtcattcagccgcttgaatcagccttttccccccacccggtccccaactttgtttacccgataaggaaggtcagcattcaaagtcaagaagcgccatttatcttcccgtgcgctctacaaatagttccgtgagaaagatggccgggaactcgatcctgctggctgctgtctctattctctcggcctgtcagcaaaacaaaactgtgtggagttttatcctatattcataattacattgtggatggctgggtggtatttcaaccaagtttttgctacttgtctgggtctggtgtacatatatggccgtcacctatacttctggggatattcagaagctgctaaaaaacggatcaccggtttccgactgagtctggggattttggccttgttgaccctcctaggtgccctgggaattgcaaacagctttctggatgaatatctggacctcaatattgccaagaaactgaggcggcaattctaactttttctcttccctttaatacttgcagaagctgttcccaccatgaaggcttgaagccacagtgcatggccagaaccagccagacctttggagttcaagaactcgagaggtgggtgaaaactgccattgcctccacagactgtcttctccgtggaaagaagacctgagtcaccagggctgggaaacc

SEQ ID NO: 4779 - protein, 79 aa, Homo sapiens; identical to SEQ ID NO: 4769

SEQ ID NO: 4780 - DNA, 1016 bp, Homo sapiens
ttggctctccaacgccagcgccgcctctcgctcgccgagctccagccgaaggagaaggggggtaagtaaggaggtctctgtaccatggctcgtacaaagcagactgcccgcaaatcgaccggtggtaaagcacccaggaagcaactggctacaaaagccgctcgcaagagtgcgccctctactggaggggtgaagaaacctcatcgttacaggcctggtactgtggcgctccgtgaaattagacgttatcagaagtccactgaacttctggttcgcaaacttcccttccagcgtctggtgcgagaaattgctcaggactttaaaacagatctgcgcttccagagcgcagctatcggtgctttgcaggaggcaagtgaggcctatctggttggcctttttgaagacaccaacctgtgtgctatccatgccaaacgtgtaacaattatgccaaaagacatccagctagcacacagcatacgtggagaacgtgcttaagaatccactatgatgggaaacatttcattctcaaaaaaaaaaaaatttctcttcttcctgttattggtagttctgaacgttagataatttttttccatggggtcaaaaggtacctaagtatatgattgcgagtggaaaaataggggacagaaatcaggtattggcagtttttccattttcatttgtgtgtgaatttttaatataaatgcggagacgtaaagcattaatgcaagttaaaatgtttcagtgaacaagtttcagcggttcaactttataataattataaataaacctgttaaatttttctggacaatgccagcatttggatttttttaaaacaagtaaatttcttattgatggcaactaaatggtgcttgtagcatttttatcatacagtagattccatccattcactatacttttctaactgagttgtcctacatgcaagtacatgtttttaatgttgtctgtcttctgtgctgttcctgtaagtttgctattaaaatacattaaactattaa

SEQ ID NO: 4781 - protein, 136 aa, Homo sapiens [sequence omitted]

SEQ ID NO: 4782 - DNA, 2702 bp, Homo sapiens
ccagcccccagcacagcagcagatacccagtggcagctttgctccaagcagccagagccaagcctatgagcggaatgcccctcaggacgtgtcatacaattacagtggcgacggagctgggggttccttccctggcctcccggacggtgcagaccttgtggactccatcatcaaaggcgggccaggggacgagtggatgcaggagcttgatgaattgtttggtaacccctaatcaagagaggccccaagatccacaactcgagtggttaaagcttaaaaagtgaaaaagaaacaggatgttgacccatccttgttttttgtttttttgacccacgtaaactgagcaaaactgcagctggctgacaatggaagatccaggtgccaatccacagccccaccaggcctcatttcacctgattttcacacagcaatcgagatgagacgccatgcagatcccggctgcgagagagggagacacccggaggagcaggtgggaagatgaagccggccagagcccctctgcccagcatgccctgtgatcgcctggcccagcaggagctgcttcagccgagagggactattacccaagagaggtatcctcagcccctcctgccccaggtcgggagacagcagctttggagacacaaaagagacagagcctcagccagggagagtgagtcccccagaagaggctgggtggttgcacaggccaggtgcacaggttggaaatgcactgaactctgggtgccgagagatgtaaggctttgagacatgctactgaatttggagggcaggcacgaagaacagtgagattgtcaaaaggagacaaccacagatcctacaggactgtctgtctcctgccccatgatgaccctcaggaattgcaaaggctctgctgtcacaaggagagcaggctgagtttggagcagggtccatccggcagtcctgggacggcttccctctgctggtgcccctggtggcagtccctccaggtggggctggagcctgctggcgcccaatacaaaacccatacatccaggtgggtcacatctacttctggcggccgcagggcagggaaacccctactggaccctgtgtgtctgccagcctggagcctttgtctccagccctgcctttattcctccttgcctccacaccagcctccccttgcttctccttacagactatccaagaagtgaagcttatgtctttagggagccttgggcagagtccacataaatgcaggaagaacttagacaatgcctgaaatgcaaaggcgacactggagtcttctttctctaactggcgtgtgcttttttcctgtcccctcctccctccgtgtcctagacgctggctgccttctgtgcactcccaggcagatcactacggaagagtcggagcctgtggggttggactggccacactcagtcctgagaaggcgagttgccatggaaagctgggggcagaggtgtttttggagaggaggcggcaggcaaacattgcctttgacttgctctccgcgtacccggggttgtagagctgctcaggaaggggcaggatgtaaggccagaggtgcctggtgggtgagaagcccaggcaggggctgggcgccctctccgaagaggtggcagcagggtgaccctgaactccccaaatggggagtgatgccactggggaaactgagtggatcaaagagatgaaaccaaaaaaaagcaaacaaacaaatgagaagacacaaaacataattaccttttcctgaaaggtacaggaaataaatatataagcaatgatgagaaactggaggtggctaatggaagtgagacagacaggggtggggggctccattatcttttaaaagcttcctccaaatgctcagtactgggaccaactaataggtagattttaatatggtggttttgttttggttttgtttttactacggtgctgatgtatatgtaatgtctaaaaaaagttatttgtacataagtttttacaatactgcagatatcactgggtctactatctgtaaaaaatatacatataaatatatatatactgtttgtttaaaatagagtatttttatttcattccttaactcatcatcacagcagtggtattgcacttcagatgacatctaattactaatttgtactgtatgacctctggcaacttgctccattttattcagatttttctagttttctgtttttactttgtacattgagcattgcttatttccttttaagaaatgtacagaacgctgaaatgtagaaatgaagtgatgttgacataccacttttaaagaaaacaaaaacaaaaataaaagattatctgaatcaatccaaagtatagtttattttaagatcctcactggagctccaatcttaattaagcagacatattattcctgggttttaattaactgcagttcttttctcaaaattttgatatcattctttaaacatttatttaatgggagagatcaatcattcccagcctttgcattcaactgcacaactgatgatactttctgaatttactgccgcactctgaaggatgtggcaaagggaagggaggaaagtcaactttgcatggaacatagtgcaatccatttgtagattcagtaccataacaattccatttccaactagttcatctggaggtagggaggctccactggaaaaataaatatttttgtcaaa

SEQ ID NO: 4783 - protein, 146 aa, Homo sapiens
MPEMQRRHWSLLSLTGVCFFPVPSSLRVLDAGCLLCTPRQITTEESEPVGLDWPHSVLRRRVAMESWGQRCFWRGGGRQTLPLTCSPRTRGCRAAQEGAGCKARGAWWVRSPGRGWAPSPKRWQQGDPELPKWGVMPLGKLSGSKR

SEQ ID NO: 4784 - DNA, 2647 bp, Homo sapiens
ctccaaggctgcagagccttatgggaacagtccagcaaggactgcttcagccgagagggactattacccaagagaggtatcctcagcccctcctgccccaggtcgggagacagcagctttggagacacaaaagagacagagcctcagccagggagagtgagtcccccagaagaggctgggtggttgcacaggccaggtgcacaggttggaaatgcactgaactctgggtgccgagagatgtaaggctttgagacatgctactgaatttggagggcaggcacgaagaacagtgagattgtcaaaaggagacaaccacagatcctacaggactgtctgtctcctgccccatgatgaccctcaggaattgcaaaggctctgctgtcacaaggagagcaggctgagtttggagcagggtccatccggcagtcctgggacggcttccctctgctggtgcccctggtggcagtccctccaggtggggctggagcctgctggcgcccaatacaaaacccatacatccaggtgggtcacatctacttctggcggccgcagggcagggaaacccctactggaccctgtgtgtctgccagcctggagcctttgtctccagccctgcctttattcctccttgcctccacaccagcctccccttgcttctccttacagactatccaagaagtgaagcttatgtctttagggagccttgggcagagtccacataaatgcaggaagaacttagacaatgcctgaaatgcaaaggcgacactggagtcttctttctctaacgtgtagcgttgaatgaatatctgcctggaaccaagagggctgctctgatgtttgggagtcggttttttgtgagccacatctgatatttctgatatccccaggaaggagtggcctggaggtcactggttcaggctccctttgggcgaaatcctgggagtgatgctctaaaaatccacctttcccatcatccctactcatcagaaagacaaatataaaatcccagagaggtggaggagctaaaaaagcaattgctccaccttacaaatttggatagaaaggagatgtagtttatttcatatgggcaaagtagtcctcttccaaagtcctgtacagttgttctctgcaattgacgcacatctgccctaagcgaaatctgtcagaaggaatcaacaaggctccttgcctcccctcccaatcccccttttggaggacttgtggcttcggtgtcgtcctaagtgagagtggcgtgtgcttttttcctgtcccctcctccctccgtgtcctagacgctggctgccttctgtgcactcccaggcagatcactacggaagagtcggagcctgtggggttggactggccacactcagtcctgagaaggcgagttgccatggaaagctgggggcagaggtgtttttggagaggaggcggcaggcaaacattgcctttgacttgctctccgcgtacccggggttgtagagctgctcaggaaggggcaggatgtaaggccagaggtgcctggtgggtgagaagcccaggcaggggctgggcgccctctccgaagaggtggcagcagggtgaccctgaactccccaaatggggagtgatgccactggggaaactgagtggatcaaagagatgaaaccaaaaaaaagcaaacaaacaaatgagaagacacaaaacataattaccttttcctgaaaggtacaggaaataaatatataagcaatgatgagaaactggaggtggctaatggaagtgagacagacaggggtggggggctccattatcttttaaaagcttcctccaaatgctcagtactgggaccaactaataggtagattttaatatggtggttttgttttggttttgtttttactacggtgctgatgtatatgtaatgtctaaaaaaagttatttgtacataagtttttacaatactgcagatatcactgggtctactatctgtaaaaaatatacatataaatatatatatactgtttgtttaaaatagagtatttttatttcattccttaactcatcatcacagcagtggtattgcacttcagatgacatctaattactaatttgtactgtatgacctctggcaacttgctccattttattcagatttttctagttttctgtttttactttgtacattgagcattgcttatttccttttaagaaatgtacagaacgctgaaatgtagaaatgaagtgatgttgacataccacttttaaagaaaacaaaaacaaaaataaaagattatctgaatcaatccaaagtatagtttattttaagatcctcactggagctccaatcttaattaagcagacatattattcctgggttttaattaactgcagttcttttctcaaaattttgatatcattctttaaacatttatttaatgggagagatcaatcattcccagcctttgcattcaactgcacaactgatgatactttctgaatttactgccgcactctgaaggatgtggcaaagggaagggaggaaagtcaactttgcatggaacatagtgcaatccatttgtagattcagtaccataacaattccatttccaactagttcatctggaggtagggaggctccactggaaaaataaatatttttgtcaaa

SEQ ID NO: 4785 - protein, 76 aa, Homo sapiens [sequence omitted]

SEQ ID NO: 4786 - DNA, 6595 bp, Homo sapiens
ggtattccgataacgttccccccttttcttccccttgagcttttacagtttaaaaaaaggaaacaaaaaccaccccaaaatctccccccccgtttttttcgccccgtcgggatcgccgtttccatccatgtgcttgcgtctcccccgcgttccacttaaactattttaatccttggacccaaggaggaggctgataggggggtggataaaaaaagttcttccaaaatagtgtgcccggggagcaggatgggggatttcgcagcccccgctgctgccgcgaatggcagtagtatttgcatcaacagtagcctgaacagcagcctcggcggggccgggatcggtgtgaataatactcccaatagtactcccgctgctccgagtagcaatcacccggcagccggtggatgcggcggctccgggggccccggcggcggttcggcggccgttcccaagcacagcaccgtggtggagcggctccgccagcgcatcgagggctgccgtcggcaccacgtcaactgcgagaacaggtaccagcaggctcaggtggagcagctggagctggagcgccgggacaccgtgagcctctaccagcggaccctggagcagagggccaagaaatcgggcgccggcaccggcaaacagcagcacccgagcaaaccccagcaagatgcggaggctgcctcggcggagcagaggaaccacacgctgatcatgctacaagagactgtgaaaaggaagttggaaggagctcgatcaccacttaatggagaccagcagaatggtgcttgtgatgggaatttttctccgactagcaaacgaattcgaaaggacatttctgcggggatggaagccatcaacaatttgcccagtaacatgccactgccttcagcttctcctcttcaccaacttgacctgaaaccttctttgcccttgcagaacagtggaactcacactcctgggcttctagaagatctaagtaagaatggtaggctccctgagattaaacttcctgtcaacggttgcagtgacctggaggatagcttcaccatcttgcagagcaaagacctcaaacaagaacctctcgatgaccctacttgcatagacacatcagaaacatctctttcaaatcagaacaagctgttctcagacattaatctgaatgatcaggagtggcaagaattaatagatgaattggccaacacggttcctgaggatgacatacaggacctgttcaacgaagactttgaagagaagaaggagccagaattctcgcagccagcaactgagacccctctctcccaggagagtgcgagcgtgaagagcgacccctctcactctcccttcgcacatgtctccatgggatctccccaggcgaggccttcttcttctggtcctcccttttctactgtctccacggccactagtttaccttctgttgccagcactcccgcagctccaaaccctgcaagctcaccagcaaactgtgctgtccagtcccctcaaactccaaaccaagcccacactccaggccaagctccacctcggcctggaaatggttatctcctgaatccggcagcagtgacagtggccggttcagcgtcagggcctgtggctgtgcccagctctgacatgtctccagcagaacagctcaaacagatggctgcacagcagcaacaaagggccaaactcatgcagcagaaacagcaacagcaacagcagcagcagcagcagcagcagcagcagcagcagcagcagcagcagcagcagcagcaacagcactcaaatcagacttcaaattggtctcccttaggacctccctctagtccatatggagcagcttttactgcagaaaaaccaaatagcccaatgatgtacccccaagcctttaacaaccaaaaccctatagtgcctccaatggcaaacaacctgcagaagacaacaatgaataactacctccctcagaatcacatgaatatgatcaatcagcagccaaataacttgggtacaaactccttaaacaaacagcacaatattctgacttatggcaacactaaacccctgacccacttcaatgcagacctgagtcagaggatgacaccaccagtggccaaccccaacaaaaaccccttgatgccgtatatccagcagcagcaacagcagcagcaacagcaacagcagcagcagcagcagcagcagccgccacctccacagctccaggcccccagggcacacctgagcgaagaccagaaacgcctgcttctcatgaagcagaaaggagtgatgaatcagcccatggcttacgctgcacttccatcccacggtcaggagcagcatccagttggacttccccgaaccacaggccccatgcagtcctccgtgcccccaggctcaggtggcatggtctcaggagccagtcccgcaggccccggcttcctgggcagccagccccaagcagccatcatgaagcagatgctcattgatcagcgggcccagttgatagagcagcagaagcaacagttcctgcgggagcaaaggcagcagcagcagcagcagcagcagcagattttggcggaacagcagttgcagcaatcacatctaccccggcagcacctccagccacagcggaatccatacccagtgcagcaggtcaatcagtttcaaggttctccccaggatatagcagccgtaagaagccaagcagccctccagagcatgcgaacgtcacggctgatggcacagaacgcaggcatgatgggaataggaccctcccagaaccctgggacgatggccaccgcagctgcgcagtcggagatgggactggccccttatagcaccacgcctaccagccaaccaggaatgtacaatatgagcacaggcatgacccaaatgttgcagcatccaaaccaaagtggcatgagcatcacacataaccaagcccagggaccgaggcaacctgcctctgggcagggggttggaatggtgagtggctttggtcagagcatgctggtgaactcagccattacccagcaacatccacagatgaaagggccagtaggccaggccttgcctaggccccaagcccctccaaggctgcagagccttatgggaacagtccagcaaggagcacaaagctggcaacagaggagcttgcagggcatgcctgggaggactagtggagaattgggaccattcaacaatggcgccagctaccctcttcaagctgggcagccgagactgaccaagcagcacttcccacagggactgagccagtcagtcgtggatgctaacacgggcacagtgaggaccctcaacccagctgccatgggtcggcagatgatgccatcgctcccggggcagcaaggcaccagccaggcgaggccaatggtcatgtctggcctgagccagggagtcccaggcatgccagcgttcagccagcccccagcacagcagcagatacccagtggcagctttgctccaagcagccagagccaagcctatgagcggaatgcccctcaggacgtgtcatacaattacagtggcgacggagctgggggttccttccctggcctcccggacggtgcagaccttgtggactccatcatcaaaggcgggccaggggacgagtggatgcaggagcttgatgaattgtttggtaacccctaatcaagagaggccccaagatccacaactcgagtggttaaagcttaaaaagtgaaaaagaaacaggatgttgacccatccttgttttttgtttttttgacccacgtaaactgagcaaaactgcagctggctgacaatggaagatccaggtgccaatccacagccccaccaggcctcatttcacctgattttcacacagcaatcgagatgagacgccatgcagatcccggctgcgagagagggagacacccggaggagcaggtgggaagatgaagccggccagagcccctctgcccagcatgccctgtgatcgcctggcccagcaggagctgcttcagccgagagggactattacccaagagaggtatcctcagcccctcctgccccaggtcgggagacagcagctttggagacacaaaagagacagagcctcagccagggagagtgagtcccccagaagaggctgggtggttgcacaggccaggtgcacaggttggaaatgcactgaactctgggtgccgagagatgtaaggctttgagacatgctactgaatttggagggcaggcacgaagaacagtgagattgtcaaaaggagacaaccacagatcctacaggactgtctgtctcctgccccatgatgaccctcaggaattgcaaaggctctgctgtcacaaggagagcaggctgagtttggagcagggtccatccggcagtcctgggacggcttccctctgctggtgcccctggtggcagtccctccaggtggggctggagcctgctggcgcccaatacaaaacccatacatccaggtgggtcacatctacttctggcggccgcagggcagggaaacccctactggaccctgtgtgtctgccagcctggagcctttgtctccagccctgcctttattcctccttgcctccacaccagcctccccttgcttctccttacagactatccaagaagtgaagcttatgtctttagggagccttgggcagagtccacataaatgcaggaagaacttagacaatgcctgaaatgcaaaggcgacactggagtcttctttctctaacgtgtagcgttgaatgaatatctgcctggaaccaagagggctgctctgatgtttgggagtcggttttttgtgagccacatctgatatttctgatatccccaggaaggagtggcctggaggtcactggttcaggctccctttgggcgaaatcctgggagtgatgctctaaaaatccacctttcccatcatccctactcatcagaaagacaaatataaaatcccagagaggtggaggagctaaaaaagcaattgctccaccttacaaatttggatagaaaggagatgtagtttatttcatatgggcaaagtagtcctcttccaaagtcctgtacagttgttctctgcaattgacgcacatctgccctaagcgaaatctgtcagaaggaatcaacaaggctccttgcctcccctcccaatcccccttttggaggacttgtggcttcggtgtcgtcctaagtgagagtggcgtgtgcttttttcctgtcccctcctccctccgtgtcctagacgctggctgccttctgtgcactcccaggcagatcactacggaagagtcggagcctgtggggttggactggccacactcagtcctgagaaggcgagttgccatggaaagctgggggcagaggtgtttttggagaggaggcggcaggcaaacattgcctttgacttgctctccgcgtacccggggttgtagagctgctcaggaaggggcaggatgtaaggccagaggtgcctggtgggtgagaagcccaggcaggggctgggcgccctctccgaagaggtggcagcagggtgaccctgaactccccaaatggggagtgatgccactggggaaactgagtggatcaaagagatgaaaccaaaaaaaagcaaacaaacaaatgagaagacacaaaacataattaccttttcctgaaaggtacaggaaataaatatataagcaatgatgagaaactggaggtggctaatggaagtgagacagacaggggtggggggctccattatcttttaaaagcttcctccaaatgctcagtactgggaccaactaataggtagattttaatatggtggttttgttttggttttgtttttactacggtgctgatgtatatgtaatgtctaaaaaaagttatttgtacataagtttttacaatactgcagatatcactgggtctactatctgtaaaaaatatacatataaatatatatatactgtttgtttaaaatagagtatttttatttcattccttaactcatcatcacagcagtggtattgcacttcagatgacatctaattactaatttgtactgtatgacctctggcaacttgctccattttattcagatttttctagttttctgtttttactttgtacattgagcattgcttatttccttttaagaaatgtacagaacgctgaaatgtagaaatgaagtgatgttgacataccacttttaaagaaaacaaaaacaaaaataaaagattatctgaatcaatccaaagtatagtttattttaagatcctcactggagctccaatcttaattaagcagacatattattcctgggttttaattaactgcagttcttttctcaaaattttgatatcattctttaaacatttatttaatgggagagatcaatcattcccagcctttgcattcaactgcacaactgatgatactttctgaatttactgccgcactctgaaggatgtggcaaagggaagggaggaaagtcaactttgcatggaacatagtgcaatccatttgtagattcagtaccataacaattccatttccaactagttcatctggaggtagggaggctccactggaaaaataaatatttttgtcaaa

SEQ ID NO: 4787 - protein, 1138 aa, Homo sapiens
MGDFAAPAAAANGSSICINSSLNSSLGGAGIGVNNTPNSTPAAPSSNHPAAGGCGGSGGPGGGSAAVPKHSTVVERLRQRIEGCRRHHVNCENRYQQAQVEQLELERRDTVSLYQRTLEQRAKKSGAGTGKQQHPSKPQQDAEAASAEQRNHTLIMLQETVKRKLEGARSPLNGDQQNGACDGNFSPTSKRIRKDISAGMEAINNLPSNMPLPSASPLHQLDLKPSLPLQNSGTHTPGLLEDLSKNGRLPEIKLPVNGCSDLEDSFTILQSKDLKQEPLDDPTCIDTSETSLSNQNKLFSDINLNDQEWQELIDELANTVPEDDIQDLFNEDFEEKKEPEFSQPATETPLSQESASVKSDPSHSPFAHVSMGSPQARPSSSGPPFSTVSTATSLPSVASTPAAPNPASSPANCAVQSPQTPNQAHTPGQAPPRPGNGYLLNPAAVTVAGSASGPVAVPSSDMSPAEQLKQMAAQQQQRAKLMQQKQQQQQQQQQQQQQQQQQQQQQQQQQHSNQTSNWSPLGPPSSPYGAAFTAEKPNSPMMYPQAFNNQNPIVPPMANNLQKTTMNNYLPQNHMNMINQQPNNLGTNSLNKQHNILTYGNTKPLTHFNADLSQRMTPPVANPNKNPLMPYIQQQQQQQQQQQQQQQQQQPPPPQLQAPRAHLSEDQKRLLLMKQKGVMNQPMAYAALPSHGQEQHPVGLPRTTGPMQSSVPPGSGGMVSGASPAGPGFLGSQPQAAIMKQMLIDQRAQLIEQQKQQFLREQRQQQQQQQQQILAEQQLQQSHLPRQHLQPQRNPYPVQQVNQFQGSPQDIAAVRSQAALQSMRTSRLMAQNAGMMGIGPSQNPGTMATAAAQSEMGLAPYSTTPTSQPGMYNMSTGMTQMLQHPNQSGMSITHNQAQGPRQPASGQGVGMVSGFGQSMLVNSAITQQHPQMKGPVGQALPRPQAPPRLQSLMGTVQQGAQSWQQRSLQGMPGRTSGELGPFNNGASYPLQAGQPRLTKQHFPQGLSQSVVDANTGTVRTLNPAAMGRQMMPSLPGQQGTSQARPMVMSGLSQGVPGMPAFSQPPAQQQIPSGSFAPSSQSQAYERNAPQDVSYNYSGDGAGGSFPGLPDGADLVDSIIKGGPGDEWMQELDELFGNP

SEQ ID NO: 4788 - DNA, 5329 bp, Homo sapiens
agacagcagaaggatcactgggctggaagctctaacaggcattgccagcctagctacctgcagtttgaggcaagggcagggtcacttaccctgctgtctgaatgtctcctgggacaacaggaggctgcactcactggctgagttcagacagaagagggatcatcggactggaagctctggcaggtatggctagcctggttacccgtagtgagaatggagagggccacctgcccagctacacagatgtttcccaggacaacaggaggctgtgtccactgacagttcagacagaagtggaaccactggaccggaagctctagcaagtgttgcccacctggctactagtgagccttgaaaccagcgaaacaataatcaaagagcagttctgtcaaagaaaacaacataaatcaggtacagaatttcagagtgggatatcagatctttagtgtgaagatacatctacattaaaccaggaatcactagaactgacatttggacaagaaaatttggaaaattttaaaactgtgaaggttgatcatggaaattaaagaggaaggggcatcagaagaagggcagcactttcttcctacagcccaggccaatgatcccggggactgtcagttcacaagtatccagaagactccaaatgaaccgcagttggaattcatccttgcatgcaaggatctcgtggctcctgtccgtgatcgtaaactgaatacactggtgcagatctccgtaatccaccccgtggagcagagtctgacaagatactccagcaccgaaattgtggagggaacaagggacccactgtttttgactggtgtcacattcccatctgagtatcccatctatgaggagaccaaaataaaactaacagtctatgatgtcaaggataagtctcatgacaccgttcgaaccagtgtcctaccagaacataaggatcccccgccagaagttgggcgaagtttcttgggctatgccagttttaaagtgggagagctgctgaagtcaaaggagcaattgctggtcctgagcctgagaacttcagatggtggcaaagtggttggcaccatagaagtcagtgtcgtgaagatgggggagattgaggatggggaagccgaccacatcaccacagatgtacagggacaaaagtgtgccctggtatgtgaatgtacagccccggaaagtgtgagcggaaaagataacttaccttttttgaattcagtgttaaagaacccagtatgtaaattatatagatttcccacatctgacaataagtggatgcgaattcgagagcagatgtcagagagcattctttcctttcatattcctaaggaattgatttcccttcacattaaagaagatttgtgcagaaaccaggagataaaagaacttggtgagctttctccacattgggacaatctgcgaaaaaatgtccttactcactgtgatcaaatggtgaatatgtaccaagacattctgacagaacttagcaaggaaacagggtcctctttcaaatcaagcagcagcaaaggagagaaaacattagaatttgttccaataaatctacatctgcaaagaatgcaggtacacagccctcacttgaaagatgctctctacgatgtcatcactgtgggagccccagctgcccattttcagggatttaagaatggtggtcttcggaagctactccatagatttgaaacagaaagaagaaataccggataccagtttatttactattcacctgaaaacacagccaaagcaaaggaagttctcagcaacatcaatcaactacaacctcttatagcaacccatgcagacctactgcttaattctgcaagccagcattctccagacagcttgaagaattctttaaagatgctttcagaaaaaacagagctttttgtacatgccttcaaggatcaacttgtcaggagtgctcttttagcactctacactgcaaggccaggaggcattcttaagaagccaccctctcctaagagcagcacagaggagagcagtccccaagaccaacccccagtgatgagagggcaggactccataccacatcattcagactatgatgaggaagagtgggacagggtgtgggccaatgtggggaagagcctgaactgcattattgctatggtggacaaactgattgaaagagatggtggcagtgaaggcagtggcggcaacaatgatggagaaaaggaaccttcattaacagatgccattccctctcacccaagagaggactggtatgaacagttgtatcccctcatccttaccctgaaggactgcatgggagaagtggtgaaccgagccaagcagtccctgacatttgtgctccttcaggaacttgcgtacagcttgccccagtgtctgatgctgacgctaagaagagacatcgtcttcagccaagcacttgctggattggtttgtggttttatcatcaaattacagacaagtctgtatgacccaggcttcctacagcagcttcacacagtggggttgatagtacaatatgaaggactgctaagtacatacagcgatgaaattggaatgctagaggacatggccgttggcatttccgatttaaagaaagttgcatttaaaataattgaagccaaatccaatgatgtgttgccagttataacaggaagacgagaacattacgtggtagaggtcaagcttccagccagaatgtttgagtcactacctctacagattaaagaaggacagttgcttcatgtgtatccagtactttttaatgttggaatcaatgaacagcaaactctggctgaaaggtttggagatgtctctttgcaagaaagtattaatcaggaaaacttcgaacttctacaagaatattacaagatatttatggaaaagatgcctcctgattatatttcacattttcaggaacaaaatgatttaaaagcattgctagaaaatctccttcaaaatatccaatccaaaaaaagaaagaatgtagaaattatgtggctggctgcaacgatttgccgcaaactgaatggtattcgtttcacctgttgtaaaagtgccaaagacaggacatcgatgtcagtgacacttgaacaatgctcaatcttgagagatgagcaccagttacacaaggacttctttatccgagcgctggattgcatgagaagagaaggatgccgcatagagaatgtactgaagaatatcaaatgcagaaagtatgctttcaacatgctacagctgatggctttccccaagtactacagacctccagaggggacttatggaaaagctgacacctaagtttaccaacatgttaataaacaggaacacaaatacatttcagttggataatcttcaccttggtcttttttgtttgtttttattgtcatgaatttgtggtgggggagatgatcacagatgtttcccaaaatctaggaactacttcaattcatcatcagcatattgctctgaaagaaatccattttaaaaaatcttacatgattcagtactgtcatttctagttctaagcttctatgtgttgagcctagctgattgagattggttcacaaagtgtaaatttcattcatgagtatttaaatgtttctgaggaaacatggatcatttcaataggactaggggtgattcacagagcaccactctccaaccaaatggaagagaggagagggggaaaaggaacatattttttttgtgatacaacttaatagcctatgagaacacagtcaacctgagaatcaatgtaagggatttaaaaaaaatgtgtagccactcaattaggtagagttaactcatgatctggaatactgaggcagtttgcaggtatgttccacaatgatctctatcatccagtcaaggtgtgactcctcccttgcaacaggcatatgcatggagtgagtaaagtggtcaacagacctttcaaaaccatggcatcttttcagaactctgacttgggttgtgtgatctagctgtgaatgtagcaatatagaacgtttaatagaatgataagcaaaacactgcaatgatctaaaattacaaataaaataaaaatgaacaacattttgatacccaaaatgaaaattcccatcagcctgaactttatgttgtgaagttcatgaatgtcagtgaggtatctctgagatgtttcttagcagtcatcctggtgtaagcatgcagttatggcataggtttgtgtgtgttaataagcctttaaaacatatgcaaccacaacaaatgataaagtaaaacaattattttctgttgccctgaatatcaaacttgcccttgcccttactcagcaaaataacatttataagttttccaaaatcccaaagtagaagtttccttaaaaaaatcatcttgtataataccagtattcaaacatgggtaaggttaatcacccccaatcactcaggagatagttgcagaatttgaattacaatctcttcttactttcctagcctgtggcttgtcacttctccaaattgccatgctaaatatgcatgaaaattgagggagaatgctagttaaaaagaaattaggatttatcactggaattgaaactaagagtacaaaagtctgaacgaatgaaacttttctccaaattttacaaattcttgttcctttctcattagaagagcatgctatccaaagcataaatctcccttgaaaataacagaggcttcttaagccctctcttagctatgatcaatggatgatattatgcttcccatagctaatgtgatagctccttgcctaggattcctgttgaaataaggattctagccccatgttaagtttttcaaattactacaaattttagataagcatttggagctttttatactagaattatcaattttttattttagctaattacctgtgggcattatacttgaggcaggtaccaaactacttacagcctttttaatgaaaatgtgctgtgtactttgaatccattcatagacaaaattaccttgatgttctcttaactcattctttattttagtgattaaatacaacctttgagttgttcaatatcatttgaaaatggtaggatttgtggttattttcattaccctattagatttaagataggctgggatgacagaggcctccttgaatagctatgaagcctcattcagcatatcaaatggtagtctgagttctaagaaaccttaagtaatttatcattctgtaaatactcttataagcaataatttttatttgtatttttgaaaacaaactacttaaatatggaaaaatattaactggaaagccagcagtagggttttctattttt

SEQ ID NO: 4789 - protein, 924 aa, Homo sapiens; identical to SEQ ID NO: 551

SEQ ID NO: 4790 - DNA, 5199 bp, Homo sapiens
ggacaacaggaggctgtgcctgccttctgagctcagacagcagaaggatcactgggctggaagctctaacaggcattgccagcctagctacctgcagtttgaggcaagggcagggtcacttaccctgctgtctgaatgtctcctgggacaacaggaggctgcactcactggctgagttcagacagaagagggatcatcggactggaagctctggcagagccttgaaaccagcgaaacaataatcaaagagcagttctgtcaaagaaaacaacataaatcaggtacagaatttcagagtgggatatcagatctttagtgtgaagatacatctacattaaaccaggaatcactagaactgacatttggacaagaaaatttggaaaattttaaaactgtgaaggttgatcatggaaattaaagaggaaggggcatcagaagaagggcagcactttcttcctacagcccaggccaatgatcccggggactgtcagttcacaagtatccagaagactccaaatgaaccgcagttggaattcatccttgcatgcaaggatctcgtggctcctgtccgtgatcgtaaactgaatacactggtgcagatctccgtaatccaccccgtggagcagagtctgacaagatactccagcaccgaaattgtggagggaacaagggacccactgtttttgactggtgtcacattcccatctgagtatcccatctatgaggagaccaaaataaaactaacagtctatgatgtcaaggataagtctcatgacaccgttcgaaccagtgtcctaccagaacataaggatcccccgccagaagttgggcgaagtttcttgggctatgccagttttaaagtgggagagctgctgaagtcaaaggagcaattgctggtcctgagcctgagaacttcagatggtggcaaagtggttggcaccatagaagtcagtgtcgtgaagatgggggagattgaggatggggaagccgaccacatcaccacagatgtacagggacaaaagtgtgccctggtatgtgaatgtacagccccggaaagtgtgagcggaaaagataacttaccttttttgaattcagtgttaaagaacccagtatgtaaattatatagatttcccacatctgacaataagtggatgcgaattcgagagcagatgtcagagagcattctttcctttcatattcctaaggaattgatttcccttcacattaaagaagatttgtgcagaaaccaggagataaaagaacttggtgagctttctccacattgggacaatctgcgaaaaaatgtccttactcactgtgatcaaatggtgaatatgtaccaagacattctgacagaacttagcaaggaaacagggtcctctttcaaatcaagcagcagcaaaggagagaaaacattagaatttgttccaataaatctacatctgcaaagaatgcaggtacacagccctcacttgaaagatgctctctacgatgtcatcactgtgggagccccagctgcccattttcagggatttaagaatggtggtcttcggaagctactccatagatttgaaacagaaagaagaaataccggataccagtttatttactattcacctgaaaacacagccaaagcaaaggaagttctcagcaacatcaatcaactacaacctcttatagcaacccatgcagacctactgcttaattctgcaagccagcattctccagacagcttgaagaattctttaaagatgctttcagaaaaaacagagctttttgtacatgccttcaaggatcaacttgtcaggagtgctcttttagcactctacactgcaaggccaggaggcattcttaagaagccaccctctcctaagagcagcacagaggagagcagtccccaagaccaacccccagtgatgagagggcaggactccataccacatcattcagactatgatgaggaagagtgggacagggtgtgggccaatgtggggaagagcctgaactgcattattgctatggtggacaaactgattgaaagagatggtggcagtgaaggcagtggcggcaacaatgatggagaaaaggaaccttcattaacagatgccattccctctcacccaagagaggactggtatgaacagttgtatcccctcatccttaccctgaaggactgcatgggagaagtggtgaaccgagccaagcagtccctgacatttgtgctccttcaggaacttgcgtacagcttgccccagtgtctgatgctgacgctaagaagagacatcgtcttcagccaagcacttgctggattggtttgtggttttatcatcaaattacagacaagtctgtatgacccaggcttcctacagcagcttcacacagtggggttgatagtacaatatgaaggactgctaagtacatacagcgatgaaattggaatgctagaggacatggccgttggcatttccgatttaaagaaagttgcatttaaaataattgaagccaaatccaatgatgtgttgccagttataacaggaagacgagaacattacgtggtagaggtcaagcttccagccagaatgtttgagtcactacctctacagattaaagaaggacagttgcttcatgtgtatccagtactttttaatgttggaatcaatgaacagcaaactctggctgaaaggtttggagatgtctctttgcaagaaagtattaatcaggaaaacttcgaacttctacaagaatattacaagatatttatggaaaagatgcctcctgattatatttcacattttcaggaacaaaatgatttaaaagcattgctagaaaatctccttcaaaatatccaatccaaaaaaagaaagaatgtagaaattatgtggctggctgcaacgatttgccgcaaactgaatggtattcgtttcacctgttgtaaaagtgccaaagacaggacatcgatgtcagtgacacttgaacaatgctcaatcttgagagatgagcaccagttacacaaggacttctttatccgagcgctggattgcatgagaagagaaggatgccgcatagagaatgtactgaagaatatcaaatgcagaaagtatgctttcaacatgctacagctgatggctttccccaagtactacagacctccagaggggacttatggaaaagctgacacctaagtttaccaacatgttaataaacaggaacacaaatacatttcagttggataatcttcaccttggtcttttttgtttgtttttattgtcatgaatttgtggtgggggagatgatcacagatgtttcccaaaatctaggaactacttcaattcatcatcagcatattgctctgaaagaaatccattttaaaaaatcttacatgattcagtactgtcatttctagttctaagcttctatgtgttgagcctagctgattgagattggttcacaaagtgtaaatttcattcatgagtatttaaatgtttctgaggaaacatggatcatttcaataggactaggggtgattcacagagcaccactctccaaccaaatggaagagaggagagggggaaaaggaacatattttttttgtgatacaacttaatagcctatgagaacacagtcaacctgagaatcaatgtaagggatttaaaaaaaatgtgtagccactcaattaggtagagttaactcatgatctggaatactgaggcagtttgcaggtatgttccacaatgatctctatcatccagtcaaggtgtgactcctcccttgcaacaggcatatgcatggagtgagtaaagtggtcaacagacctttcaaaaccatggcatcttttcagaactctgacttgggttgtgtgatctagctgtgaatgtagcaatatagaacgtttaatagaatgataagcaaaacactgcaatgatctaaaattacaaataaaataaaaatgaacaacattttgatacccaaaatgaaaattcccatcagcctgaactttatgttgtgaagttcatgaatgtcagtgaggtatctctgagatgtttcttagcagtcatcctggtgtaagcatgcagttatggcataggtttgtgtgtgttaataagcctttaaaacatatgcaaccacaacaaatgataaagtaaaacaattattttctgttgccctgaatatcaaacttgcccttgcccttactcagcaaaataacatttataagttttccaaaatcccaaagtagaagtttccttaaaaaaatcatcttgtataataccagtattcaaacatgggtaaggttaatcacccccaatcactcaggagatagttgcagaatttgaattacaatctcttcttactttcctagcctgtggcttgtcacttctccaaattgccatgctaaatatgcatgaaaattgagggagaatgctagttaaaaagaaattaggatttatcactggaattgaaactaagagtacaaaagtctgaacgaatgaaacttttctccaaattttacaaattcttgttcctttctcattagaagagcatgctatccaaagcataaatctcccttgaaaataacagaggcttcttaagccctctcttagctatgatcaatggatgatattatgcttcccatagctaatgtgatagctccttgcctaggattcctgttgaaataaggattctagccccatgttaagtttttcaaattactacaaattttagataagcatttggagctttttatactagaattatcaattttttattttagctaattacctgtgggcattatacttgaggcaggtaccaaactacttacagcctttttaatgaaaatgtgctgtgtactttgaatccattcatagacaaaattaccttgatgttctcttaactcattctttattttagtgattaaatacaacctttgagttgttcaatatcatttgaaaatggtaggatttgtggttattttcattaccctattagatttaagataggctgggatgacagaggcctccttgaatagctatgaagcctcattcagcatatcaaatggtagtctgagttctaagaaaccttaagtaatttatcattctgtaaatactcttataagcaataatttttatttgtatttttgaaaacaaactacttaaatatggaaaaatattaactggaaagccagcagtagggttttctattttt

SEQ ID NO: 4791 - protein, 924 aa, Homo sapiens; identical to SEQ ID NO: 551

SEQ ID NO: 4792 - DNA, 5220 bp, Homo sapiens
gattttgctgttaatacttgcaattgtactataaaatcgttgaagtggatttttgacttctatcagctcagtttggttctttcttaaaatggccattttaccttctagtttctgtaccattttattatatttcttagattcattgaattgggtttcttctttcttttgaatgtcgataatcttcattccaatccatattctgaactctatttctgacatttcagccatttcagcccagagccttgaaaccagcgaaacaataatcaaagagcagttctgtcaaagaaaacaacataaatcaggtacagaatttcagagtgggatatcagatctttagtgtgaagatacatctacattaaaccaggaatcactagaactgacatttggacaagaaaatttggaaaattttaaaactgtgaaggttgatcatggaaattaaagaggaaggggcatcagaagaagggcagcactttcttcctacagcccaggccaatgatcccggggactgtcagttcacaagtatccagaagactccaaatgaaccgcagttggaattcatccttgcatgcaaggatctcgtggctcctgtccgtgatcgtaaactgaatacactggtgcagatctccgtaatccaccccgtggagcagagtctgacaagatactccagcaccgaaattgtggagggaacaagggacccactgtttttgactggtgtcacattcccatctgagtatcccatctatgaggagaccaaaataaaactaacagtctatgatgtcaaggataagtctcatgacaccgttcgaaccagtgtcctaccagaacataaggatcccccgccagaagttgggcgaagtttcttgggctatgccagttttaaagtgggagagctgctgaagtcaaaggagcaattgctggtcctgagcctgagaacttcagatggtggcaaagtggttggcaccatagaagtcagtgtcgtgaagatgggggagattgaggatggggaagccgaccacatcaccacagatgtacagggacaaaagtgtgccctggtatgtgaatgtacagccccggaaagtgtgagcggaaaagataacttaccttttttgaattcagtgttaaagaacccagtatgtaaattatatagatttcccacatctgacaataagtggatgcgaattcgagagcagatgtcagagagcattctttcctttcatattcctaaggaattgatttcccttcacattaaagaagatttgtgcagaaaccaggagataaaagaacttggtgagctttctccacattgggacaatctgcgaaaaaatgtccttactcactgtgatcaaatggtgaatatgtaccaagacattctgacagaacttagcaaggaaacagggtcctctttcaaatcaagcagcagcaaaggagagaaaacattagaatttgttccaataaatctacatctgcaaagaatgcaggtacacagccctcacttgaaagatgctctctacgatgtcatcactgtgggagccccagctgcccattttcagggatttaagaatggtggtcttcggaagctactccatagatttgaaacagaaagaagaaataccggataccagtttatttactattcacctgaaaacacagccaaagcaaaggaagttctcagcaacatcaatcaactacaacctcttatagcaacccatgcagacctactgcttaattctgcaagccagcattctccagacagcttgaagaattctttaaagatgctttcagaaaaaacagagctttttgtacatgccttcaaggatcaacttgtcaggagtgctcttttagcactctacactgcaaggccaggaggcattcttaagaagccaccctctcctaagagcagcacagaggagagcagtccccaagaccaacccccagtgatgagagggcaggactccataccacatcattcagactatgatgaggaagagtgggacagggtgtgggccaatgtggggaagagcctgaactgcattattgctatggtggacaaactgattgaaagagatggtggcagtgaaggcagtggcggcaacaatgatggagaaaaggaaccttcattaacagatgccattccctctcacccaagagaggactggtatgaacagttgtatcccctcatccttaccctgaaggactgcatgggagaagtggtgaaccgagccaagcagtccctgacatttgtgctccttcaggaacttgcgtacagcttgccccagtgtctgatgctgacgctaagaagagacatcgtcttcagccaagcacttgctggattggtttgtggttttatcatcaaattacagacaagtctgtatgacccaggcttcctacagcagcttcacacagtggggttgatagtacaatatgaaggactgctaagtacatacagcgatgaaattggaatgctagaggacatggccgttggcatttccgatttaaagaaagttgcatttaaaataattgaagccaaatccaatgatgtgttgccagttataacaggaagacgagaacattacgtggtagaggtcaagcttccagccagaatgtttgagtcactacctctacagattaaagaaggacagttgcttcatgtgtatccagtactttttaatgttggaatcaatgaacagcaaactctggctgaaaggtttggagatgtctctttgcaagaaagtattaatcaggaaaacttcgaacttctacaagaatattacaagatatttatggaaaagatgcctcctgattatatttcacattttcaggaacaaaatgatttaaaagcattgctagaaaatctccttcaaaatatccaatccaaaaaaagaaagaatgtagaaattatgtggctggctgcaacgatttgccgcaaactgaatggtattcgtttcacctgttgtaaaagtgccaaagacaggacatcgatgtcagtgacacttgaacaatgctcaatcttgagagatgagcaccagttacacaaggacttctttatccgagcgctggattgcatgagaagagaaggatgccgcatagagaatgtactgaagaatatcaaatgcagaaagtatgctttcaacatgctacagctgatggctttccccaagtactacagacctccagaggggacttatggaaaagctgacacctaagtttaccaacatgttaataaacaggaacacaaatacatttcagttggataatcttcaccttggtcttttttgtttgtttttattgtcatgaatttgtggtgggggagatgatcacagatgtttcccaaaatctaggaactacttcaattcatcatcagcatattgctctgaaagaaatccattttaaaaaatcttacatgattcagtactgtcatttctagttctaagcttctatgtgttgagcctagctgattgagattggttcacaaagtgtaaatttcattcatgagtatttaaatgtttctgaggaaacatggatcatttcaataggactaggggtgattcacagagcaccactctccaaccaaatggaagagaggagagggggaaaaggaacatattttttttgtgatacaacttaatagcctatgagaacacagtcaacctgagaatcaatgtaagggatttaaaaaaaatgtgtagccactcaattaggtagagttaactcatgatctggaatactgaggcagtttgcaggtatgttccacaatgatctctatcatccagtcaaggtgtgactcctcccttgcaacaggcatatgcatggagtgagtaaagtggtcaacagacctttcaaaaccatggcatcttttcagaactctgacttgggttgtgtgatctagctgtgaatgtagcaatatagaacgtttaatagaatgataagcaaaacactgcaatgatctaaaattacaaataaaataaaaatgaacaacattttgatacccaaaatgaaaattcccatcagcctgaactttatgttgtgaagttcatgaatgtcagtgaggtatctctgagatgtttcttagcagtcatcctggtgtaagcatgcagttatggcataggtttgtgtgtgttaataagcctttaaaacatatgcaaccacaacaaatgataaagtaaaacaattattttctgttgccctgaatatcaaacttgcccttgcccttactcagcaaaataacatttataagttttccaaaatcccaaagtagaagtttccttaaaaaaatcatcttgtataataccagtattcaaacatgggtaaggttaatcacccccaatcactcaggagatagttgcagaatttgaattacaatctcttcttactttcctagcctgtggcttgtcacttctccaaattgccatgctaaatatgcatgaaaattgagggagaatgctagttaaaaagaaattaggatttatcactggaattgaaactaagagtacaaaagtctgaacgaatgaaacttttctccaaattttacaaattcttgttcctttctcattagaagagcatgctatccaaagcataaatctcccttgaaaataacagaggcttcttaagccctctcttagctatgatcaatggatgatattatgcttcccatagctaatgtgatagctccttgcctaggattcctgttgaaataaggattctagccccatgttaagtttttcaaattactacaaattttagataagcatttggagctttttatactagaattatcaattttttattttagctaattacctgtgggcattatacttgaggcaggtaccaaactacttacagcctttttaatgaaaatgtgctgtgtactttgaatccattcatagacaaaattaccttgatgttctcttaactcattctttattttagtgattaaatacaacctttgagttgttcaatatcatttgaaaatggtaggatttgtggttattttcattaccctattagatttaagataggctgggatgacagaggcctccttgaatagctatgaagcctcattcagcatatcaaatggtagtctgagttctaagaaaccttaagtaatttatcattctgtaaatactcttataagcaataatttttatttgtatttttgaaaacaaactacttaaatatggaaaaatattaactggaaagccagcagtagggttttctattttt

SEQ ID NO: 4793 - protein, 924 aa, Homo sapiens; identical to SEQ ID NO: 551

SEQ ID NO: 4794 - DNA, 5129 bp, Homo sapiens
gacctgaggaagaccacatgagggctgatggggaagaggcatttgaaggctttacaggaggcatagtactggaaatctgctcctgatgaggtctcagaaagcttccactcgtggtggaaggcaaaggaggagcaggcacatcacatgagccttgaaaccagcgaaacaataatcaaagagcagttctgtcaaagaaaacaacataaatcaggtacagaatttcagagtgggatatcagatctttagtgtgaagatacatctacattaaaccaggaatcactagaactgacatttggacaagaaaatttggaaaattttaaaactgtgaaggttgatcatggaaattaaagaggaaggggcatcagaagaagggcagcactttcttcctacagcccaggccaatgatcccggggactgtcagttcacaagtatccagaagactccaaatgaaccgcagttggaattcatccttgcatgcaaggatctcgtggctcctgtccgtgatcgtaaactgaatacactggtgcagatctccgtaatccaccccgtggagcagagtctgacaagatactccagcaccgaaattgtggagggaacaagggacccactgtttttgactggtgtcacattcccatctgagtatcccatctatgaggagaccaaaataaaactaacagtctatgatgtcaaggataagtctcatgacaccgttcgaaccagtgtcctaccagaacataaggatcccccgccagaagttgggcgaagtttcttgggctatgccagttttaaagtgggagagctgctgaagtcaaaggagcaattgctggtcctgagcctgagaacttcagatggtggcaaagtggttggcaccatagaagtcagtgtcgtgaagatgggggagattgaggatggggaagccgaccacatcaccacagatgtacagggacaaaagtgtgccctggtatgtgaatgtacagccccggaaagtgtgagcggaaaagataacttaccttttttgaattcagtgttaaagaacccagtatgtaaattatatagatttcccacatctgacaataagtggatgcgaattcgagagcagatgtcagagagcattctttcctttcatattcctaaggaattgatttcccttcacattaaagaagatttgtgcagaaaccaggagataaaagaacttggtgagctttctccacattgggacaatctgcgaaaaaatgtccttactcactgtgatcaaatggtgaatatgtaccaagacattctgacagaacttagcaaggaaacagggtcctctttcaaatcaagcagcagcaaaggagagaaaacattagaatttgttccaataaatctacatctgcaaagaatgcaggtacacagccctcacttgaaagatgctctctacgatgtcatcactgtgggagccccagctgcccattttcagggatttaagaatggtggtcttcggaagctactccatagatttgaaacagaaagaagaaataccggataccagtttatttactattcacctgaaaacacagccaaagcaaaggaagttctcagcaacatcaatcaactacaacctcttatagcaacccatgcagacctactgcttaattctgcaagccagcattctccagacagcttgaagaattctttaaagatgctttcagaaaaaacagagctttttgtacatgccttcaaggatcaacttgtcaggagtgctcttttagcactctacactgcaaggccaggaggcattcttaagaagccaccctctcctaagagcagcacagaggagagcagtccccaagaccaacccccagtgatgagagggcaggactccataccacatcattcagactatgatgaggaagagtgggacagggtgtgggccaatgtggggaagagcctgaactgcattattgctatggtggacaaactgattgaaagagatggtggcagtgaaggcagtggcggcaacaatgatggagaaaaggaaccttcattaacagatgccattccctctcacccaagagaggactggtatgaacagttgtatcccctcatccttaccctgaaggactgcatgggagaagtggtgaaccgagccaagcagtccctgacatttgtgctccttcaggaacttgcgtacagcttgccccagtgtctgatgctgacgctaagaagagacatcgtcttcagccaagcacttgctggattggtttgtggttttatcatcaaattacagacaagtctgtatgacccaggcttcctacagcagcttcacacagtggggttgatagtacaatatgaaggactgctaagtacatacagcgatgaaattggaatgctagaggacatggccgttggcatttccgatttaaagaaagttgcatttaaaataattgaagccaaatccaatgatgtgttgccagttataacaggaagacgagaacattacgtggtagaggtcaagcttccagccagaatgtttgagtcactacctctacagattaaagaaggacagttgcttcatgtgtatccagtactttttaatgttggaatcaatgaacagcaaactctggctgaaaggtttggagatgtctctttgcaagaaagtattaatcaggaaaacttcgaacttctacaagaatattacaagatatttatggaaaagatgcctcctgattatatttcacattttcaggaacaaaatgatttaaaagcattgctagaaaatctccttcaaaatatccaatccaaaaaaagaaagaatgtagaaattatgtggctggctgcaacgatttgccgcaaactgaatggtattcgtttcacctgttgtaaaagtgccaaagacaggacatcgatgtcagtgacacttgaacaatgctcaatcttgagagatgagcaccagttacacaaggacttctttatccgagcgctggattgcatgagaagagaaggatgccgcatagagaatgtactgaagaatatcaaatgcagaaagtatgctttcaacatgctacagctgatggctttccccaagtactacagacctccagaggggacttatggaaaagctgacacctaagtttaccaacatgttaataaacaggaacacaaatacatttcagttggataatcttcaccttggtcttttttgtttgtttttattgtcatgaatttgtggtgggggagatgatcacagatgtttcccaaaatctaggaactacttcaattcatcatcagcatattgctctgaaagaaatccattttaaaaaatcttacatgattcagtactgtcatttctagttctaagcttctatgtgttgagcctagctgattgagattggttcacaaagtgtaaatttcattcatgagtatttaaatgtttctgaggaaacatggatcatttcaataggactaggggtgattcacagagcaccactctccaaccaaatggaagagaggagagggggaaaaggaacatattttttttgtgatacaacttaatagcctatgagaacacagtcaacctgagaatcaatgtaagggatttaaaaaaaatgtgtagccactcaattaggtagagttaactcatgatctggaatactgaggcagtttgcaggtatgttccacaatgatctctatcatccagtcaaggtgtgactcctcccttgcaacaggcatatgcatggagtgagtaaagtggtcaacagacctttcaaaaccatggcatcttttcagaactctgacttgggttgtgtgatctagctgtgaatgtagcaatatagaacgtttaatagaatgataagcaaaacactgcaatgatctaaaattacaaataaaataaaaatgaacaacattttgatacccaaaatgaaaattcccatcagcctgaactttatgttgtgaagttcatgaatgtcagtgaggtatctctgagatgtttcttagcagtcatcctggtgtaagcatgcagttatggcataggtttgtgtgtgttaataagcctttaaaacatatgcaaccacaacaaatgataaagtaaaacaattattttctgttgccctgaatatcaaacttgcccttgcccttactcagcaaaataacatttataagttttccaaaatcccaaagtagaagtttccttaaaaaaatcatcttgtataataccagtattcaaacatgggtaaggttaatcacccccaatcactcaggagatagttgcagaatttgaattacaatctcttcttactttcctagcctgtggcttgtcacttctccaaattgccatgctaaatatgcatgaaaattgagggagaatgctagttaaaaagaaattaggatttatcactggaattgaaactaagagtacaaaagtctgaacgaatgaaacttttctccaaattttacaaattcttgttcctttctcattagaagagcatgctatccaaagcataaatctcccttgaaaataacagaggcttcttaagccctctcttagctatgatcaatggatgatattatgcttcccatagctaatgtgatagctccttgcctaggattcctgttgaaataaggattctagccccatgttaagtttttcaaattactacaaattttagataagcatttggagctttttatactagaattatcaattttttattttagctaattacctgtgggcattatacttgaggcaggtaccaaactacttacagcctttttaatgaaaatgtgctgtgtactttgaatccattcatagacaaaattaccttgatgttctcttaactcattctttattttagtgattaaatacaacctttgagttgttcaatatcatttgaaaatggtaggatttgtggttattttcattaccctattagatttaagataggctgggatgacagaggcctccttgaatagctatgaagcctcattcagcatatcaaatggtagtctgagttctaagaaaccttaagtaatttatcattctgtaaatactcttataagcaataatttttatttgtatttttgaaaacaaactacttaaatatggaaaaatattaactggaaagccagcagtagggttttctattttt

SEQ ID NO: 4795 - protein, 924 aa, Homo sapiens; identical to SEQ ID NO: 551

SEQ ID NO: 4796 - DNA, 5058 bp, Homo sapiens
aaagaaaggataaattaaagtcgagatggacctgaggaagaccacatgagggctgatggggaagaggcatttgaagagccttgaaaccagcgaaacaataatcaaagagcagttctgtcaaagaaaacaacataaatcaggtacagaatttcagagtgggatatcagatctttagtgtgaagatacatctacattaaaccaggaatcactagaactgacatttggacaagaaaatttggaaaattttaaaactgtgaaggttgatcatggaaattaaagaggaaggggcatcagaagaagggcagcactttcttcctacagcccaggccaatgatcccggggactgtcagttcacaagtatccagaagactccaaatgaaccgcagttggaattcatccttgcatgcaaggatctcgtggctcctgtccgtgatcgtaaactgaatacactggtgcagatctccgtaatccaccccgtggagcagagtctgacaagatactccagcaccgaaattgtggagggaacaagggacccactgtttttgactggtgtcacattcccatctgagtatcccatctatgaggagaccaaaataaaactaacagtctatgatgtcaaggataagtctcatgacaccgttcgaaccagtgtcctaccagaacataaggatcccccgccagaagttgggcgaagtttcttgggctatgccagttttaaagtgggagagctgctgaagtcaaaggagcaattgctggtcctgagcctgagaacttcagatggtggcaaagtggttggcaccatagaagtcagtgtcgtgaagatgggggagattgaggatggggaagccgaccacatcaccacagatgtacagggacaaaagtgtgccctggtatgtgaatgtacagccccggaaagtgtgagcggaaaagataacttaccttttttgaattcagtgttaaagaacccagtatgtaaattatatagatttcccacatctgacaataagtggatgcgaattcgagagcagatgtcagagagcattctttcctttcatattcctaaggaattgatttcccttcacattaaagaagatttgtgcagaaaccaggagataaaagaacttggtgagctttctccacattgggacaatctgcgaaaaaatgtccttactcactgtgatcaaatggtgaatatgtaccaagacattctgacagaacttagcaaggaaacagggtcctctttcaaatcaagcagcagcaaaggagagaaaacattagaatttgttccaataaatctacatctgcaaagaatgcaggtacacagccctcacttgaaagatgctctctacgatgtcatcactgtgggagccccagctgcccattttcagggatttaagaatggtggtcttcggaagctactccatagatttgaaacagaaagaagaaataccggataccagtttatttactattcacctgaaaacacagccaaagcaaaggaagttctcagcaacatcaatcaactacaacctcttatagcaacccatgcagacctactgcttaattctgcaagccagcattctccagacagcttgaagaattctttaaagatgctttcagaaaaaacagagctttttgtacatgccttcaaggatcaacttgtcaggagtgctcttttagcactctacactgcaaggccaggaggcattcttaagaagccaccctctcctaagagcagcacagaggagagcagtccccaagaccaacccccagtgatgagagggcaggactccataccacatcattcagactatgatgaggaagagtgggacagggtgtgggccaatgtggggaagagcctgaactgcattattgctatggtggacaaactgattgaaagagatggtggcagtgaaggcagtggcggcaacaatgatggagaaaaggaaccttcattaacagatgccattccctctcacccaagagaggactggtatgaacagttgtatcccctcatccttaccctgaaggactgcatgggagaagtggtgaaccgagccaagcagtccctgacatttgtgctccttcaggaacttgcgtacagcttgccccagtgtctgatgctgacgctaagaagagacatcgtcttcagccaagcacttgctggattggtttgtggttttatcatcaaattacagacaagtctgtatgacccaggcttcctacagcagcttcacacagtggggttgatagtacaatatgaaggactgctaagtacatacagcgatgaaattggaatgctagaggacatggccgttggcatttccgatttaaagaaagttgcatttaaaataattgaagccaaatccaatgatgtgttgccagttataacaggaagacgagaacattacgtggtagaggtcaagcttccagccagaatgtttgagtcactacctctacagattaaagaaggacagttgcttcatgtgtatccagtactttttaatgttggaatcaatgaacagcaaactctggctgaaaggtttggagatgtctctttgcaagaaagtattaatcaggaaaacttcgaacttctacaagaatattacaagatatttatggaaaagatgcctcctgattatatttcacattttcaggaacaaaatgatttaaaagcattgctagaaaatctccttcaaaatatccaatccaaaaaaagaaagaatgtagaaattatgtggctggctgcaacgatttgccgcaaactgaatggtattcgtttcacctgttgtaaaagtgccaaagacaggacatcgatgtcagtgacacttgaacaatgctcaatcttgagagatgagcaccagttacacaaggacttctttatccgagcgctggattgcatgagaagagaaggatgccgcatagagaatgtactgaagaatatcaaatgcagaaagtatgctttcaacatgctacagctgatggctttccccaagtactacagacctccagaggggacttatggaaaagctgacacctaagtttaccaacatgttaataaacaggaacacaaatacatttcagttggataatcttcaccttggtcttttttgtttgtttttattgtcatgaatttgtggtgggggagatgatcacagatgtttcccaaaatctaggaactacttcaattcatcatcagcatattgctctgaaagaaatccattttaaaaaatcttacatgattcagtactgtcatttctagttctaagcttctatgtgttgagcctagctgattgagattggttcacaaagtgtaaatttcattcatgagtatttaaatgtttctgaggaaacatggatcatttcaataggactaggggtgattcacagagcaccactctccaaccaaatggaagagaggagagggggaaaaggaacatattttttttgtgatacaacttaatagcctatgagaacacagtcaacctgagaatcaatgtaagggatttaaaaaaaatgtgtagccactcaattaggtagagttaactcatgatctggaatactgaggcagtttgcaggtatgttccacaatgatctctatcatccagtcaaggtgtgactcctcccttgcaacaggcatatgcatggagtgagtaaagtggtcaacagacctttcaaaaccatggcatcttttcagaactctgacttgggttgtgtgatctagctgtgaatgtagcaatatagaacgtttaatagaatgataagcaaaacactgcaatgatctaaaattacaaataaaataaaaatgaacaacattttgatacccaaaatgaaaattcccatcagcctgaactttatgttgtgaagttcatgaatgtcagtgaggtatctctgagatgtttcttagcagtcatcctggtgtaagcatgcagttatggcataggtttgtgtgtgttaataagcctttaaaacatatgcaaccacaacaaatgataaagtaaaacaattattttctgttgccctgaatatcaaacttgcccttgcccttactcagcaaaataacatttataagttttccaaaatcccaaagtagaagtttccttaaaaaaatcatcttgtataataccagtattcaaacatgggtaaggttaatcacccccaatcactcaggagatagttgcagaatttgaattacaatctcttcttactttcctagcctgtggcttgtcacttctccaaattgccatgctaaatatgcatgaaaattgagggagaatgctagttaaaaagaaattaggatttatcactggaattgaaactaagagtacaaaagtctgaacgaatgaaacttttctccaaattttacaaattcttgttcctttctcattagaagagcatgctatccaaagcataaatctcccttgaaaataacagaggcttcttaagccctctcttagctatgatcaatggatgatattatgcttcccatagctaatgtgatagctccttgcctaggattcctgttgaaataaggattctagccccatgttaagtttttcaaattactacaaattttagataagcatttggagctttttatactagaattatcaattttttattttagctaattacctgtgggcattatacttgaggcaggtaccaaactacttacagcctttttaatgaaaatgtgctgtgtactttgaatccattcatagacaaaattaccttgatgttctcttaactcattctttattttagtgattaaatacaacctttgagttgttcaatatcatttgaaaatggtaggatttgtggttattttcattaccctattagatttaagataggctgggatgacagaggcctccttgaatagctatgaagcctcattcagcatatcaaatggtagtctgagttctaagaaaccttaagtaatttatcattctgtaaatactcttataagcaataatttttatttgtatttttgaaaacaaactacttaaatatggaaaaatattaactggaaagccagcagtagggttttctattttt

SEQ ID NO: 4797 - protein, 924 aa, Homo sapiens; identical to SEQ ID NO: 551

SEQ ID NO: 4798 - DNA, 5195 bp, Homo sapiens
ggatgtttcctgccctcgaacatcagaatccatgtttttcagcttttgggctcttggacttacaccagtggtttgccagggccccccagccttcgaccacagattgaaggctacactgttggcctccctacttttgaggttttggaacttggactggcttccttgctcctcagtttgcagacagcctattgtggaacttcaccttgtgatcgtagccttgaaaccagcgaaacaataatcaaagagcagttctgtcaaagaaaacaacataaatcaggtacagaatttcagagtgggatatcagatctttagtgtgaagatacatctacattaaaccaggaatcactagaactgacatttggacaagaaaatttggaaaattttaaaactgtgaaggttgatcatggaaattaaagaggaaggggcatcagaagaagggcagcactttcttcctacagcccaggccaatgatcccggggactgtcagttcacaagtatccagaagactccaaatgaaccgcagttggaattcatccttgcatgcaaggatctcgtggctcctgtccgtgatcgtaaactgaatacactggtgcagatctccgtaatccaccccgtggagcagagtctgacaagatactccagcaccgaaattgtggagggaacaagggacccactgtttttgactggtgtcacattcccatctgagtatcccatctatgaggagaccaaaataaaactaacagtctatgatgtcaaggataagtctcatgacaccgttcgaaccagtgtcctaccagaacataaggatcccccgccagaagttgggcgaagtttcttgggctatgccagttttaaagtgggagagctgctgaagtcaaaggagcaattgctggtcctgagcctgagaacttcagatggtggcaaagtggttggcaccatagaagtcagtgtcgtgaagatgggggagattgaggatggggaagccgaccacatcaccacagatgtacagggacaaaagtgtgccctggtatgtgaatgtacagccccggaaagtgtgagcggaaaagataacttaccttttttgaattcagtgttaaagaacccagtatgtaaattatatagatttcccacatctgacaataagtggatgcgaattcgagagcagatgtcagagagcattctttcctttcatattcctaaggaattgatttcccttcacattaaagaagatttgtgcagaaaccaggagataaaagaacttggtgagctttctccacattgggacaatctgcgaaaaaatgtccttactcactgtgatcaaatggtgaatatgtaccaagacattctgacagaacttagcaaggaaacagggtcctctttcaaatcaagcagcagcaaaggagagaaaacattagaatttgttccaataaatctacatctgcaaagaatgcaggtacacagccctcacttgaaagatgctctctacgatgtcatcactgtgggagccccagctgcccattttcagggatttaagaatggtggtcttcggaagctactccatagatttgaaacagaaagaagaaataccggataccagtttatttactattcacctgaaaacacagccaaagcaaaggaagttctcagcaacatcaatcaactacaacctcttatagcaacccatgcagacctactgcttaattctgcaagccagcattctccagacagcttgaagaattctttaaagatgctttcagaaaaaacagagctttttgtacatgccttcaaggatcaacttgtcaggagtgctcttttagcactctacactgcaaggccaggaggcattcttaagaagccaccctctcctaagagcagcacagaggagagcagtccccaagaccaacccccagtgatgagagggcaggactccataccacatcattcagactatgatgaggaagagtgggacagggtgtgggccaatgtggggaagagcctgaactgcattattgctatggtggacaaactgattgaaagagatggtggcagtgaaggcagtggcggcaacaatgatggagaaaaggaaccttcattaacagatgccattccctctcacccaagagaggactggtatgaacagttgtatcccctcatccttaccctgaaggactgcatgggagaagtggtgaaccgagccaagcagtccctgacatttgtgctccttcaggaacttgcgtacagcttgccccagtgtctgatgctgacgctaagaagagacatcgtcttcagccaagcacttgctggattggtttgtggttttatcatcaaattacagacaagtctgtatgacccaggcttcctacagcagcttcacacagtggggttgatagtacaatatgaaggactgctaagtacatacagcgatgaaattggaatgctagaggacatggccgttggcatttccgatttaaagaaagttgcatttaaaataattgaagccaaatccaatgatgtgttgccagttataacaggaagacgagaacattacgtggtagaggtcaagcttccagccagaatgtttgagtcactacctctacagattaaagaaggacagttgcttcatgtgtatccagtactttttaatgttggaatcaatgaacagcaaactctggctgaaaggtttggagatgtctctttgcaagaaagtattaatcaggaaaacttcgaacttctacaagaatattacaagatatttatggaaaagatgcctcctgattatatttcacattttcaggaacaaaatgatttaaaagcattgctagaaaatctccttcaaaatatccaatccaaaaaaagaaagaatgtagaaattatgtggctggctgcaacgatttgccgcaaactgaatggtattcgtttcacctgttgtaaaagtgccaaagacaggacatcgatgtcagtgacacttgaacaatgctcaatcttgagagatgagcaccagttacacaaggacttctttatccgagcgctggattgcatgagaagagaaggatgccgcatagagaatgtactgaagaatatcaaatgcagaaagtatgctttcaacatgctacagctgatggctttccccaagtactacagacctccagaggggacttatggaaaagctgacacctaagtttaccaacatgttaataaacaggaacacaaatacatttcagttggataatcttcaccttggtcttttttgtttgtttttattgtcatgaatttgtggtgggggagatgatcacagatgtttcccaaaatctaggaactacttcaattcatcatcagcatattgctctgaaagaaatccattttaaaaaatcttacatgattcagtactgtcatttctagttctaagcttctatgtgttgagcctagctgattgagattggttcacaaagtgtaaatttcattcatgagtatttaaatgtttctgaggaaacatggatcatttcaataggactaggggtgattcacagagcaccactctccaaccaaatggaagagaggagagggggaaaaggaacatattttttttgtgatacaacttaatagcctatgagaacacagtcaacctgagaatcaatgtaagggatttaaaaaaaatgtgtagccactcaattaggtagagttaactcatgatctggaatactgaggcagtttgcaggtatgttccacaatgatctctatcatccagtcaaggtgtgactcctcccttgcaacaggcatatgcatggagtgagtaaagtggtcaacagacctttcaaaaccatggcatcttttcagaactctgacttgggttgtgtgatctagctgtgaatgtagcaatatagaacgtttaatagaatgataagcaaaacactgcaatgatctaaaattacaaataaaataaaaatgaacaacattttgatacccaaaatgaaaattcccatcagcctgaactttatgttgtgaagttcatgaatgtcagtgaggtatctctgagatgtttcttagcagtcatcctggtgtaagcatgcagttatggcataggtttgtgtgtgttaataagcctttaaaacatatgcaaccacaacaaatgataaagtaaaacaattattttctgttgccctgaatatcaaacttgcccttgcccttactcagcaaaataacatttataagttttccaaaatcccaaagtagaagtttccttaaaaaaatcatcttgtataataccagtattcaaacatgggtaaggttaatcacccccaatcactcaggagatagttgcagaatttgaattacaatctcttcttactttcctagcctgtggcttgtcacttctccaaattgccatgctaaatatgcatgaaaattgagggagaatgctagttaaaaagaaattaggatttatcactggaattgaaactaagagtacaaaagtctgaacgaatgaaacttttctccaaattttacaaattcttgttcctttctcattagaagagcatgctatccaaagcataaatctcccttgaaaataacagaggcttcttaagccctctcttagctatgatcaatggatgatattatgcttcccatagctaatgtgatagctccttgcctaggattcctgttgaaataaggattctagccccatgttaagtttttcaaattactacaaattttagataagcatttggagctttttatactagaattatcaattttttattttagctaattacctgtgggcattatacttgaggcaggtaccaaactacttacagcctttttaatgaaaatgtgctgtgtactttgaatccattcatagacaaaattaccttgatgttctcttaactcattctttattttagtgattaaatacaacctttgagttgttcaatatcatttgaaaatggtaggatttgtggttattttcattaccctattagatttaagataggctgggatgacagaggcctccttgaatagctatgaagcctcattcagcatatcaaatggtagtctgagttctaagaaaccttaagtaatttatcattctgtaaatactcttataagcaataatttttatttgtatttttgaaaacaaactacttaaatatggaaaaatattaactggaaagccagcagtagggttttctattttt

SEQ ID NO: 4799 - protein, 924 aa, Homo sapiens; identical to SEQ ID NO: 551

SEQ ID NO: 4800 - DNA, 5225 bp, Homo sapiens
acacgctcgcaagcgaacgcaggaaagtcaggctaaaagtgtctgctgctgctgccgccccccactccgcctccgggagagaatacaaagaaatggtgttacctggcaagaggtcttctgtcttttatgaaaaattagacaaaggctttacaggaggcatagtactggaaatctgctcctgatgaggtctcagaaagcttccactcgtggtggaaggcaaaggaggagcaggcacatcacatgagccttgaaaccagcgaaacaataatcaaagagcagttctgtcaaagaaaacaacataaatcaggtacagaatttcagagtgggatatcagatctttagtgtgaagatacatctacattaaaccaggaatcactagaactgacatttggacaagaaaatttggaaaattttaaaactgtgaaggttgatcatggaaattaaagaggaaggggcatcagaagaagggcagcactttcttcctacagcccaggccaatgatcccggggactgtcagttcacaagtatccagaagactccaaatgaaccgcagttggaattcatccttgcatgcaaggatctcgtggctcctgtccgtgatcgtaaactgaatacactggtgcagatctccgtaatccaccccgtggagcagagtctgacaagatactccagcaccgaaattgtggagggaacaagggacccactgtttttgactggtgtcacattcccatctgagtatcccatctatgaggagaccaaaataaaactaacagtctatgatgtcaaggataagtctcatgacaccgttcgaaccagtgtcctaccagaacataaggatcccccgccagaagttgggcgaagtttcttgggctatgccagttttaaagtgggagagctgctgaagtcaaaggagcaattgctggtcctgagcctgagaacttcagatggtggcaaagtggttggcaccatagaagtcagtgtcgtgaagatgggggagattgaggatggggaagccgaccacatcaccacagatgtacagggacaaaagtgtgccctggtatgtgaatgtacagccccggaaagtgtgagcggaaaagataacttaccttttttgaattcagtgttaaagaacccagtatgtaaattatatagatttcccacatctgacaataagtggatgcgaattcgagagcagatgtcagagagcattctttcctttcatattcctaaggaattgatttcccttcacattaaagaagatttgtgcagaaaccaggagataaaagaacttggtgagctttctccacattgggacaatctgcgaaaaaatgtccttactcactgtgatcaaatggtgaatatgtaccaagacattctgacagaacttagcaaggaaacagggtcctctttcaaatcaagcagcagcaaaggagagaaaacattagaatttgttccaataaatctacatctgcaaagaatgcaggtacacagccctcacttgaaagatgctctctacgatgtcatcactgtgggagccccagctgcccattttcagggatttaagaatggtggtcttcggaagctactccatagatttgaaacagaaagaagaaataccggataccagtttatttactattcacctgaaaacacagccaaagcaaaggaagttctcagcaacatcaatcaactacaacctcttatagcaacccatgcagacctactgcttaattctgcaagccagcattctccagacagcttgaagaattctttaaagatgctttcagaaaaaacagagctttttgtacatgccttcaaggatcaacttgtcaggagtgctcttttagcactctacactgcaaggccaggaggcattcttaagaagccaccctctcctaagagcagcacagaggagagcagtccccaagaccaacccccagtgatgagagggcaggactccataccacatcattcagactatgatgaggaagagtgggacagggtgtgggccaatgtggggaagagcctgaactgcattattgctatggtggacaaactgattgaaagagatggtggcagtgaaggcagtggcggcaacaatgatggagaaaaggaaccttcattaacagatgccattccctctcacccaagagaggactggtatgaacagttgtatcccctcatccttaccctgaaggactgcatgggagaagtggtgaaccgagccaagcagtccctgacatttgtgctccttcaggaacttgcgtacagcttgccccagtgtctgatgctgacgctaagaagagacatcgtcttcagccaagcacttgctggattggtttgtggttttatcatcaaattacagacaagtctgtatgacccaggcttcctacagcagcttcacacagtggggttgatagtacaatatgaaggactgctaagtacatacagcgatgaaattggaatgctagaggacatggccgttggcatttccgatttaaagaaagttgcatttaaaataattgaagccaaatccaatgatgtgttgccagttataacaggaagacgagaacattacgtggtagaggtcaagcttccagccagaatgtttgagtcactacctctacagattaaagaaggacagttgcttcatgtgtatccagtactttttaatgttggaatcaatgaacagcaaactctggctgaaaggtttggagatgtctctttgcaagaaagtattaatcaggaaaacttcgaacttctacaagaatattacaagatatttatggaaaagatgcctcctgattatatttcacattttcaggaacaaaatgatttaaaagcattgctagaaaatctccttcaaaatatccaatccaaaaaaagaaagaatgtagaaattatgtggctggctgcaacgatttgccgcaaactgaatggtattcgtttcacctgttgtaaaagtgccaaagacaggacatcgatgtcagtgacacttgaacaatgctcaatcttgagagatgagcaccagttacacaaggacttctttatccgagcgctggattgcatgagaagagaaggatgccgcatagagaatgtactgaagaatatcaaatgcagaaagtatgctttcaacatgctacagctgatggctttccccaagtactacagacctccagaggggacttatggaaaagctgacacctaagtttaccaacatgttaataaacaggaacacaaatacatttcagttggataatcttcaccttggtcttttttgtttgtttttattgtcatgaatttgtggtgggggagatgatcacagatgtttcccaaaatctaggaactacttcaattcatcatcagcatattgctctgaaagaaatccattttaaaaaatcttacatgattcagtactgtcatttctagttctaagcttctatgtgttgagcctagctgattgagattggttcacaaagtgtaaatttcattcatgagtatttaaatgtttctgaggaaacatggatcatttcaataggactaggggtgattcacagagcaccactctccaaccaaatggaagagaggagagggggaaaaggaacatattttttttgtgatacaacttaatagcctatgagaacacagtcaacctgagaatcaatgtaagggatttaaaaaaaatgtgtagccactcaattaggtagagttaactcatgatctggaatactgaggcagtttgcaggtatgttccacaatgatctctatcatccagtcaaggtgtgactcctcccttgcaacaggcatatgcatggagtgagtaaagtggtcaacagacctttcaaaaccatggcatcttttcagaactctgacttgggttgtgtgatctagctgtgaatgtagcaatatagaacgtttaatagaatgataagcaaaacactgcaatgatctaaaattacaaataaaataaaaatgaacaacattttgatacccaaaatgaaaattcccatcagcctgaactttatgttgtgaagttcatgaatgtcagtgaggtatctctgagatgtttcttagcagtcatcctggtgtaagcatgcagttatggcataggtttgtgtgtgttaataagcctttaaaacatatgcaaccacaacaaatgataaagtaaaacaattattttctgttgccctgaatatcaaacttgcccttgcccttactcagcaaaataacatttataagttttccaaaatcccaaagtagaagtttccttaaaaaaatcatcttgtataataccagtattcaaacatgggtaaggttaatcacccccaatcactcaggagatagttgcagaatttgaattacaatctcttcttactttcctagcctgtggcttgtcacttctccaaattgccatgctaaatatgcatgaaaattgagggagaatgctagttaaaaagaaattaggatttatcactggaattgaaactaagagtacaaaagtctgaacgaatgaaacttttctccaaattttacaaattcttgttcctttctcattagaagagcatgctatccaaagcataaatctcccttgaaaataacagaggcttcttaagccctctcttagctatgatcaatggatgatattatgcttcccatagctaatgtgatagctccttgcctaggattcctgttgaaataaggattctagccccatgttaagtttttcaaattactacaaattttagataagcatttggagctttttatactagaattatcaattttttattttagctaattacctgtgggcattatacttgaggcaggtaccaaactacttacagcctttttaatgaaaatgtgctgtgtactttgaatccattcatagacaaaattaccttgatgttctcttaactcattctttattttagtgattaaatacaacctttgagttgttcaatatcatttgaaaatggtaggatttgtggttattttcattaccctattagatttaagataggctgggatgacagaggcctccttgaatagctatgaagcctcattcagcatatcaaatggtagtctgagttctaagaaaccttaagtaatttatcattctgtaaatactcttataagcaataatttttatttgtatttttgaaaacaaactacttaaatatggaaaaatattaactggaaagccagcagtagggttttctattttt

SEQ ID NO: 4801 - protein, 924 aa, Homo sapiens; identical to SEQ ID NO: 551

SEQ ID NO: 4802 - DNA, 5258 bp, Homo sapiens
gcgcacacgctcacacgctcgcaagcgaacgcaggaaagtcaggctaaaagtgtctgctgctgctgccgccccccactccgcctccgggagagaatacaaagaaatggtgttacctggcaagaggtcttctgtcttttatgaaaaattagacaaagggggcgctgttttggggaaatggcagaactccctcagaggctgatctaagggttcccggcagaaggggccatcttcagaggctctggttgcatgactgtttggagtttgatggcctgaagagccttgaaaccagcgaaacaataatcaaagagcagttctgtcaaagaaaacaacataaatcaggtacagaatttcagagtgggatatcagatctttagtgtgaagatacatctacattaaaccaggaatcactagaactgacatttggacaagaaaatttggaaaattttaaaactgtgaaggttgatcatggaaattaaagaggaaggggcatcagaagaagggcagcactttcttcctacagcccaggccaatgatcccggggactgtcagttcacaagtatccagaagactccaaatgaaccgcagttggaattcatccttgcatgcaaggatctcgtggctcctgtccgtgatcgtaaactgaatacactggtgcagatctccgtaatccaccccgtggagcagagtctgacaagatactccagcaccgaaattgtggagggaacaagggacccactgtttttgactggtgtcacattcccatctgagtatcccatctatgaggagaccaaaataaaactaacagtctatgatgtcaaggataagtctcatgacaccgttcgaaccagtgtcctaccagaacataaggatcccccgccagaagttgggcgaagtttcttgggctatgccagttttaaagtgggagagctgctgaagtcaaaggagcaattgctggtcctgagcctgagaacttcagatggtggcaaagtggttggcaccatagaagtcagtgtcgtgaagatgggggagattgaggatggggaagccgaccacatcaccacagatgtacagggacaaaagtgtgccctggtatgtgaatgtacagccccggaaagtgtgagcggaaaagataacttaccttttttgaattcagtgttaaagaacccagtatgtaaattatatagatttcccacatctgacaataagtggatgcgaattcgagagcagatgtcagagagcattctttcctttcatattcctaaggaattgatttcccttcacattaaagaagatttgtgcagaaaccaggagataaaagaacttggtgagctttctccacattgggacaatctgcgaaaaaatgtccttactcactgtgatcaaatggtgaatatgtaccaagacattctgacagaacttagcaaggaaacagggtcctctttcaaatcaagcagcagcaaaggagagaaaacattagaatttgttccaataaatctacatctgcaaagaatgcaggtacacagccctcacttgaaagatgctctctacgatgtcatcactgtgggagccccagctgcccattttcagggatttaagaatggtggtcttcggaagctactccatagatttgaaacagaaagaagaaataccggataccagtttatttactattcacctgaaaacacagccaaagcaaaggaagttctcagcaacatcaatcaactacaacctcttatagcaacccatgcagacctactgcttaattctgcaagccagcattctccagacagcttgaagaattctttaaagatgctttcagaaaaaacagagctttttgtacatgccttcaaggatcaacttgtcaggagtgctcttttagcactctacactgcaaggccaggaggcattcttaagaagccaccctctcctaagagcagcacagaggagagcagtccccaagaccaacccccagtgatgagagggcaggactccataccacatcattcagactatgatgaggaagagtgggacagggtgtgggccaatgtggggaagagcctgaactgcattattgctatggtggacaaactgattgaaagagatggtggcagtgaaggcagtggcggcaacaatgatggagaaaaggaaccttcattaacagatgccattccctctcacccaagagaggactggtatgaacagttgtatcccctcatccttaccctgaaggactgcatgggagaagtggtgaaccgagccaagcagtccctgacatttgtgctccttcaggaacttgcgtacagcttgccccagtgtctgatgctgacgctaagaagagacatcgtcttcagccaagcacttgctggattggtttgtggttttatcatcaaattacagacaagtctgtatgacccaggcttcctacagcagcttcacacagtggggttgatagtacaatatgaaggactgctaagtacatacagcgatgaaattggaatgctagaggacatggccgttggcatttccgatttaaagaaagttgcatttaaaataattgaagccaaatccaatgatgtgttgccagttataacaggaagacgagaacattacgtggtagaggtcaagcttccagccagaatgtttgagtcactacctctacagattaaagaaggacagttgcttcatgtgtatccagtactttttaatgttggaatcaatgaacagcaaactctggctgaaaggtttggagatgtctctttgcaagaaagtattaatcaggaaaacttcgaacttctacaagaatattacaagatatttatggaaaagatgcctcctgattatatttcacattttcaggaacaaaatgatttaaaagcattgctagaaaatctccttcaaaatatccaatccaaaaaaagaaagaatgtagaaattatgtggctggctgcaacgatttgccgcaaactgaatggtattcgtttcacctgttgtaaaagtgccaaagacaggacatcgatgtcagtgacacttgaacaatgctcaatcttgagagatgagcaccagttacacaaggacttctttatccgagcgctggattgcatgagaagagaaggatgccgcatagagaatgtactgaagaatatcaaatgcagaaagtatgctttcaacatgctacagctgatggctttccccaagtactacagacctccagaggggacttatggaaaagctgacacctaagtttaccaacatgttaataaacaggaacacaaatacatttcagttggataatcttcaccttggtcttttttgtttgtttttattgtcatgaatttgtggtgggggagatgatcacagatgtttcccaaaatctaggaactacttcaattcatcatcagcatattgctctgaaagaaatccattttaaaaaatcttacatgattcagtactgtcatttctagttctaagcttctatgtgttgagcctagctgattgagattggttcacaaagtgtaaatttcattcatgagtatttaaatgtttctgaggaaacatggatcatttcaataggactaggggtgattcacagagcaccactctccaaccaaatggaagagaggagagggggaaaaggaacatattttttttgtgatacaacttaatagcctatgagaacacagtcaacctgagaatcaatgtaagggatttaaaaaaaatgtgtagccactcaattaggtagagttaactcatgatctggaatactgaggcagtttgcaggtatgttccacaatgatctctatcatccagtcaaggtgtgactcctcccttgcaacaggcatatgcatggagtgagtaaagtggtcaacagacctttcaaaaccatggcatcttttcagaactctgacttgggttgtgtgatctagctgtgaatgtagcaatatagaacgtttaatagaatgataagcaaaacactgcaatgatctaaaattacaaataaaataaaaatgaacaacattttgatacccaaaatgaaaattcccatcagcctgaactttatgttgtgaagttcatgaatgtcagtgaggtatctctgagatgtttcttagcagtcatcctggtgtaagcatgcagttatggcataggtttgtgtgtgttaataagcctttaaaacatatgcaaccacaacaaatgataaagtaaaacaattattttctgttgccctgaatatcaaacttgcccttgcccttactcagcaaaataacatttataagttttccaaaatcccaaagtagaagtttccttaaaaaaatcatcttgtataataccagtattcaaacatgggtaaggttaatcacccccaatcactcaggagatagttgcagaatttgaattacaatctcttcttactttcctagcctgtggcttgtcacttctccaaattgccatgctaaatatgcatgaaaattgagggagaatgctagttaaaaagaaattaggatttatcactggaattgaaactaagagtacaaaagtctgaacgaatgaaacttttctccaaattttacaaattcttgttcctttctcattagaagagcatgctatccaaagcataaatctcccttgaaaataacagaggcttcttaagccctctcttagctatgatcaatggatgatattatgcttcccatagctaatgtgatagctccttgcctaggattcctgttgaaataaggattctagccccatgttaagtttttcaaattactacaaattttagataagcatttggagctttttatactagaattatcaattttttattttagctaattacctgtgggcattatacttgaggcaggtaccaaactacttacagcctttttaatgaaaatgtgctgtgtactttgaatccattcatagacaaaattaccttgatgttctcttaactcattctttattttagtgattaaatacaacctttgagttgttcaatatcatttgaaaatggtaggatttgtggttattttcattaccctattagatttaagataggctgggatgacagaggcctccttgaatagctatgaagcctcattcagcatatcaaatggtagtctgagttctaagaaaccttaagtaatttatcattctgtaaatactcttataagcaataatttttatttgtatttttgaaaacaaactacttaaatatggaaaaatattaactggaaagccagcagtagggttttctattttt

SEQ ID NO: 4803 - protein, 924 aa, Homo sapiens; identical to SEQ ID NO: 551

SEQ ID NO: 4804 - DNA, 5091 bp, Homo sapiens
acagctcctcctgggcgcgcacacgctcacacgctcgcaagcgaacgcaggaaagtcaggctaaaagtgtctgctgctgctgccgccccccactccgcctccgggagagagccttgaaaccagcgaaacaataatcaaagagcagttctgtcaaagaaaacaacataaatcaggtacagaatttcagagtgggatatcagatctttagtgtgaagatacatctacattaaaccaggaatcactagaactgacatttggacaagaaaatttggaaaattttaaaactgtgaaggttgatcatggaaattaaagaggaaggggcatcagaagaagggcagcactttcttcctacagcccaggccaatgatcccggggactgtcagttcacaagtatccagaagactccaaatgaaccgcagttggaattcatccttgcatgcaaggatctcgtggctcctgtccgtgatcgtaaactgaatacactggtgcagatctccgtaatccaccccgtggagcagagtctgacaagatactccagcaccgaaattgtggagggaacaagggacccactgtttttgactggtgtcacattcccatctgagtatcccatctatgaggagaccaaaataaaactaacagtctatgatgtcaaggataagtctcatgacaccgttcgaaccagtgtcctaccagaacataaggatcccccgccagaagttgggcgaagtttcttgggctatgccagttttaaagtgggagagctgctgaagtcaaaggagcaattgctggtcctgagcctgagaacttcagatggtggcaaagtggttggcaccatagaagtcagtgtcgtgaagatgggggagattgaggatggggaagccgaccacatcaccacagatgtacagggacaaaagtgtgccctggtatgtgaatgtacagccccggaaagtgtgagcggaaaagataacttaccttttttgaattcagtgttaaagaacccagtatgtaaattatatagatttcccacatctgacaataagtggatgcgaattcgagagcagatgtcagagagcattctttcctttcatattcctaaggaattgatttcccttcacattaaagaagatttgtgcagaaaccaggagataaaagaacttggtgagctttctccacattgggacaatctgcgaaaaaatgtccttactcactgtgatcaaatggtgaatatgtaccaagacattctgacagaacttagcaaggaaacagggtcctctttcaaatcaagcagcagcaaaggagagaaaacattagaatttgttccaataaatctacatctgcaaagaatgcaggtacacagccctcacttgaaagatgctctctacgatgtcatcactgtgggagccccagctgcccattttcagggatttaagaatggtggtcttcggaagctactccatagatttgaaacagaaagaagaaataccggataccagtttatttactattcacctgaaaacacagccaaagcaaaggaagttctcagcaacatcaatcaactacaacctcttatagcaacccatgcagacctactgcttaattctgcaagccagcattctccagacagcttgaagaattctttaaagatgctttcagaaaaaacagagctttttgtacatgccttcaaggatcaacttgtcaggagtgctcttttagcactctacactgcaaggccaggaggcattcttaagaagccaccctctcctaagagcagcacagaggagagcagtccccaagaccaacccccagtgatgagagggcaggactccataccacatcattcagactatgatgaggaagagtgggacagggtgtgggccaatgtggggaagagcctgaactgcattattgctatggtggacaaactgattgaaagagatggtggcagtgaaggcagtggcggcaacaatgatggagaaaaggaaccttcattaacagatgccattccctctcacccaagagaggactggtatgaacagttgtatcccctcatccttaccctgaaggactgcatgggagaagtggtgaaccgagccaagcagtccctgacatttgtgctccttcaggaacttgcgtacagcttgccccagtgtctgatgctgacgctaagaagagacatcgtcttcagccaagcacttgctggattggtttgtggttttatcatcaaattacagacaagtctgtatgacccaggcttcctacagcagcttcacacagtggggttgatagtacaatatgaaggactgctaagtacatacagcgatgaaattggaatgctagaggacatggccgttggcatttccgatttaaagaaagttgcatttaaaataattgaagccaaatccaatgatgtgttgccagttataacaggaagacgagaacattacgtggtagaggtcaagcttccagccagaatgtttgagtcactacctctacagattaaagaaggacagttgcttcatgtgtatccagtactttttaatgttggaatcaatgaacagcaaactctggctgaaaggtttggagatgtctctttgcaagaaagtattaatcaggaaaacttcgaacttctacaagaatattacaagatatttatggaaaagatgcctcctgattatatttcacattttcaggaacaaaatgatttaaaagcattgctagaaaatctccttcaaaatatccaatccaaaaaaagaaagaatgtagaaattatgtggctggctgcaacgatttgccgcaaactgaatggtattcgtttcacctgttgtaaaagtgccaaagacaggacatcgatgtcagtgacacttgaacaatgctcaatcttgagagatgagcaccagttacacaaggacttctttatccgagcgctggattgcatgagaagagaaggatgccgcatagagaatgtactgaagaatatcaaatgcagaaagtatgctttcaacatgctacagctgatggctttccccaagtactacagacctccagaggggacttatggaaaagctgacacctaagtttaccaacatgttaataaacaggaacacaaatacatttcagttggataatcttcaccttggtcttttttgtttgtttttattgtcatgaatttgtggtgggggagatgatcacagatgtttcccaaaatctaggaactacttcaattcatcatcagcatattgctctgaaagaaatccattttaaaaaatcttacatgattcagtactgtcatttctagttctaagcttctatgtgttgagcctagctgattgagattggttcacaaagtgtaaatttcattcatgagtatttaaatgtttctgaggaaacatggatcatttcaataggactaggggtgattcacagagcaccactctccaaccaaatggaagagaggagagggggaaaaggaacatattttttttgtgatacaacttaatagcctatgagaacacagtcaacctgagaatcaatgtaagggatttaaaaaaaatgtgtagccactcaattaggtagagttaactcatgatctggaatactgaggcagtttgcaggtatgttccacaatgatctctatcatccagtcaaggtgtgactcctcccttgcaacaggcatatgcatggagtgagtaaagtggtcaacagacctttcaaaaccatggcatcttttcagaactctgacttgggttgtgtgatctagctgtgaatgtagcaatatagaacgtttaatagaatgataagcaaaacactgcaatgatctaaaattacaaataaaataaaaatgaacaacattttgatacccaaaatgaaaattcccatcagcctgaactttatgttgtgaagttcatgaatgtcagtgaggtatctctgagatgtttcttagcagtcatcctggtgtaagcatgcagttatggcataggtttgtgtgtgttaataagcctttaaaacatatgcaaccacaacaaatgataaagtaaaacaattattttctgttgccctgaatatcaaacttgcccttgcccttactcagcaaaataacatttataagttttccaaaatcccaaagtagaagtttccttaaaaaaatcatcttgtataataccagtattcaaacatgggtaaggttaatcacccccaatcactcaggagatagttgcagaatttgaattacaatctcttcttactttcctagcctgtggcttgtcacttctccaaattgccatgctaaatatgcatgaaaattgagggagaatgctagttaaaaagaaattaggatttatcactggaattgaaactaagagtacaaaagtctgaacgaatgaaacttttctccaaattttacaaattcttgttcctttctcattagaagagcatgctatccaaagcataaatctcccttgaaaataacagaggcttcttaagccctctcttagctatgatcaatggatgatattatgcttcccatagctaatgtgatagctccttgcctaggattcctgttgaaataaggattctagccccatgttaagtttttcaaattactacaaattttagataagcatttggagctttttatactagaattatcaattttttattttagctaattacctgtgggcattatacttgaggcaggtaccaaactacttacagcctttttaatgaaaatgtgctgtgtactttgaatccattcatagacaaaattaccttgatgttctcttaactcattctttattttagtgattaaatacaacctttgagttgttcaatatcatttgaaaatggtaggatttgtggttattttcattaccctattagatttaagataggctgggatgacagaggcctccttgaatagctatgaagcctcattcagcatatcaaatggtagtctgagttctaagaaaccttaagtaatttatcattctgtaaatactcttataagcaataatttttatttgtatttttgaaaacaaactacttaaatatggaaaaatattaactggaaagccagcagtagggttttctattttt

SEQ ID NO: 4805 - protein, 924 aa, Homo sapiens; identical to SEQ ID NO: 551

SEQ ID NO: 4806 - DNA, 5372 bp, Homo sapiens
agccggagagccagccgcgctggtgacaacttctctggggcgcgcgcggggctggtaggcgaggagcgagcagggagcgcggccgaagccagaggctgggggagctgctggagcctcgcgaagccgcggccggcgccctgcgccgtcgccgccgcctgctagtttcctccgggttctcagccccgggtactgaggcttcggtctataaatagcaggttacagctcctcctgggcgcgcacacgctcacacgctcgcaagcgaacgcaggaaagtcaggctaaaagtgtctgctgctgctgccgccccccactccgcctccgggagagaatacaaagaaatggtgttacctggcaagaggtcttctgtcttttatgaaaaattagacaaagagccttgaaaccagcgaaacaataatcaaagagcagttctgtcaaagaaaacaacataaatcaggtacagaatttcagagtgggatatcagatctttagtgtgaagatacatctacattaaaccaggaatcactagaactgacatttggacaagaaaatttggaaaattttaaaactgtgaaggttgatcatggaaattaaagaggaaggggcatcagaagaagggcagcactttcttcctacagcccaggccaatgatcccggggactgtcagttcacaagtatccagaagactccaaatgaaccgcagttggaattcatccttgcatgcaaggatctcgtggctcctgtccgtgatcgtaaactgaatacactggtgcagatctccgtaatccaccccgtggagcagagtctgacaagatactccagcaccgaaattgtggagggaacaagggacccactgtttttgactggtgtcacattcccatctgagtatcccatctatgaggagaccaaaataaaactaacagtctatgatgtcaaggataagtctcatgacaccgttcgaaccagtgtcctaccagaacataaggatcccccgccagaagttgggcgaagtttcttgggctatgccagttttaaagtgggagagctgctgaagtcaaaggagcaattgctggtcctgagcctgagaacttcagatggtggcaaagtggttggcaccatagaagtcagtgtcgtgaagatgggggagattgaggatggggaagccgaccacatcaccacagatgtacagggacaaaagtgtgccctggtatgtgaatgtacagccccggaaagtgtgagcggaaaagataacttaccttttttgaattcagtgttaaagaacccagtatgtaaattatatagatttcccacatctgacaataagtggatgcgaattcgagagcagatgtcagagagcattctttcctttcatattcctaaggaattgatttcccttcacattaaagaagatttgtgcagaaaccaggagataaaagaacttggtgagctttctccacattgggacaatctgcgaaaaaatgtccttactcactgtgatcaaatggtgaatatgtaccaagacattctgacagaacttagcaaggaaacagggtcctctttcaaatcaagcagcagcaaaggagagaaaacattagaatttgttccaataaatctacatctgcaaagaatgcaggtacacagccctcacttgaaagatgctctctacgatgtcatcactgtgggagccccagctgcccattttcagggatttaagaatggtggtcttcggaagctactccatagatttgaaacagaaagaagaaataccggataccagtttatttactattcacctgaaaacacagccaaagcaaaggaagttctcagcaacatcaatcaactacaacctcttatagcaacccatgcagacctactgcttaattctgcaagccagcattctccagacagcttgaagaattctttaaagatgctttcagaaaaaacagagctttttgtacatgccttcaaggatcaacttgtcaggagtgctcttttagcactctacactgcaaggccaggaggcattcttaagaagccaccctctcctaagagcagcacagaggagagcagtccccaagaccaacccccagtgatgagagggcaggactccataccacatcattcagactatgatgaggaagagtgggacagggtgtgggccaatgtggggaagagcctgaactgcattattgctatggtggacaaactgattgaaagagatggtggcagtgaaggcagtggcggcaacaatgatggagaaaaggaaccttcattaacagatgccattccctctcacccaagagaggactggtatgaacagttgtatcccctcatccttaccctgaaggactgcatgggagaagtggtgaaccgagccaagcagtccctgacatttgtgctccttcaggaacttgcgtacagcttgccccagtgtctgatgctgacgctaagaagagacatcgtcttcagccaagcacttgctggattggtttgtggttttatcatcaaattacagacaagtctgtatgacccaggcttcctacagcagcttcacacagtggggttgatagtacaatatgaaggactgctaagtacatacagcgatgaaattggaatgctagaggacatggccgttggcatttccgatttaaagaaagttgcatttaaaataattgaagccaaatccaatgatgtgttgccagttataacaggaagacgagaacattacgtggtagaggtcaagcttccagccagaatgtttgagtcactacctctacagattaaagaaggacagttgcttcatgtgtatccagtactttttaatgttggaatcaatgaacagcaaactctggctgaaaggtttggagatgtctctttgcaagaaagtattaatcaggaaaacttcgaacttctacaagaatattacaagatatttatggaaaagatgcctcctgattatatttcacattttcaggaacaaaatgatttaaaagcattgctagaaaatctccttcaaaatatccaatccaaaaaaagaaagaatgtagaaattatgtggctggctgcaacgatttgccgcaaactgaatggtattcgtttcacctgttgtaaaagtgccaaagacaggacatcgatgtcagtgacacttgaacaatgctcaatcttgagagatgagcaccagttacacaaggacttctttatccgagcgctggattgcatgagaagagaaggatgccgcatagagaatgtactgaagaatatcaaatgcagaaagtatgctttcaacatgctacagctgatggctttccccaagtactacagacctccagaggggacttatggaaaagctgacacctaagtttaccaacatgttaataaacaggaacacaaatacatttcagttggataatcttcaccttggtcttttttgtttgtttttattgtcatgaatttgtggtgggggagatgatcacagatgtttcccaaaatctaggaactacttcaattcatcatcagcatattgctctgaaagaaatccattttaaaaaatcttacatgattcagtactgtcatttctagttctaagcttctatgtgttgagcctagctgattgagattggttcacaaagtgtaaatttcattcatgagtatttaaatgtttctgaggaaacatggatcatttcaataggactaggggtgattcacagagcaccactctccaaccaaatggaagagaggagagggggaaaaggaacatattttttttgtgatacaacttaatagcctatgagaacacagtcaacctgagaatcaatgtaagggatttaaaaaaaatgtgtagccactcaattaggtagagttaactcatgatctggaatactgaggcagtttgcaggtatgttccacaatgatctctatcatccagtcaaggtgtgactcctcccttgcaacaggcatatgcatggagtgagtaaagtggtcaacagacctttcaaaaccatggcatcttttcagaactctgacttgggttgtgtgatctagctgtgaatgtagcaatatagaacgtttaatagaatgataagcaaaacactgcaatgatctaaaattacaaataaaataaaaatgaacaacattttgatacccaaaatgaaaattcccatcagcctgaactttatgttgtgaagttcatgaatgtcagtgaggtatctctgagatgtttcttagcagtcatcctggtgtaagcatgcagttatggcataggtttgtgtgtgttaataagcctttaaaacatatgcaaccacaacaaatgataaagtaaaacaattattttctgttgccctgaatatcaaacttgcccttgcccttactcagcaaaataacatttataagttttccaaaatcccaaagtagaagtttccttaaaaaaatcatcttgtataataccagtattcaaacatgggtaaggttaatcacccccaatcactcaggagatagttgcagaatttgaattacaatctcttcttactttcctagcctgtggcttgtcacttctccaaattgccatgctaaatatgcatgaaaattgagggagaatgctagttaaaaagaaattaggatttatcactggaattgaaactaagagtacaaaagtctgaacgaatgaaacttttctccaaattttacaaattcttgttcctttctcattagaagagcatgctatccaaagcataaatctcccttgaaaataacagaggcttcttaagccctctcttagctatgatcaatggatgatattatgcttcccatagctaatgtgatagctccttgcctaggattcctgttgaaataaggattctagccccatgttaagtttttcaaattactacaaattttagataagcatttggagctttttatactagaattatcaattttttattttagctaattacctgtgggcattatacttgaggcaggtaccaaactacttacagcctttttaatgaaaatgtgctgtgtactttgaatccattcatagacaaaattaccttgatgttctcttaactcattctttattttagtgattaaatacaacctttgagttgttcaatatcatttgaaaatggtaggatttgtggttattttcattaccctattagatttaagataggctgggatgacagaggcctccttgaatagctatgaagcctcattcagcatatcaaatggtagtctgagttctaagaaaccttaagtaatttatcattctgtaaatactcttataagcaataatttttatttgtatttttgaaaacaaactacttaaatatggaaaaatattaactggaaagccagcagtagggttttctattttt

SEQ ID NO: 4807 - protein, 924 aa, Homo sapiens; identical to SEQ ID NO: 551

SEQ ID NO: 4808 - DNA, 5103 bp, Homo sapiens
aaagcgcagatggggagagtcatttgccccacaccctacacagcccggaataaccaggaatacaaagaaatggtgttacctggcaagaggtcttctgtcttttatgaaaaattagacaaagagccttgaaaccagcgaaacaataatcaaagagcagttctgtcaaagaaaacaacataaatcaggtacagaatttcagagtgggatatcagatctttagtgtgaagatacatctacattaaaccaggaatcactagaactgacatttggacaagaaaatttggaaaattttaaaactgtgaaggttgatcatggaaattaaagaggaaggggcatcagaagaagggcagcactttcttcctacagcccaggccaatgatcccggggactgtcagttcacaagtatccagaagactccaaatgaaccgcagttggaattcatccttgcatgcaaggatctcgtggctcctgtccgtgatcgtaaactgaatacactggtgcagatctccgtaatccaccccgtggagcagagtctgacaagatactccagcaccgaaattgtggagggaacaagggacccactgtttttgactggtgtcacattcccatctgagtatcccatctatgaggagaccaaaataaaactaacagtctatgatgtcaaggataagtctcatgacaccgttcgaaccagtgtcctaccagaacataaggatcccccgccagaagttgggcgaagtttcttgggctatgccagttttaaagtgggagagctgctgaagtcaaaggagcaattgctggtcctgagcctgagaacttcagatggtggcaaagtggttggcaccatagaagtcagtgtcgtgaagatgggggagattgaggatggggaagccgaccacatcaccacagatgtacagggacaaaagtgtgccctggtatgtgaatgtacagccccggaaagtgtgagcggaaaagataacttaccttttttgaattcagtgttaaagaacccagtatgtaaattatatagatttcccacatctgacaataagtggatgcgaattcgagagcagatgtcagagagcattctttcctttcatattcctaaggaattgatttcccttcacattaaagaagatttgtgcagaaaccaggagataaaagaacttggtgagctttctccacattgggacaatctgcgaaaaaatgtccttactcactgtgatcaaatggtgaatatgtaccaagacattctgacagaacttagcaaggaaacagggtcctctttcaaatcaagcagcagcaaaggagagaaaacattagaatttgttccaataaatctacatctgcaaagaatgcaggtacacagccctcacttgaaagatgctctctacgatgtcatcactgtgggagccccagctgcccattttcagggatttaagaatggtggtcttcggaagctactccatagatttgaaacagaaagaagaaataccggataccagtttatttactattcacctgaaaacacagccaaagcaaaggaagttctcagcaacatcaatcaactacaacctcttatagcaacccatgcagacctactgcttaattctgcaagccagcattctccagacagcttgaagaattctttaaagatgctttcagaaaaaacagagctttttgtacatgccttcaaggatcaacttgtcaggagtgctcttttagcactctacactgcaaggccaggaggcattcttaagaagccaccctctcctaagagcagcacagaggagagcagtccccaagaccaacccccagtgatgagagggcaggactccataccacatcattcagactatgatgaggaagagtgggacagggtgtgggccaatgtggggaagagcctgaactgcattattgctatggtggacaaactgattgaaagagatggtggcagtgaaggcagtggcggcaacaatgatggagaaaaggaaccttcattaacagatgccattccctctcacccaagagaggactggtatgaacagttgtatcccctcatccttaccctgaaggactgcatgggagaagtggtgaaccgagccaagcagtccctgacatttgtgctccttcaggaacttgcgtacagcttgccccagtgtctgatgctgacgctaagaagagacatcgtcttcagccaagcacttgctggattggtttgtggttttatcatcaaattacagacaagtctgtatgacccaggcttcctacagcagcttcacacagtggggttgatagtacaatatgaaggactgctaagtacatacagcgatgaaattggaatgctagaggacatggccgttggcatttccgatttaaagaaagttgcatttaaaataattgaagccaaatccaatgatgtgttgccagttataacaggaagacgagaacattacgtggtagaggtcaagcttccagccagaatgtttgagtcactacctctacagattaaagaaggacagttgcttcatgtgtatccagtactttttaatgttggaatcaatgaacagcaaactctggctgaaaggtttggagatgtctctttgcaagaaagtattaatcaggaaaacttcgaacttctacaagaatattacaagatatttatggaaaagatgcctcctgattatatttcacattttcaggaacaaaatgatttaaaagcattgctagaaaatctccttcaaaatatccaatccaaaaaaagaaagaatgtagaaattatgtggctggctgcaacgatttgccgcaaactgaatggtattcgtttcacctgttgtaaaagtgccaaagacaggacatcgatgtcagtgacacttgaacaatgctcaatcttgagagatgagcaccagttacacaaggacttctttatccgagcgctggattgcatgagaagagaaggatgccgcatagagaatgtactgaagaatatcaaatgcagaaagtatgctttcaacatgctacagctgatggctttccccaagtactacagacctccagaggggacttatggaaaagctgacacctaagtttaccaacatgttaataaacaggaacacaaatacatttcagttggataatcttcaccttggtcttttttgtttgtttttattgtcatgaatttgtggtgggggagatgatcacagatgtttcccaaaatctaggaactacttcaattcatcatcagcatattgctctgaaagaaatccattttaaaaaatcttacatgattcagtactgtcatttctagttctaagcttctatgtgttgagcctagctgattgagattggttcacaaagtgtaaatttcattcatgagtatttaaatgtttctgaggaaacatggatcatttcaataggactaggggtgattcacagagcaccactctccaaccaaatggaagagaggagagggggaaaaggaacatattttttttgtgatacaacttaatagcctatgagaacacagtcaacctgagaatcaatgtaagggatttaaaaaaaatgtgtagccactcaattaggtagagttaactcatgatctggaatactgaggcagtttgcaggtatgttccacaatgatctctatcatccagtcaaggtgtgactcctcccttgcaacaggcatatgcatggagtgagtaaagtggtcaacagacctttcaaaaccatggcatcttttcagaactctgacttgggttgtgtgatctagctgtgaatgtagcaatatagaacgtttaatagaatgataagcaaaacactgcaatgatctaaaattacaaataaaataaaaatgaacaacattttgatacccaaaatgaaaattcccatcagcctgaactttatgttgtgaagttcatgaatgtcagtgaggtatctctgagatgtttcttagcagtcatcctggtgtaagcatgcagttatggcataggtttgtgtgtgttaataagcctttaaaacatatgcaaccacaacaaatgataaagtaaaacaattattttctgttgccctgaatatcaaacttgcccttgcccttactcagcaaaataacatttataagttttccaaaatcccaaagtagaagtttccttaaaaaaatcatcttgtataataccagtattcaaacatgggtaaggttaatcacccccaatcactcaggagatagttgcagaatttgaattacaatctcttcttactttcctagcctgtggcttgtcacttctccaaattgccatgctaaatatgcatgaaaattgagggagaatgctagttaaaaagaaattaggatttatcactggaattgaaactaagagtacaaaagtctgaacgaatgaaacttttctccaaattttacaaattcttgttcctttctcattagaagagcatgctatccaaagcataaatctcccttgaaaataacagaggcttcttaagccctctcttagctatgatcaatggatgatattatgcttcccatagctaatgtgatagctccttgcctaggattcctgttgaaataaggattctagccccatgttaagtttttcaaattactacaaattttagataagcatttggagctttttatactagaattatcaattttttattttagctaattacctgtgggcattatacttgaggcaggtaccaaactacttacagcctttttaatgaaaatgtgctgtgtactttgaatccattcatagacaaaattaccttgatgttctcttaactcattctttattttagtgattaaatacaacctttgagttgttcaatatcatttgaaaatggtaggatttgtggttattttcattaccctattagatttaagataggctgggatgacagaggcctccttgaatagctatgaagcctcattcagcatatcaaatggtagtctgagttctaagaaaccttaagtaatttatcattctgtaaatactcttataagcaataatttttatttgtatttttgaaaacaaactacttaaatatggaaaaatattaactggaaagccagcagtagggttttctattttt

SEQ ID NO: 4809 - protein, 924 aa, Homo sapiens; identical to SEQ ID NO: 551

SEQ ID NO: 4810 - DNA, 3184 bp, Homo sapiens
cccaagaggggtcttactcatccttttccattttggagaggttctgctgactctacattaagcccagacagggtggtgtcctgctttgctcctttctgctctctgcgttcctctgctgccttgatggattctgatgtggttgctcagatgatcagcctgcaggagccttgaaaccagcgaaacaataatcaaagagcagttctgtcaaagaaaacaacataaatcaggtacagaatttcagagtgggatatcagatctttagtgtgaagatacatctacattaaaccaggaatcactagaactgacatttggacaagaaaatttggaaaattttaaaactgtgaaggttgatcatggaaattaaagaggaaggggcatcagaagaagggcagcactttcttcctacagcccaggccaatgatcccggggactgtcagttcacaagtatccagaagactccaaatgaaccgcagttggaattcatccttgcatgcaaggatctcgtggctcctgtccgtgatcgtaaactgaatacactggtgcagatctccgtaatccaccccgtggagcagagtctgacaagatactccagcaccgaaattgtggagggaacaagggacccactgtttttgactggtgtcacattcccatctgagtatcccatctatgaggagaccaaaataaaactaacagtctatgatgtcaaggataagtctcatgacaccgttcgaaccagtgtcctaccagaacataaggatcccccgccagaagttgggcgaagtttcttgggctatgccagttttaaagtgggagagctgctgaagtcaaaggagcaattgctggtcctgagcctgagaacttcagatggtggcaaagtggttggcaccatagaagtcagtgtcgtgaagatgggggagattgaggatggggaagccgaccacatcaccacagatgtacagggacaaaagtgtgccctggtatgtgaatgtacagccccggaaagtgtgagcggaaaagataacttaccttttttgaattcagtgttaaagaacccagtatgtaaattatatagatttcccacatctgacaataagtggatgcgaattcgagagcagatgtcagagagcattctttcctttcatattcctaaggaattgatttcccttcacattaaagaagatttgtgcagaaaccaggagataaaagaacttggtgagctttctccacattgggacaatctgcgaaaaaatgtccttactcactgtgatcaaatggtgaatatgtaccaagacattctgacagaacttagcaaggaaacagggtcctctttcaaatcaagcagcagcaaaggagagaaaacattagaatttgttccaataaatctacatctgcaaagaatgcaggtacacagccctcacttgaaagatgctctctacgatgtcatcactgtgggagccccagctgcccattttcagggatttaagaatggtggtcttcggaagctactccatagatttgaaacagaaagaagaaataccggataccagtttatttactattcacctgaaaacacagccaaagcaaaggaagttctcagcaacatcaatcaactacaacctcttatagcaacccatgcagacctactgcttaattctgcaagccagcattctccagacagcttgaagaattctttaaagatgctttcagaaaaaacagagctttttgtacatgccttcaaggatcaacttgtcaggagtgctcttttagcactctacactgcaaggccaggaggcattcttaagaagccaccctctcctaagagcagcacagaggagagcagtccccaagaccaacccccagtgatgagagggcaggactccataccacatcattcagactatgatgaggaagagtgggacagggtgtgggccaatgtggggaagagcctgaactgcattattgctatggtggacaaactgattgaaagagatggtggcagtgaaggcagtggcggcaacaatgatggagaaaaggaaccttcattaacagatgccattccctctcacccaagagaggactggtatgaacagttgtatcccctcatccttaccctgaaggactgcatgggagaagtggtgaaccgagccaagcagtccctgacatttgtgctccttcaggaacttgcgtacagcttgccccagtgtctgatgctgacgctaagaagagacatcgtcttcagccaagcacttgctggattggtttgtggttttatcatcaaattacagacaagtctgtatgacccaggcttcctacagcagcttcacacagtggggttgatagtacaatatgaaggactgctaagtacatacagcgatgaaattggaatgctagaggacatggccgttggcatttccgatttaaagaaagttgcatttaaaataattgaagccaaatccaatgatgtgttgccagttataacaggaagacgagaacattacgtggtagaggtcaagcttccagccagaatgtttgagtcactacctctacagattaaagaaggacagttgcttcatgtgtatccagtactttttaatgttggaatcaatgaacagcaaactctggctgaaaggtttggagatgtctctttgcaagaaagtattaatcaggaaaacttcgaacttctacaagaatattacaagatatttatggaaaagatgcctcctgattatatttcacattttcaggaacaaaatgatttaaaagcattgctagaaaatctccttcaaaatatccaatccaaaaaaagaaagaatgtagaaattatgtggctggctgcaacgatttgccgcaaactgaatggtattcgtttcacctgttgtaaaagtgccaaagacaggacatcgatgtcagtgacacttgaacaatgctcaatcttgagagatgagcaccagttacacaaggacttctttatccgagcgctggattgcatgagaagagaaggatgccgcatagagaatgtactgaagaatatcaaatgcagaaagtatgctttcaacatgctacagctgatggctttccccaagtactacagacctccagaggggacttatggaaaagctgacacctaagtttaccaacatgttaataaacaggaacacaaatacatttcagttggataatcttc

SEQ ID NO: 4811 - protein, 924 aa, Homo sapiens; identical to SEQ ID NO: 551

SEQ ID NO: 4812 - DNA, 3368 bp, Homo sapiens
agacagcagaaggatcactgggctggaagctctaacaggcattgccagcctagctacctgcagtttgaggcaagggcagggtcacttaccctgctgtctgaatgtctcctgggacaacaggaggctgcactcactggctgagttcagacagaagagggatcatcggactggaagctctggcaggtatggctagcctggttacccgtagtgagaatggagagggccacctgcccagctacacagatgtttcccaggacaacaggaggctgtgtccactgacagttcagacagaagtggaaccactggaccggaagctctagcaagtgttgcccacctggctactagtgagccttgaaaccagcgaaacaataatcaaagagcagttctgtcaaagaaaacaacataaatcaggtacagaatttcagagtgggatatcagatctttagtgtgaagatacatctacattaaaccaggaatcactagaactgacatttggacaagaaaatttggaaaattttaaaactgtgaaggttgatcatggaaattaaagaggaaggggcatcagaagaagggcagcactttcttcctacagcccaggccaatgatcccggggactgtcagttcacaagtatccagaagactccaaatgaaccgcagttggaattcatccttgcatgcaaggatctcgtggctcctgtccgtgatcgtaaactgaatacactggtgcagatctccgtaatccaccccgtggagcagagtctgacaagatactccagcaccgaaattgtggagggaacaagggacccactgtttttgactggtgtcacattcccatctgagtatcccatctatgaggagaccaaaataaaactaacagtctatgatgtcaaggataagtctcatgacaccgttcgaaccagtgtcctaccagaacataaggatcccccgccagaagttgggcgaagtttcttgggctatgccagttttaaagtgggagagctgctgaagtcaaaggagcaattgctggtcctgagcctgagaacttcagatggtggcaaagtggttggcaccatagaagtcagtgtcgtgaagatgggggagattgaggatggggaagccgaccacatcaccacagatgtacagggacaaaagtgtgccctggtatgtgaatgtacagccccggaaagtgtgagcggaaaagataacttaccttttttgaattcagtgttaaagaacccagtatgtaaattatatagatttcccacatctgacaataagtggatgcgaattcgagagcagatgtcagagagcattctttcctttcatattcctaaggaattgatttcccttcacattaaagaagatttgtgcagaaaccaggagataaaagaacttggtgagctttctccacattgggacaatctgcgaaaaaatgtccttactcactgtgatcaaatggtgaatatgtaccaagacattctgacagaacttagcaaggaaacagggtcctctttcaaatcaagcagcagcaaaggagagaaaacattagaatttgttccaataaatctacatctgcaaagaatgcaggtacacagccctcacttgaaagatgctctctacgatgtcatcactgtgggagccccagctgcccattttcagggatttaagaatggtggtcttcggaagctactccatagatttgaaacagaaagaagaaataccggataccagtttatttactattcacctgaaaacacagccaaagcaaaggaagttctcagcaacatcaatcaactacaacctcttatagcaacccatgcagacctactgcttaattctgcaagccagcattctccagacagcttgaagaattctttaaagatgctttcagaaaaaacagagctttttgtacatgccttcaaggatcaacttgtcaggagtgctcttttagcactctacactgcaaggccaggaggcattcttaagaagccaccctctcctaagagcagcacagaggagagcagtccccaagaccaacccccagtgatgagagggcaggactccataccacatcattcagactatgatgaggaagagtgggacagggtgtgggccaatgtggggaagagcctgaactgcattattgctatggtggacaaactgattgaaagagatggtggcagtgaaggcagtggcggcaacaatgatggagaaaaggaaccttcattaacagatgccattccctctcacccaagagaggactggtatgaacagttgtatcccctcatccttaccctgaaggactgcatgggagaagtggtgaaccgagccaagcagtccctgacatttgtgctccttcaggaacttgcgtacagcttgccccagtgtctgatgctgacgctaagaagagacatcgtcttcagccaagcacttgctggattggtttgtggttttatcatcaaattacagacaagtctgtatgacccaggcttcctacagcagcttcacacagtggggttgatagtacaatatgaaggactgctaagtacatacagcgatgaaattggaatgctagaggacatggccgttggcatttccgatttaaagaaagttgcatttaaaataattgaagccaaatccaatgatgtgttgccagttataacaggaagacgagaacattacgtggtagaggtcaagcttccagccagaatgtttgagtcactacctctacagattaaagaaggacagttgcttcatgtgtatccagtactttttaatgttggaatcaatgaacagcaaactctggctgaaaggtttggagatgtctctttgcaagaaagtattaatcaggaaaacttcgaacttctacaagaatattacaagatatttatggaaaagatgcctcctgattatatttcacattttcaggaacaaaatgatttaaaagcattgctagaaaatctccttcaaaatatccaatccaaaaaaagaaagaatgtagaaattatgtggctggctgcaacgatttgccgcaaactgaatggtattcgtttcacctgttgtaaaagtgccaaagacaggacatcgatgtcagtgacacttgaacaatgctcaatcttgagagatgagcaccagttacacaaggacttctttatccgagcgctggattgcatgagaagagaaggatgccgcatagagaatgtactgaagaatatcaaatgcagaaagtatgctttcaacatgctacagctgatggctttccccaagtactacagacctccagaggggacttatggaaaagctgacacctaagtttaccaacatgttaataaacaggaacacaaatacatttcagttggataatcttc

SEQ ID NO: 4813 - protein, 924 aa, Homo sapiens; identical to SEQ ID NO: 551

SEQ ID NO: 4814 - DNA, 3238 bp, Homo sapiens
ggacaacaggaggctgtgcctgccttctgagctcagacagcagaaggatcactgggctggaagctctaacaggcattgccagcctagctacctgcagtttgaggcaagggcagggtcacttaccctgctgtctgaatgtctcctgggacaacaggaggctgcactcactggctgagttcagacagaagagggatcatcggactggaagctctggcagagccttgaaaccagcgaaacaataatcaaagagcagttctgtcaaagaaaacaacataaatcaggtacagaatttcagagtgggatatcagatctttagtgtgaagatacatctacattaaaccaggaatcactagaactgacatttggacaagaaaatttggaaaattttaaaactgtgaaggttgatcatggaaattaaagaggaaggggcatcagaagaagggcagcactttcttcctacagcccaggccaatgatcccggggactgtcagttcacaagtatccagaagactccaaatgaaccgcagttggaattcatccttgcatgcaaggatctcgtggctcctgtccgtgatcgtaaactgaatacactggtgcagatctccgtaatccaccccgtggagcagagtctgacaagatactccagcaccgaaattgtggagggaacaagggacccactgtttttgactggtgtcacattcccatctgagtatcccatctatgaggagaccaaaataaaactaacagtctatgatgtcaaggataagtctcatgacaccgttcgaaccagtgtcctaccagaacataaggatcccccgccagaagttgggcgaagtttcttgggctatgccagttttaaagtgggagagctgctgaagtcaaaggagcaattgctggtcctgagcctgagaacttcagatggtggcaaagtggttggcaccatagaagtcagtgtcgtgaagatgggggagattgaggatggggaagccgaccacatcaccacagatgtacagggacaaaagtgtgccctggtatgtgaatgtacagccccggaaagtgtgagcggaaaagataacttaccttttttgaattcagtgttaaagaacccagtatgtaaattatatagatttcccacatctgacaataagtggatgcgaattcgagagcagatgtcagagagcattctttcctttcatattcctaaggaattgatttcccttcacattaaagaagatttgtgcagaaaccaggagataaaagaacttggtgagctttctccacattgggacaatctgcgaaaaaatgtccttactcactgtgatcaaatggtgaatatgtaccaagacattctgacagaacttagcaaggaaacagggtcctctttcaaatcaagcagcagcaaaggagagaaaacattagaatttgttccaataaatctacatctgcaaagaatgcaggtacacagccctcacttgaaagatgctctctacgatgtcatcactgtgggagccccagctgcccattttcagggatttaagaatggtggtcttcggaagctactccatagatttgaaacagaaagaagaaataccggataccagtttatttactattcacctgaaaacacagccaaagcaaaggaagttctcagcaacatcaatcaactacaacctcttatagcaacccatgcagacctactgcttaattctgcaagccagcattctccagacagcttgaagaattctttaaagatgctttcagaaaaaacagagctttttgtacatgccttcaaggatcaacttgtcaggagtgctcttttagcactctacactgcaaggccaggaggcattcttaagaagccaccctctcctaagagcagcacagaggagagcagtccccaagaccaacccccagtgatgagagggcaggactccataccacatcattcagactatgatgaggaagagtgggacagggtgtgggccaatgtggggaagagcctgaactgcattattgctatggtggacaaactgattgaaagagatggtggcagtgaaggcagtggcggcaacaatgatggagaaaaggaaccttcattaacagatgccattccctctcacccaagagaggactggtatgaacagttgtatcccctcatccttaccctgaaggactgcatgggagaagtggtgaaccgagccaagcagtccctgacatttgtgctccttcaggaacttgcgtacagcttgccccagtgtctgatgctgacgctaagaagagacatcgtcttcagccaagcacttgctggattggtttgtggttttatcatcaaattacagacaagtctgtatgacccaggcttcctacagcagcttcacacagtggggttgatagtacaatatgaaggactgctaagtacatacagcgatgaaattggaatgctagaggacatggccgttggcatttccgatttaaagaaagttgcatttaaaataattgaagccaaatccaatgatgtgttgccagttataacaggaagacgagaacattacgtggtagaggtcaagcttccagccagaatgtttgagtcactacctctacagattaaagaaggacagttgcttcatgtgtatccagtactttttaatgttggaatcaatgaacagcaaactctggctgaaaggtttggagatgtctctttgcaagaaagtattaatcaggaaaacttcgaacttctacaagaatattacaagatatttatggaaaagatgcctcctgattatatttcacattttcaggaacaaaatgatttaaaagcattgctagaaaatctccttcaaaatatccaatccaaaaaaagaaagaatgtagaaattatgtggctggctgcaacgatttgccgcaaactgaatggtattcgtttcacctgttgtaaaagtgccaaagacaggacatcgatgtcagtgacacttgaacaatgctcaatcttgagagatgagcaccagttacacaaggacttctttatccgagcgctggattgcatgagaagagaaggatgccgcatagagaatgtactgaagaatatcaaatgcagaaagtatgctttcaacatgctacagctgatggctttccccaagtactacagacctccagaggggacttatggaaaagctgacacctaagtttaccaacatgttaataaacaggaacacaaatacatttcagttggataatcttc

SEQ ID NO: 4815 - protein, 924 aa, Homo sapiens; identical to SEQ ID NO: 551

SEQ ID NO: 4816 - DNA, 3259 bp, Homo sapiens
gattttgctgttaatacttgcaattgtactataaaatcgttgaagtggatttttgacttctatcagctcagtttggttctttcttaaaatggccattttaccttctagtttctgtaccattttattatatttcttagattcattgaattgggtttcttctttcttttgaatgtcgataatcttcattccaatccatattctgaactctatttctgacatttcagccatttcagcccagagccttgaaaccagcgaaacaataatcaaagagcagttctgtcaaagaaaacaacataaatcaggtacagaatttcagagtgggatatcagatctttagtgtgaagatacatctacattaaaccaggaatcactagaactgacatttggacaagaaaatttggaaaattttaaaactgtgaaggttgatcatggaaattaaagaggaaggggcatcagaagaagggcagcactttcttcctacagcccaggccaatgatcccggggactgtcagttcacaagtatccagaagactccaaatgaaccgcagttggaattcatccttgcatgcaaggatctcgtggctcctgtccgtgatcgtaaactgaatacactggtgcagatctccgtaatccaccccgtggagcagagtctgacaagatactccagcaccgaaattgtggagggaacaagggacccactgtttttgactggtgtcacattcccatctgagtatcccatctatgaggagaccaaaataaaactaacagtctatgatgtcaaggataagtctcatgacaccgttcgaaccagtgtcctaccagaacataaggatcccccgccagaagttgggcgaagtttcttgggctatgccagttttaaagtgggagagctgctgaagtcaaaggagcaattgctggtcctgagcctgagaacttcagatggtggcaaagtggttggcaccatagaagtcagtgtcgtgaagatgggggagattgaggatggggaagccgaccacatcaccacagatgtacagggacaaaagtgtgccctggtatgtgaatgtacagccccggaaagtgtgagcggaaaagataacttaccttttttgaattcagtgttaaagaacccagtatgtaaattatatagatttcccacatctgacaataagtggatgcgaattcgagagcagatgtcagagagcattctttcctttcatattcctaaggaattgatttcccttcacattaaagaagatttgtgcagaaaccaggagataaaagaacttggtgagctttctccacattgggacaatctgcgaaaaaatgtccttactcactgtgatcaaatggtgaatatgtaccaagacattctgacagaacttagcaaggaaacagggtcctctttcaaatcaagcagcagcaaaggagagaaaacattagaatttgttccaataaatctacatctgcaaagaatgcaggtacacagccctcacttgaaagatgctctctacgatgtcatcactgtgggagccccagctgcccattttcagggatttaagaatggtggtcttcggaagctactccatagatttgaaacagaaagaagaaataccggataccagtttatttactattcacctgaaaacacagccaaagcaaaggaagttctcagcaacatcaatcaactacaacctcttatagcaacccatgcagacctactgcttaattctgcaagccagcattctccagacagcttgaagaattctttaaagatgctttcagaaaaaacagagctttttgtacatgccttcaaggatcaacttgtcaggagtgctcttttagcactctacactgcaaggccaggaggcattcttaagaagccaccctctcctaagagcagcacagaggagagcagtccccaagaccaacccccagtgatgagagggcaggactccataccacatcattcagactatgatgaggaagagtgggacagggtgtgggccaatgtggggaagagcctgaactgcattattgctatggtggacaaactgattgaaagagatggtggcagtgaaggcagtggcggcaacaatgatggagaaaaggaaccttcattaacagatgccattccctctcacccaagagaggactggtatgaacagttgtatcccctcatccttaccctgaaggactgcatgggagaagtggtgaaccgagccaagcagtccctgacatttgtgctccttcaggaacttgcgtacagcttgccccagtgtctgatgctgacgctaagaagagacatcgtcttcagccaagcacttgctggattggtttgtggttttatcatcaaattacagacaagtctgtatgacccaggcttcctacagcagcttcacacagtggggttgatagtacaatatgaaggactgctaagtacatacagcgatgaaattggaatgctagaggacatggccgttggcatttccgatttaaagaaagttgcatttaaaataattgaagccaaatccaatgatgtgttgccagttataacaggaagacgagaacattacgtggtagaggtcaagcttccagccagaatgtttgagtcactacctctacagattaaagaaggacagttgcttcatgtgtatccagtactttttaatgttggaatcaatgaacagcaaactctggctgaaaggtttggagatgtctctttgcaagaaagtattaatcaggaaaacttcgaacttctacaagaatattacaagatatttatggaaaagatgcctcctgattatatttcacattttcaggaacaaaatgatttaaaagcattgctagaaaatctccttcaaaatatccaatccaaaaaaagaaagaatgtagaaattatgtggctggctgcaacgatttgccgcaaactgaatggtattcgtttcacctgttgtaaaagtgccaaagacaggacatcgatgtcagtgacacttgaacaatgctcaatcttgagagatgagcaccagttacacaaggacttctttatccgagcgctggattgcatgagaagagaaggatgccgcatagagaatgtactgaagaatatcaaatgcagaaagtatgctttcaacatgctacagctgatggctttccccaagtactacagacctccagaggggacttatggaaaagctgacacctaagtttaccaacatgttaataaacaggaacacaaatacatttcagttggataatcttc

SEQ ID NO: 4817 - protein, 924 aa, Homo sapiens; identical to SEQ ID NO: 551

SEQ ID NO: 4818 - DNA, 3168 bp, Homo sapiens
gacctgaggaagaccacatgagggctgatggggaagaggcatttgaaggctttacaggaggcatagtactggaaatctgctcctgatgaggtctcagaaagcttccactcgtggtggaaggcaaaggaggagcaggcacatcacatgagccttgaaaccagcgaaacaataatcaaagagcagttctgtcaaagaaaacaacataaatcaggtacagaatttcagagtgggatatcagatctttagtgtgaagatacatctacattaaaccaggaatcactagaactgacatttggacaagaaaatttggaaaattttaaaactgtgaaggttgatcatggaaattaaagaggaaggggcatcagaagaagggcagcactttcttcctacagcccaggccaatgatcccggggactgtcagttcacaagtatccagaagactccaaatgaaccgcagttggaattcatccttgcatgcaaggatctcgtggctcctgtccgtgatcgtaaactgaatacactggtgcagatctccgtaatccaccccgtggagcagagtctgacaagatactccagcaccgaaattgtggagggaacaagggacccactgtttttgactggtgtcacattcccatctgagtatcccatctatgaggagaccaaaataaaactaacagtctatgatgtcaaggataagtctcatgacaccgttcgaaccagtgtcctaccagaacataaggatcccccgccagaagttgggcgaagtttcttgggctatgccagttttaaagtgggagagctgctgaagtcaaaggagcaattgctggtcctgagcctgagaacttcagatggtggcaaagtggttggcaccatagaagtcagtgtcgtgaagatgggggagattgaggatggggaagccgaccacatcaccacagatgtacagggacaaaagtgtgccctggtatgtgaatgtacagccccggaaagtgtgagcggaaaagataacttaccttttttgaattcagtgttaaagaacccagtatgtaaattatatagatttcccacatctgacaataagtggatgcgaattcgagagcagatgtcagagagcattctttcctttcatattcctaaggaattgatttcccttcacattaaagaagatttgtgcagaaaccaggagataaaagaacttggtgagctttctccacattgggacaatctgcgaaaaaatgtccttactcactgtgatcaaatggtgaatatgtaccaagacattctgacagaacttagcaaggaaacagggtcctctttcaaatcaagcagcagcaaaggagagaaaacattagaatttgttccaataaatctacatctgcaaagaatgcaggtacacagccctcacttgaaagatgctctctacgatgtcatcactgtgggagccccagctgcccattttcagggatttaagaatggtggtcttcggaagctactccatagatttgaaacagaaagaagaaataccggataccagtttatttactattcacctgaaaacacagccaaagcaaaggaagttctcagcaacatcaatcaactacaacctcttatagcaacccatgcagacctactgcttaattctgcaagccagcattctccagacagcttgaagaattctttaaagatgctttcagaaaaaacagagctttttgtacatgccttcaaggatcaacttgtcaggagtgctcttttagcactctacactgcaaggccaggaggcattcttaagaagccaccctctcctaagagcagcacagaggagagcagtccccaagaccaacccccagtgatgagagggcaggactccataccacatcattcagactatgatgaggaagagtgggacagggtgtgggccaatgtggggaagagcctgaactgcattattgctatggtggacaaactgattgaaagagatggtggcagtgaaggcagtggcggcaacaatgatggagaaaaggaaccttcattaacagatgccattccctctcacccaagagaggactggtatgaacagttgtatcccctcatccttaccctgaaggactgcatgggagaagtggtgaaccgagccaagcagtccctgacatttgtgctccttcaggaacttgcgtacagcttgccccagtgtctgatgctgacgctaagaagagacatcgtcttcagccaagcacttgctggattggtttgtggttttatcatcaaattacagacaagtctgtatgacccaggcttcctacagcagcttcacacagtggggttgatagtacaatatgaaggactgctaagtacatacagcgatgaaattggaatgctagaggacatggccgttggcatttccgatttaaagaaagttgcatttaaaataattgaagccaaatccaatgatgtgttgccagttataacaggaagacgagaacattacgtggtagaggtcaagcttccagccagaatgtttgagtcactacctctacagattaaagaaggacagttgcttcatgtgtatccagtactttttaatgttggaatcaatgaacagcaaactctggctgaaaggtttggagatgtctctttgcaagaaagtattaatcaggaaaacttcgaacttctacaagaatattacaagatatttatggaaaagatgcctcctgattatatttcacattttcaggaacaaaatgatttaaaagcattgctagaaaatctccttcaaaatatccaatccaaaaaaagaaagaatgtagaaattatgtggctggctgcaacgatttgccgcaaactgaatggtattcgtttcacctgttgtaaaagtgccaaagacaggacatcgatgtcagtgacacttgaacaatgctcaatcttgagagatgagcaccagttacacaaggacttctttatccgagcgctggattgcatgagaagagaaggatgccgcatagagaatgtactgaagaatatcaaatgcagaaagtatgctttcaacatgctacagctgatggctttccccaagtactacagacctccagaggggacttatggaaaagctgacacctaagtttaccaacatgttaataaacaggaacacaaatacatttcagttggataatcttc

SEQ ID NO: 4819 - protein, 924 aa, Homo sapiens; identical to SEQ ID NO: 551

SEQ ID NO: 4820 - DNA, 3097 bp, Homo sapiens
aaagaaaggataaattaaagtcgagatggacctgaggaagaccacatgagggctgatggggaagaggcatttgaagagccttgaaaccagcgaaacaataatcaaagagcagttctgtcaaagaaaacaacataaatcaggtacagaatttcagagtgggatatcagatctttagtgtgaagatacatctacattaaaccaggaatcactagaactgacatttggacaagaaaatttggaaaattttaaaactgtgaaggttgatcatggaaattaaagaggaaggggcatcagaagaagggcagcactttcttcctacagcccaggccaatgatcccggggactgtcagttcacaagtatccagaagactccaaatgaaccgcagttggaattcatccttgcatgcaaggatctcgtggctcctgtccgtgatcgtaaactgaatacactggtgcagatctccgtaatccaccccgtggagcagagtctgacaagatactccagcaccgaaattgtggagggaacaagggacccactgtttttgactggtgtcacattcccatctgagtatcccatctatgaggagaccaaaataaaactaacagtctatgatgtcaaggataagtctcatgacaccgttcgaaccagtgtcctaccagaacataaggatcccccgccagaagttgggcgaagtttcttgggctatgccagttttaaagtgggagagctgctgaagtcaaaggagcaattgctggtcctgagcctgagaacttcagatggtggcaaagtggttggcaccatagaagtcagtgtcgtgaagatgggggagattgaggatggggaagccgaccacatcaccacagatgtacagggacaaaagtgtgccctggtatgtgaatgtacagccccggaaagtgtgagcggaaaagataacttaccttttttgaattcagtgttaaagaacccagtatgtaaattatatagatttcccacatctgacaataagtggatgcgaattcgagagcagatgtcagagagcattctttcctttcatattcctaaggaattgatttcccttcacattaaagaagatttgtgcagaaaccaggagataaaagaacttggtgagctttctccacattgggacaatctgcgaaaaaatgtccttactcactgtgatcaaatggtgaatatgtaccaagacattctgacagaacttagcaaggaaacagggtcctctttcaaatcaagcagcagcaaaggagagaaaacattagaatttgttccaataaatctacatctgcaaagaatgcaggtacacagccctcacttgaaagatgctctctacgatgtcatcactgtgggagccccagctgcccattttcagggatttaagaatggtggtcttcggaagctactccatagatttgaaacagaaagaagaaataccggataccagtttatttactattcacctgaaaacacagccaaagcaaaggaagttctcagcaacatcaatcaactacaacctcttatagcaacccatgcagacctactgcttaattctgcaagccagcattctccagacagcttgaagaattctttaaagatgctttcagaaaaaacagagctttttgtacatgccttcaaggatcaacttgtcaggagtgctcttttagcactctacactgcaaggccaggaggcattcttaagaagccaccctctcctaagagcagcacagaggagagcagtccccaagaccaacccccagtgatgagagggcaggactccataccacatcattcagactatgatgaggaagagtgggacagggtgtgggccaatgtggggaagagcctgaactgcattattgctatggtggacaaactgattgaaagagatggtggcagtgaaggcagtggcggcaacaatgatggagaaaaggaaccttcattaacagatgccattccctctcacccaagagaggactggtatgaacagttgtatcccctcatccttaccctgaaggactgcatgggagaagtggtgaaccgagccaagcagtccctgacatttgtgctccttcaggaacttgcgtacagcttgccccagtgtctgatgctgacgctaagaagagacatcgtcttcagccaagcacttgctggattggtttgtggttttatcatcaaattacagacaagtctgtatgacccaggcttcctacagcagcttcacacagtggggttgatagtacaatatgaaggactgctaagtacatacagcgatgaaattggaatgctagaggacatggccgttggcatttccgatttaaagaaagttgcatttaaaataattgaagccaaatccaatgatgtgttgccagttataacaggaagacgagaacattacgtggtagaggtcaagcttccagccagaatgtttgagtcactacctctacagattaaagaaggacagttgcttcatgtgtatccagtactttttaatgttggaatcaatgaacagcaaactctggctgaaaggtttggagatgtctctttgcaagaaagtattaatcaggaaaacttcgaacttctacaagaatattacaagatatttatggaaaagatgcctcctgattatatttcacattttcaggaacaaaatgatttaaaagcattgctagaaaatctccttcaaaatatccaatccaaaaaaagaaagaatgtagaaattatgtggctggctgcaacgatttgccgcaaactgaatggtattcgtttcacctgttgtaaaagtgccaaagacaggacatcgatgtcagtgacacttgaacaatgctcaatcttgagagatgagcaccagttacacaaggacttctttatccgagcgctggattgcatgagaagagaaggatgccgcatagagaatgtactgaagaatatcaaatgcagaaagtatgctttcaacatgctacagctgatggctttccccaagtactacagacctccagaggggacttatggaaaagctgacacctaagtttaccaacatgttaataaacaggaacacaaatacatttcagttggataatcttc

SEQ ID NO: 4821 - protein, 924 aa, Homo sapiens; identical to SEQ ID NO: 551

SEQ ID NO: 4822 - DNA, 3234 bp, Homo sapiens
ggatgtttcctgccctcgaacatcagaatccatgtttttcagcttttgggctcttggacttacaccagtggtttgccagggccccccagccttcgaccacagattgaaggctacactgttggcctccctacttttgaggttttggaacttggactggcttccttgctcctcagtttgcagacagcctattgtggaacttcaccttgtgatcgtagccttgaaaccagcgaaacaataatcaaagagcagttctgtcaaagaaaacaacataaatcaggtacagaatttcagagtgggatatcagatctttagtgtgaagatacatctacattaaaccaggaatcactagaactgacatttggacaagaaaatttggaaaattttaaaactgtgaaggttgatcatggaaattaaagaggaaggggcatcagaagaagggcagcactttcttcctacagcccaggccaatgatcccggggactgtcagttcacaagtatccagaagactccaaatgaaccgcagttggaattcatccttgcatgcaaggatctcgtggctcctgtccgtgatcgtaaactgaatacactggtgcagatctccgtaatccaccccgtggagcagagtctgacaagatactccagcaccgaaattgtggagggaacaagggacccactgtttttgactggtgtcacattcccatctgagtatcccatctatgaggagaccaaaataaaactaacagtctatgatgtcaaggataagtctcatgacaccgttcgaaccagtgtcctaccagaacataaggatcccccgccagaagttgggcgaagtttcttgggctatgccagttttaaagtgggagagctgctgaagtcaaaggagcaattgctggtcctgagcctgagaacttcagatggtggcaaagtggttggcaccatagaagtcagtgtcgtgaagatgggggagattgaggatggggaagccgaccacatcaccacagatgtacagggacaaaagtgtgccctggtatgtgaatgtacagccccggaaagtgtgagcggaaaagataacttaccttttttgaattcagtgttaaagaacccagtatgtaaattatatagatttcccacatctgacaataagtggatgcgaattcgagagcagatgtcagagagcattctttcctttcatattcctaaggaattgatttcccttcacattaaagaagatttgtgcagaaaccaggagataaaagaacttggtgagctttctccacattgggacaatctgcgaaaaaatgtccttactcactgtgatcaaatggtgaatatgtaccaagacattctgacagaacttagcaaggaaacagggtcctctttcaaatcaagcagcagcaaaggagagaaaacattagaatttgttccaataaatctacatctgcaaagaatgcaggtacacagccctcacttgaaagatgctctctacgatgtcatcactgtgggagccccagctgcccattttcagggatttaagaatggtggtcttcggaagctactccatagatttgaaacagaaagaagaaataccggataccagtttatttactattcacctgaaaacacagccaaagcaaaggaagttctcagcaacatcaatcaactacaacctcttatagcaacccatgcagacctactgcttaattctgcaagccagcattctccagacagcttgaagaattctttaaagatgctttcagaaaaaacagagctttttgtacatgccttcaaggatcaacttgtcaggagtgctcttttagcactctacactgcaaggccaggaggcattcttaagaagccaccctctcctaagagcagcacagaggagagcagtccccaagaccaacccccagtgatgagagggcaggactccataccacatcattcagactatgatgaggaagagtgggacagggtgtgggccaatgtggggaagagcctgaactgcattattgctatggtggacaaactgattgaaagagatggtggcagtgaaggcagtggcggcaacaatgatggagaaaaggaaccttcattaacagatgccattccctctcacccaagagaggactggtatgaacagttgtatcccctcatccttaccctgaaggactgcatgggagaagtggtgaaccgagccaagcagtccctgacatttgtgctccttcaggaacttgcgtacagcttgccccagtgtctgatgctgacgctaagaagagacatcgtcttcagccaagcacttgctggattggtttgtggttttatcatcaaattacagacaagtctgtatgacccaggcttcctacagcagcttcacacagtggggttgatagtacaatatgaaggactgctaagtacatacagcgatgaaattggaatgctagaggacatggccgttggcatttccgatttaaagaaagttgcatttaaaataattgaagccaaatccaatgatgtgttgccagttataacaggaagacgagaacattacgtggtagaggtcaagcttccagccagaatgtttgagtcactacctctacagattaaagaaggacagttgcttcatgtgtatccagtactttttaatgttggaatcaatgaacagcaaactctggctgaaaggtttggagatgtctctttgcaagaaagtattaatcaggaaaacttcgaacttctacaagaatattacaagatatttatggaaaagatgcctcctgattatatttcacattttcaggaacaaaatgatttaaaagcattgctagaaaatctccttcaaaatatccaatccaaaaaaagaaagaatgtagaaattatgtggctggctgcaacgatttgccgcaaactgaatggtattcgtttcacctgttgtaaaagtgccaaagacaggacatcgatgtcagtgacacttgaacaatgctcaatcttgagagatgagcaccagttacacaaggacttctttatccgagcgctggattgcatgagaagagaaggatgccgcatagagaatgtactgaagaatatcaaatgcagaaagtatgctttcaacatgctacagctgatggctttccccaagtactacagacctccagaggggacttatggaaaagctgacacctaagtttaccaacatgttaataaacaggaacacaaatacatttcagttggataatcttc

SEQ ID NO: 4823 - protein, 924 aa, Homo sapiens; identical to SEQ ID NO: 551

SEQ ID NO: 4824 - DNA, 3264 bp, Homo sapiens
acacgctcgcaagcgaacgcaggaaagtcaggctaaaagtgtctgctgctgctgccgccccccactccgcctccgggagagaatacaaagaaatggtgttacctggcaagaggtcttctgtcttttatgaaaaattagacaaaggctttacaggaggcatagtactggaaatctgctcctgatgaggtctcagaaagcttccactcgtggtggaaggcaaaggaggagcaggcacatcacatgagccttgaaaccagcgaaacaataatcaaagagcagttctgtcaaagaaaacaacataaatcaggtacagaatttcagagtgggatatcagatctttagtgtgaagatacatctacattaaaccaggaatcactagaactgacatttggacaagaaaatttggaaaattttaaaactgtgaaggttgatcatggaaattaaagaggaaggggcatcagaagaagggcagcactttcttcctacagcccaggccaatgatcccggggactgtcagttcacaagtatccagaagactccaaatgaaccgcagttggaattcatccttgcatgcaaggatctcgtggctcctgtccgtgatcgtaaactgaatacactggtgcagatctccgtaatccaccccgtggagcagagtctgacaagatactccagcaccgaaattgtggagggaacaagggacccactgtttttgactggtgtcacattcccatctgagtatcccatctatgaggagaccaaaataaaactaacagtctatgatgtcaaggataagtctcatgacaccgttcgaaccagtgtcctaccagaacataaggatcccccgccagaagttgggcgaagtttcttgggctatgccagttttaaagtgggagagctgctgaagtcaaaggagcaattgctggtcctgagcctgagaacttcagatggtggcaaagtggttggcaccatagaagtcagtgtcgtgaagatgggggagattgaggatggggaagccgaccacatcaccacagatgtacagggacaaaagtgtgccctggtatgtgaatgtacagccccggaaagtgtgagcggaaaagataacttaccttttttgaattcagtgttaaagaacccagtatgtaaattatatagatttcccacatctgacaataagtggatgcgaattcgagagcagatgtcagagagcattctttcctttcatattcctaaggaattgatttcccttcacattaaagaagatttgtgcagaaaccaggagataaaagaacttggtgagctttctccacattgggacaatctgcgaaaaaatgtccttactcactgtgatcaaatggtgaatatgtaccaagacattctgacagaacttagcaaggaaacagggtcctctttcaaatcaagcagcagcaaaggagagaaaacattagaatttgttccaataaatctacatctgcaaagaatgcaggtacacagccctcacttgaaagatgctctctacgatgtcatcactgtgggagccccagctgcccattttcagggatttaagaatggtggtcttcggaagctactccatagatttgaaacagaaagaagaaataccggataccagtttatttactattcacctgaaaacacagccaaagcaaaggaagttctcagcaacatcaatcaactacaacctcttatagcaacccatgcagacctactgcttaattctgcaagccagcattctccagacagcttgaagaattctttaaagatgctttcagaaaaaacagagctttttgtacatgccttcaaggatcaacttgtcaggagtgctcttttagcactctacactgcaaggccaggaggcattcttaagaagccaccctctcctaagagcagcacagaggagagcagtccccaagaccaacccccagtgatgagagggcaggactccataccacatcattcagactatgatgaggaagagtgggacagggtgtgggccaatgtggggaagagcctgaactgcattattgctatggtggacaaactgattgaaagagatggtggcagtgaaggcagtggcggcaacaatgatggagaaaaggaaccttcattaacagatgccattccctctcacccaagagaggactggtatgaacagttgtatcccctcatccttaccctgaaggactgcatgggagaagtggtgaaccgagccaagcagtccctgacatttgtgctccttcaggaacttgcgtacagcttgccccagtgtctgatgctgacgctaagaagagacatcgtcttcagccaagcacttgctggattggtttgtggttttatcatcaaattacagacaagtctgtatgacccaggcttcctacagcagcttcacacagtggggttgatagtacaatatgaaggactgctaagtacatacagcgatgaaattggaatgctagaggacatggccgttggcatttccgatttaaagaaagttgcatttaaaataattgaagccaaatccaatgatgtgttgccagttataacaggaagacgagaacattacgtggtagaggtcaagcttccagccagaatgtttgagtcactacctctacagattaaagaaggacagttgcttcatgtgtatccagtactttttaatgttggaatcaatgaacagcaaactctggctgaaaggtttggagatgtctctttgcaagaaagtattaatcaggaaaacttcgaacttctacaagaatattacaagatatttatggaaaagatgcctcctgattatatttcacattttcaggaacaaaatgatttaaaagcattgctagaaaatctccttcaaaatatccaatccaaaaaaagaaagaatgtagaaattatgtggctggctgcaacgatttgccgcaaactgaatggtattcgtttcacctgttgtaaaagtgccaaagacaggacatcgatgtcagtgacacttgaacaatgctcaatcttgagagatgagcaccagttacacaaggacttctttatccgagcgctggattgcatgagaagagaaggatgccgcatagagaatgtactgaagaatatcaaatgcagaaagtatgctttcaacatgctacagctgatggctttccccaagtactacagacctccagaggggacttatggaaaagctgacacctaagtttaccaacatgttaataaacaggaacacaaatacatttcagttggataatcttc

SEQ ID NO: 4825 - protein, 924 aa, Homo sapiens; identical to SEQ ID NO: 551

SEQ ID NO: 4826 - DNA, 3297 bp, Homo sapiens
gcgcacacgctcacacgctcgcaagcgaacgcaggaaagtcaggctaaaagtgtctgctgctgctgccgccccccactccgcctccgggagagaatacaaagaaatggtgttacctggcaagaggtcttctgtcttttatgaaaaattagacaaagggggcgctgttttggggaaatggcagaactccctcagaggctgatctaagggttcccggcagaaggggccatcttcagaggctctggttgcatgactgtttggagtttgatggcctgaagagccttgaaaccagcgaaacaataatcaaagagcagttctgtcaaagaaaacaacataaatcaggtacagaatttcagagtgggatatcagatctttagtgtgaagatacatctacattaaaccaggaatcactagaactgacatttggacaagaaaatttggaaaattttaaaactgtgaaggttgatcatggaaattaaagaggaaggggcatcagaagaagggcagcactttcttcctacagcccaggccaatgatcccggggactgtcagttcacaagtatccagaagactccaaatgaaccgcagttggaattcatccttgcatgcaaggatctcgtggctcctgtccgtgatcgtaaactgaatacactggtgcagatctccgtaatccaccccgtggagcagagtctgacaagatactccagcaccgaaattgtggagggaacaagggacccactgtttttgactggtgtcacattcccatctgagtatcccatctatgaggagaccaaaataaaactaacagtctatgatgtcaaggataagtctcatgacaccgttcgaaccagtgtcctaccagaacataaggatcccccgccagaagttgggcgaagtttcttgggctatgccagttttaaagtgggagagctgctgaagtcaaaggagcaattgctggtcctgagcctgagaacttcagatggtggcaaagtggttggcaccatagaagtcagtgtcgtgaagatgggggagattgaggatggggaagccgaccacatcaccacagatgtacagggacaaaagtgtgccctggtatgtgaatgtacagccccggaaagtgtgagcggaaaagataacttaccttttttgaattcagtgttaaagaacccagtatgtaaattatatagatttcccacatctgacaataagtggatgcgaattcgagagcagatgtcagagagcattctttcctttcatattcctaaggaattgatttcccttcacattaaagaagatttgtgcagaaaccaggagataaaagaacttggtgagctttctccacattgggacaatctgcgaaaaaatgtccttactcactgtgatcaaatggtgaatatgtaccaagacattctgacagaacttagcaaggaaacagggtcctctttcaaatcaagcagcagcaaaggagagaaaacattagaatttgttccaataaatctacatctgcaaagaatgcaggtacacagccctcacttgaaagatgctctctacgatgtcatcactgtgggagccccagctgcccattttcagggatttaagaatggtggtcttcggaagctactccatagatttgaaacagaaagaagaaataccggataccagtttatttactattcacctgaaaacacagccaaagcaaaggaagttctcagcaacatcaatcaactacaacctcttatagcaacccatgcagacctactgcttaattctgcaagccagcattctccagacagcttgaagaattctttaaagatgctttcagaaaaaacagagctttttgtacatgccttcaaggatcaacttgtcaggagtgctcttttagcactctacactgcaaggccaggaggcattcttaagaagccaccctctcctaagagcagcacagaggagagcagtccccaagaccaacccccagtgatgagagggcaggactccataccacatcattcagactatgatgaggaagagtgggacagggtgtgggccaatgtggggaagagcctgaactgcattattgctatggtggacaaactgattgaaagagatggtggcagtgaaggcagtggcggcaacaatgatggagaaaaggaaccttcattaacagatgccattccctctcacccaagagaggactggtatgaacagttgtatcccctcatccttaccctgaaggactgcatgggagaagtggtgaaccgagccaagcagtccctgacatttgtgctccttcaggaacttgcgtacagcttgccccagtgtctgatgctgacgctaagaagagacatcgtcttcagccaagcacttgctggattggtttgtggttttatcatcaaattacagacaagtctgtatgacccaggcttcctacagcagcttcacacagtggggttgatagtacaatatgaaggactgctaagtacatacagcgatgaaattggaatgctagaggacatggccgttggcatttccgatttaaagaaagttgcatttaaaataattgaagccaaatccaatgatgtgttgccagttataacaggaagacgagaacattacgtggtagaggtcaagcttccagccagaatgtttgagtcactacctctacagattaaagaaggacagttgcttcatgtgtatccagtactttttaatgttggaatcaatgaacagcaaactctggctgaaaggtttggagatgtctctttgcaagaaagtattaatcaggaaaacttcgaacttctacaagaatattacaagatatttatggaaaagatgcctcctgattatatttcacattttcaggaacaaaatgatttaaaagcattgctagaaaatctccttcaaaatatccaatccaaaaaaagaaagaatgtagaaattatgtggctggctgcaacgatttgccgcaaactgaatggtattcgtttcacctgttgtaaaagtgccaaagacaggacatcgatgtcagtgacacttgaacaatgctcaatcttgagagatgagcaccagttacacaaggacttctttatccgagcgctggattgcatgagaagagaaggatgccgcatagagaatgtactgaagaatatcaaatgcagaaagtatgctttcaacatgctacagctgatggctttccccaagtactacagacctccagaggggacttatggaaaagctgacacctaagtttaccaacatgttaataaacaggaacacaaatacatttcagttggataatcttc

SEQ ID NO: 4827 - protein, 924 aa, Homo sapiens; identical to SEQ ID NO: 551

SEQ ID NO: 4828 - DNA, 3130 bp, Homo sapiens
acagctcctcctgggcgcgcacacgctcacacgctcgcaagcgaacgcaggaaagtcaggctaaaagtgtctgctgctgctgccgccccccactccgcctccgggagagagccttgaaaccagcgaaacaataatcaaagagcagttctgtcaaagaaaacaacataaatcaggtacagaatttcagagtgggatatcagatctttagtgtgaagatacatctacattaaaccaggaatcactagaactgacatttggacaagaaaatttggaaaattttaaaactgtgaaggttgatcatggaaattaaagaggaaggggcatcagaagaagggcagcactttcttcctacagcccaggccaatgatcccggggactgtcagttcacaagtatccagaagactccaaatgaaccgcagttggaattcatccttgcatgcaaggatctcgtggctcctgtccgtgatcgtaaactgaatacactggtgcagatctccgtaatccaccccgtggagcagagtctgacaagatactccagcaccgaaattgtggagggaacaagggacccactgtttttgactggtgtcacattcccatctgagtatcccatctatgaggagaccaaaataaaactaacagtctatgatgtcaaggataagtctcatgacaccgttcgaaccagtgtcctaccagaacataaggatcccccgccagaagttgggcgaagtttcttgggctatgccagttttaaagtgggagagctgctgaagtcaaaggagcaattgctggtcctgagcctgagaacttcagatggtggcaaagtggttggcaccatagaagtcagtgtcgtgaagatgggggagattgaggatggggaagccgaccacatcaccacagatgtacagggacaaaagtgtgccctggtatgtgaatgtacagccccggaaagtgtgagcggaaaagataacttaccttttttgaattcagtgttaaagaacccagtatgtaaattatatagatttcccacatctgacaataagtggatgcgaattcgagagcagatgtcagagagcattctttcctttcatattcctaaggaattgatttcccttcacattaaagaagatttgtgcagaaaccaggagataaaagaacttggtgagctttctccacattgggacaatctgcgaaaaaatgtccttactcactgtgatcaaatggtgaatatgtaccaagacattctgacagaacttagcaaggaaacagggtcctctttcaaatcaagcagcagcaaaggagagaaaacattagaatttgttccaataaatctacatctgcaaagaatgcaggtacacagccctcacttgaaagatgctctctacgatgtcatcactgtgggagccccagctgcccattttcagggatttaagaatggtggtcttcggaagctactccatagatttgaaacagaaagaagaaataccggataccagtttatttactattcacctgaaaacacagccaaagcaaaggaagttctcagcaacatcaatcaactacaacctcttatagcaacccatgcagacctactgcttaattctgcaagccagcattctccagacagcttgaagaattctttaaagatgctttcagaaaaaacagagctttttgtacatgccttcaaggatcaacttgtcaggagtgctcttttagcactctacactgcaaggccaggaggcattcttaagaagccaccctctcctaagagcagcacagaggagagcagtccccaagaccaacccccagtgatgagagggcaggactccataccacatcattcagactatgatgaggaagagtgggacagggtgtgggccaatgtggggaagagcctgaactgcattattgctatggtggacaaactgattgaaagagatggtggcagtgaaggcagtggcggcaacaatgatggagaaaaggaaccttcattaacagatgccattccctctcacccaagagaggactggtatgaacagttgtatcccctcatccttaccctgaaggactgcatgggagaagtggtgaaccgagccaagcagtccctgacatttgtgctccttcaggaacttgcgtacagcttgccccagtgtctgatgctgacgctaagaagagacatcgtcttcagccaagcacttgctggattggtttgtggttttatcatcaaattacagacaagtctgtatgacccaggcttcctacagcagcttcacacagtggggttgatagtacaatatgaaggactgctaagtacatacagcgatgaaattggaatgctagaggacatggccgttggcatttccgatttaaagaaagttgcatttaaaataattgaagccaaatccaatgatgtgttgccagttataacaggaagacgagaacattacgtggtagaggtcaagcttccagccagaatgtttgagtcactacctctacagattaaagaaggacagttgcttcatgtgtatccagtactttttaatgttggaatcaatgaacagcaaactctggctgaaaggtttggagatgtctctttgcaagaaagtattaatcaggaaaacttcgaacttctacaagaatattacaagatatttatggaaaagatgcctcctgattatatttcacattttcaggaacaaaatgatttaaaagcattgctagaaaatctccttcaaaatatccaatccaaaaaaagaaagaatgtagaaattatgtggctggctgcaacgatttgccgcaaactgaatggtattcgtttcacctgttgtaaaagtgccaaagacaggacatcgatgtcagtgacacttgaacaatgctcaatcttgagagatgagcaccagttacacaaggacttctttatccgagcgctggattgcatgagaagagaaggatgccgcatagagaatgtactgaagaatatcaaatgcagaaagtatgctttcaacatgctacagctgatggctttccccaagtactacagacctccagaggggacttatggaaaagctgacacctaagtttaccaacatgttaataaacaggaacacaaatacatttcagttggataatcttc

SEQ ID NO: 4829 - protein, 924 aa, Homo sapiens; identical to SEQ ID NO: 551

SEQ ID NO: 4830 - DNA, 3411 bp, Homo sapiens
agccggagagccagccgcgctggtgacaacttctctggggcgcgcgcggggctggtaggcgaggagcgagcagggagcgcggccgaagccagaggctgggggagctgctggagcctcgcgaagccgcggccggcgccctgcgccgtcgccgccgcctgctagtttcctccgggttctcagccccgggtactgaggcttcggtctataaatagcaggttacagctcctcctgggcgcgcacacgctcacacgctcgcaagcgaacgcaggaaagtcaggctaaaagtgtctgctgctgctgccgccccccactccgcctccgggagagaatacaaagaaatggtgttacctggcaagaggtcttctgtcttttatgaaaaattagacaaagagccttgaaaccagcgaaacaataatcaaagagcagttctgtcaaagaaaacaacataaatcaggtacagaatttcagagtgggatatcagatctttagtgtgaagatacatctacattaaaccaggaatcactagaactgacatttggacaagaaaatttggaaaattttaaaactgtgaaggttgatcatggaaattaaagaggaaggggcatcagaagaagggcagcactttcttcctacagcccaggccaatgatcccggggactgtcagttcacaagtatccagaagactccaaatgaaccgcagttggaattcatccttgcatgcaaggatctcgtggctcctgtccgtgatcgtaaactgaatacactggtgcagatctccgtaatccaccccgtggagcagagtctgacaagatactccagcaccgaaattgtggagggaacaagggacccactgtttttgactggtgtcacattcccatctgagtatcccatctatgaggagaccaaaataaaactaacagtctatgatgtcaaggataagtctcatgacaccgttcgaaccagtgtcctaccagaacataaggatcccccgccagaagttgggcgaagtttcttgggctatgccagttttaaagtgggagagctgctgaagtcaaaggagcaattgctggtcctgagcctgagaacttcagatggtggcaaagtggttggcaccatagaagtcagtgtcgtgaagatgggggagattgaggatggggaagccgaccacatcaccacagatgtacagggacaaaagtgtgccctggtatgtgaatgtacagccccggaaagtgtgagcggaaaagataacttaccttttttgaattcagtgttaaagaacccagtatgtaaattatatagatttcccacatctgacaataagtggatgcgaattcgagagcagatgtcagagagcattctttcctttcatattcctaaggaattgatttcccttcacattaaagaagatttgtgcagaaaccaggagataaaagaacttggtgagctttctccacattgggacaatctgcgaaaaaatgtccttactcactgtgatcaaatggtgaatatgtaccaagacattctgacagaacttagcaaggaaacagggtcctctttcaaatcaagcagcagcaaaggagagaaaacattagaatttgttccaataaatctacatctgcaaagaatgcaggtacacagccctcacttgaaagatgctctctacgatgtcatcactgtgggagccccagctgcccattttcagggatttaagaatggtggtcttcggaagctactccatagatttgaaacagaaagaagaaataccggataccagtttatttactattcacctgaaaacacagccaaagcaaaggaagttctcagcaacatcaatcaactacaacctcttatagcaacccatgcagacctactgcttaattctgcaagccagcattctccagacagcttgaagaattctttaaagatgctttcagaaaaaacagagctttttgtacatgccttcaaggatcaacttgtcaggagtgctcttttagcactctacactgcaaggccaggaggcattcttaagaagccaccctctcctaagagcagcacagaggagagcagtccccaagaccaacccccagtgatgagagggcaggactccataccacatcattcagactatgatgaggaagagtgggacagggtgtgggccaatgtggggaagagcctgaactgcattattgctatggtggacaaactgattgaaagagatggtggcagtgaaggcagtggcggcaacaatgatggagaaaaggaaccttcattaacagatgccattccctctcacccaagagaggactggtatgaacagttgtatcccctcatccttaccctgaaggactgcatgggagaagtggtgaaccgagccaagcagtccctgacatttgtgctccttcaggaacttgcgtacagcttgccccagtgtctgatgctgacgctaagaagagacatcgtcttcagccaagcacttgctggattggtttgtggttttatcatcaaattacagacaagtctgtatgacccaggcttcctacagcagcttcacacagtggggttgatagtacaatatgaaggactgctaagtacatacagcgatgaaattggaatgctagaggacatggccgttggcatttccgatttaaagaaagttgcatttaaaataattgaagccaaatccaatgatgtgttgccagttataacaggaagacgagaacattacgtggtagaggtcaagcttccagccagaatgtttgagtcactacctctacagattaaagaaggacagttgcttcatgtgtatccagtactttttaatgttggaatcaatgaacagcaaactctggctgaaaggtttggagatgtctctttgcaagaaagtattaatcaggaaaacttcgaacttctacaagaatattacaagatatttatggaaaagatgcctcctgattatatttcacattttcaggaacaaaatgatttaaaagcattgctagaaaatctccttcaaaatatccaatccaaaaaaagaaagaatgtagaaattatgtggctggctgcaacgatttgccgcaaactgaatggtattcgtttcacctgttgtaaaagtgccaaagacaggacatcgatgtcagtgacacttgaacaatgctcaatcttgagagatgagcaccagttacacaaggacttctttatccgagcgctggattgcatgagaagagaaggatgccgcatagagaatgtactgaagaatatcaaatgcagaaagtatgctttcaacatgctacagctgatggctttccccaagtactacagacctccagaggggacttatggaaaagctgacacctaagtttaccaacatgttaataaacaggaacacaaatacatttcagttggataatcttc

SEQ ID NO: 4831 - protein, 924 aa, Homo sapiens; identical to SEQ ID NO: 551

SEQ ID NO: 4832 - DNA, 3142 bp, Homo sapiens
aaagcgcagatggggagagtcatttgccccacaccctacacagcccggaataaccaggaatacaaagaaatggtgttacctggcaagaggtcttctgtcttttatgaaaaattagacaaagagccttgaaaccagcgaaacaataatcaaagagcagttctgtcaaagaaaacaacataaatcaggtacagaatttcagagtgggatatcagatctttagtgtgaagatacatctacattaaaccaggaatcactagaactgacatttggacaagaaaatttggaaaattttaaaactgtgaaggttgatcatggaaattaaagaggaaggggcatcagaagaagggcagcactttcttcctacagcccaggccaatgatcccggggactgtcagttcacaagtatccagaagactccaaatgaaccgcagttggaattcatccttgcatgcaaggatctcgtggctcctgtccgtgatcgtaaactgaatacactggtgcagatctccgtaatccaccccgtggagcagagtctgacaagatactccagcaccgaaattgtggagggaacaagggacccactgtttttgactggtgtcacattcccatctgagtatcccatctatgaggagaccaaaataaaactaacagtctatgatgtcaaggataagtctcatgacaccgttcgaaccagtgtcctaccagaacataaggatcccccgccagaagttgggcgaagtttcttgggctatgccagttttaaagtgggagagctgctgaagtcaaaggagcaattgctggtcctgagcctgagaacttcagatggtggcaaagtggttggcaccatagaagtcagtgtcgtgaagatgggggagattgaggatggggaagccgaccacatcaccacagatgtacagggacaaaagtgtgccctggtatgtgaatgtacagccccggaaagtgtgagcggaaaagataacttaccttttttgaattcagtgttaaagaacccagtatgtaaattatatagatttcccacatctgacaataagtggatgcgaattcgagagcagatgtcagagagcattctttcctttcatattcctaaggaattgatttcccttcacattaaagaagatttgtgcagaaaccaggagataaaagaacttggtgagctttctccacattgggacaatctgcgaaaaaatgtccttactcactgtgatcaaatggtgaatatgtaccaagacattctgacagaacttagcaaggaaacagggtcctctttcaaatcaagcagcagcaaaggagagaaaacattagaatttgttccaataaatctacatctgcaaagaatgcaggtacacagccctcacttgaaagatgctctctacgatgtcatcactgtgggagccccagctgcccattttcagggatttaagaatggtggtcttcggaagctactccatagatttgaaacagaaagaagaaataccggataccagtttatttactattcacctgaaaacacagccaaagcaaaggaagttctcagcaacatcaatcaactacaacctcttatagcaacccatgcagacctactgcttaattctgcaagccagcattctccagacagcttgaagaattctttaaagatgctttcagaaaaaacagagctttttgtacatgccttcaaggatcaacttgtcaggagtgctcttttagcactctacactgcaaggccaggaggcattcttaagaagccaccctctcctaagagcagcacagaggagagcagtccccaagaccaacccccagtgatgagagggcaggactccataccacatcattcagactatgatgaggaagagtgggacagggtgtgggccaatgtggggaagagcctgaactgcattattgctatggtggacaaactgattgaaagagatggtggcagtgaaggcagtggcggcaacaatgatggagaaaaggaaccttcattaacagatgccattccctctcacccaagagaggactggtatgaacagttgtatcccctcatccttaccctgaaggactgcatgggagaagtggtgaaccgagccaagcagtccctgacatttgtgctccttcaggaacttgcgtacagcttgccccagtgtctgatgctgacgctaagaagagacatcgtcttcagccaagcacttgctggattggtttgtggttttatcatcaaattacagacaagtctgtatgacccaggcttcctacagcagcttcacacagtggggttgatagtacaatatgaaggactgctaagtacatacagcgatgaaattggaatgctagaggacatggccgttggcatttccgatttaaagaaagttgcatttaaaataattgaagccaaatccaatgatgtgttgccagttataacaggaagacgagaacattacgtggtagaggtcaagcttccagccagaatgtttgagtcactacctctacagattaaagaaggacagttgcttcatgtgtatccagtactttttaatgttggaatcaatgaacagcaaactctggctgaaaggtttggagatgtctctttgcaagaaagtattaatcaggaaaacttcgaacttctacaagaatattacaagatatttatggaaaagatgcctcctgattatatttcacattttcaggaacaaaatgatttaaaagcattgctagaaaatctccttcaaaatatccaatccaaaaaaagaaagaatgtagaaattatgtggctggctgcaacgatttgccgcaaactgaatggtattcgtttcacctgttgtaaaagtgccaaagacaggacatcgatgtcagtgacacttgaacaatgctcaatcttgagagatgagcaccagttacacaaggacttctttatccgagcgctggattgcatgagaagagaaggatgccgcatagagaatgtactgaagaatatcaaatgcagaaagtatgctttcaacatgctacagctgatggctttccccaagtactacagacctccagaggggacttatggaaaagctgacacctaagtttaccaacatgttaataaacaggaacacaaatacatttcagttggataatcttc

SEQ ID NO: 4833 - protein, 924 aa, Homo sapiens; identical to SEQ ID NO: 551

SEQ ID NO: 4834 - DNA, 2848 bp, Homo sapiens
ggatgtttcctgccctcgaacatcagaatccatgtttttcagcttttgggctcttggacttacaccagtggtttgccagggccccccagccttcgaccacagattgaaggctacactgttggcctccctacttttgaggttttggaacttggactggcttccttgctcctcagtttgcagacagcctattgtggaacttcaccttgtgatcgtagccttgaaaccagcgaaacaataatcaaagagcagttctgtcaaagaaaacaacataaatcaggtacagaatttcagagtgggatatcagatctttagtgtgaagatacatctacattaaaccaggaatcactagaactgacatttggacaagaaaatttggaaaattttaaaactgtgaaggttgatcatggaaattaaagaggaaggggcatcagaagaagggcagcactttcttcctacagcccaggccaatgatcccggggactgtcagttcacaagtatccagaagactccaaatgaaccgcagttggaattcatccttgcatgcaaggatctcgtggctcctgtccgtgatcgtaaactgaatacactggtgcagatctccgtaatccaccccgtggagcagagtctgacaagatactccagcaccgaaattgtggagggaacaagggacccactgtttttgactggtgtcacattcccatctgagtatcccatctatgaggagaccaaaataaaactaacagtctatgatgtcaaggataagtctcatgacaccgttcgaaccagtgtcctaccagaacataaggatcccccgccagaagttgggcgaagtttcttgggctatgccagttttaaagtgggagagctgctgaagtcaaaggagcaattgctggtcctgagcctgagaacttcagatggtggcaaagtggttggcaccatagaagtcagtgtcgtgaagatgggggagattgaggatggggaagccgaccacatcaccacagatgtacagggacaaaagtgtgccctggtatgtgaatgtacagccccggaaagtgtgagcggaaaagataacttaccttttttgaattcagtgttaaagaacccagtatgtaaattatatagatttcccacatctgacaataagtggatgcgaattcgagagcagatgtcagagagcattctttcctttcatattcctaaggaattgatttcccttcacattaaagaagatttgtgcagaaaccaggagataaaagaacttggtgagctttctccacattgggacaatctgcgaaaaaatgtccttactcactgtgatcaaatggtgaatatgtaccaagacattctgacagaacttagcaaggaaacagggtcctctttcaaatcaagcagcagcaaaggagagaaaacattagaatttgttccaataaatctacatctgcaaagaatgcaggtacacagccctcacttgaaagatgctctctacgatgtcatcactgtgggagccccagctgcccattttcagggatttaagaatggtggtcttcggaagctactccatagatttgaaacagaaagaagaaataccggataccagtttatttactattcacctgaaaacacagccaaagcaaaggaagttctcagcaacatcaatcaactacaacctcttatagcaacccatgcagacctactgcttaattctgcaagccagcattctccagacagcttgaagaattctttaaagatgctttcagaaaaaacagagctttttgtacatgccttcaaggatcaacttgtcaggagtgctcttttagcactctacactgcaaggccaggaggcattcttaagaagccaccctctcctaagagcagcacagaggagagcagtccccaagaccaacccccagtgatgagagggcaggactccataccacatcattcagactatgatgaggaagagtgggacagggtgtgggccaatgtggggaagagcctgaactgcattattgctatggtggacaaactgattgaaagagatggtggcagtgaaggcagtggcggcaacaatgatggagaaaaggaaccttcattaacagatgccattccctctcacccaagagaggactggtatgaacagttgtatcccctcatccttaccctgaaggactgcatgggagaagtggtgaaccgagccaagcagtccctgacatttgtgctccttcaggaacttgcgtacagcttgccccagtgtctgatgctgacgctaagaagagacatcgtcttcagccaagcacttgctggattggtttgtggttttatcatcaaattacagacaagtctgtatgacccaggcttcctacagcagcttcacacagtggggttgatagtacaatatgaaggactgctaagtacatacagcgatgaaattggaatgctagaggacatggccgttggcatttccgatttaaagaaagttgcatttaaaataattgaagccaaatccaatgatgtgttgccagttataacaggaagacgagaacattacgtggtagaggtcaagcttccagccagaatgtttgagtcactacctctacagattaaagaaggacagttgcttcatgtgtatccagtactttttaatgttggaatcaatgaacagcaaactctggctgaaaggtttggagatgtctctttgcaagaaagtattaatcaggaaaacttcgaacttctacaagaatattacaagatatttatggaaaagatgcctcctgattatatttcacattttcaggaacaaaatgatttaaaagcattgctagaaaatctccttcaaaatatccaatcc

SEQ ID NO: 4835 - protein, 814 aa, Homo sapiens
MEIKEEGASEEGQHFLPTAQANDPGDCQFTSIQKTPNEPQLEFILACKDLVAPVRDRKLNTLVQISVIHPVEQSLTRYSSTEIVEGTRDPLFLTGVTFPSEYPIYEETKIKLTVYDVKDKSHDTVRTSVLPEHKDPPPEVGRSFLGYASFKVGELLKSKEQLLVLSLRTSDGGKVVGTIEVSVVKMGEIEDGEADHITTDVQGQKCALVCECTAPESVSGKDNLPFLNSVLKNPVCKLYRFPTSDNKWMRIREQMSESILSFHIPKELISLHIKEDLCRNQEIKELGELSPHWDNLRKNVLTHCDQMVNMYQDILTELSKETGSSFKSSSSKGEKTLEFVPINLHLQRMQVHSPHLKDALYDVITVGAPAAHFQGFKNGGLRKLLHRFETERRNTGYQFIYYSPENTAKAKEVLSNINQLQPLIATHADLLLNSASQHSPDSLKNSLKMLSEKTELFVHAFKDQLVRSALLALYTARPGGILKKPPSPKSSTEESSPQDQPPVMRGQDSIPHHSDYDEEEWDRVWANVGKSLNCIIAMVDKLIERDGGSEGSGGNNDGEKEPSLTDAIPSHPREDWYEQLYPLILTLKDCMGEVVNRAKQSLTFVLLQELAYSLPQCLMLTLRRDIVFSQALAGLVCGFIIKLQTSLYDPGFLQQLHTVGLIVQYEGLLSTYSDEIGMLEDMAVGISDLKKVAFKIIEAKSNDVLPVITGRREHYVVEVKLPARMFESLPLQIKEGQLLHVYPVLFNVGINEQQTLAERFGDVSLQESINQENFELLQEYYKIFMEKMPPDYISHFQEQNDLKALLENLLQNIQ

SEQ ID NO: 4836 - DNA, 2520 bp, Homo sapiens
aaacgagtggagacacgaggaccagcgcgagcggtcccggtgggctaccctccccctgcgacgaccccccctcgctctgaccgactggtcccctaaacggtggcggcggtttttggtcgttgggccccgggatttaggaccaacatttgaagacccgaaggggaactgcaaccatgaatgaagaaaatatagatggaacaaatggatgcagtaaagttcgaactggtattcagaatgaagcagcattacttgctttgatggaaaagactggttacaacatggttcaggaaaatggacaaaggaaatttggcggtcctcctccaggttgggaaggtccacctccacctagaggctgtgaagtttttgtaggaaaaatacctcgtgatatgtatgaagatgagttagttcctgtatttgaaagagctgggaagatatatgaatttcgacttatgatggaatttagtggtgaaaatcgaggttatgcttttgtgatgtacactacaaaagaagaagcccaattagccatcagaattcttaataattatgaaattcgaccagggaagtttattggtgtgtgtgtaagcctggataattgtagattatttattggagctattcccaaggaaaagaagaaagaagaaattttagatgaaatgaagaaagttacagaaggagttgtagatgtcattgtttatccaagtgcaactgataagaccaaaaatcgtggttttgcatttgtggaatatgaatctcacagagctgctgctatggcaaggaggaaactaattccaggaacattccaactatggggccacaccattcaggtagattgggctgacccagagaaagaggtggatgaggaaaccatgcagagagttaaagttctttatgtaagaaatttaatgatctcaactacagaggaaacaattaaagcagaattcaataaatttaagcctggtgcagttgaacgggtaaagaaacttagagattatgcttttgttcactttttcaaccgagaagatgcagtggctgccatgtctgttatgaatggaaaatgcattgatggagcaagtattgaggtaacactagctaaaccagtaaataaagaaaacacttggagacagcatcttaatggtcagattagtccaaattctgaaaatctgattgtgtttgctaacaaagaagagagccacccaaaaactctaggcaagctgccaactcttcctgctcgtctcaatggtcagcatagcccaagtccgcctgaagttgaaagatgcacttaccctttttatcctggaacaaagcttactccaattagtatgtattctttaaaatccaatcattttaattctgcagtaatgcatttggattattactgcaacaaaaataactgggcaccaccagaatattatttatattcaacaacaagtcaagatgggaaagtactcttggtgtataagatagttattcctgctattgcaaatggatcccagagttacttcatgccagacaaactctgtactacgttagaagatgcaaaggaactggcagcccagtttacattacttcatttggactacaatttccatcgcagctcaataaatagtctttcccctgttagtgctaccctctcttctgggactcccagcgtgcttccttatacttcaaggccttattcttatccaggctatcctttgtcaccaacaatatcacttgctaatggcagccatgttggacagcggctatgtatctccaatcaggcctccttcttctgaagaaaatactaacattagtatgaaaatttgtgtaaatttgtagtatgaaaacttgcaaattaaaatattgttttattttagaatcgggtttgcatatttggttttaaaaaggtatttattccaaagtactaaacatcagctataattcagaataacatggagttgtagaatttataaaaatgcaaagtttaaaaagttattcagtggtttctcttgataaaggtacagcaaactactattctttttaaacttctaggattttcttctactttctgagtgggcaatagaacctagtcatttatgtttttttttttttttgcataattttactaaatagtatttcacaaatattaaagcacttgaagacaatggttatagtagatttgattaccaaggatcactatctgtactggagattagaacaattatatgaccagaagcatctaaccattatgtaaaaagaaatgatgagacaaaaagattaagatacaaattttgtgcagtactaaagaaaaagcagtctaccattgtggtccttgaaaataactatagatatttttgttatttgttagacacaaattataattttgttgttaatgtatttaagcattttatagttatgctttgtgtttttgatattctttgtattgttaataacaagtgttatgggtttttaatgttgaaatcatgtgttaatttttgtacttgaattcaaattttttgacattaaatatgtgatgcttct

SEQ ID NO: 4837 - protein, 533 aa, Homo sapiens; identical to SEQ ID NO: 553

SEQ ID NO: 4838 - DNA, 3626 bp, Homo sapiens
actctcacgccgaatacacagtgggggctggcggcggtggctgcggggttcaccctcgtccttccccagccccgtcgagcagtgggagggcaagtgtccgagacgctgcttcctgccccggcagcatccggccagaaggcgccctcgccgtcacccaggcgctgcatggaactgcaaccatgaatgaagaaaatatagatggaacaaatggatgcagtaaagttcgaactggtattcagaatgaagcagcattacttgctttgatggaaaagactggttacaacatggttcaggaaaatggacaaaggaaatttggcggtcctcctccaggttgggaaggtccacctccacctagaggctgtgaagtttttgtaggaaaaatacctcgtgatatgtatgaagatgagttagttcctgtatttgaaagagctgggaagatatatgaatttcgacttatgatggaatttagtggtgaaaatcgaggttatgcttttgtgatgtacactacaaaagaagaagcccaattagccatcagaattcttaataattatgaaattcgaccagggaagtttattggtgtgtgtgtaagcctggataattgtagattatttattggagctattcccaaggaaaagaagaaagaagaaattttagatgaaatgaagaaagttacagaaggagttgtagatgtcattgtttatccaagtgcaactgataagaccaaaaatcgtggttttgcatttgtggaatatgaatctcacagagctgctgctatggcaaggaggaaactaattccaggaacattccaactatggggccacaccattcaggtagattgggctgacccagagaaagaggtggatgaggaaaccatgcagagagttaaagttctttatgtaagaaatttaatgatctcaactacagaggaaacaattaaagcagaattcaataaatttaagcctggtgcagttgaacgggtaaagaaacttagagattatgcttttgttcactttttcaaccgagaagatgcagtggctgccatgtctgttatgaatggaaaatgcattgatggagcaagtattgaggtaacactagctaaaccagtaaataaagaaaacacttggagacagcatcttaatggtcagattagtccaaattctgaaaatctgattgtgtttgctaacaaagaagagagccacccaaaaactctaggcaagctgccaactcttcctgctcgtctcaatggtcagcatagcccaagtccgcctgaagttgaaagatgcacttaccctttttatcctggaacaaagcttactccaattagtatgtattctttaaaatccaatcattttaattctgcagtaatgcatttggattattactgcaacaaaaataactgggcaccaccagaatattatttatattcaacaacaagtcaagatgggaaagtactcttggtgtataagatagttattcctgctattgcaaatggatcccagagttacttcatgccagacaaactctgtactacgttagaagatgcaaaggaactggcagcccagtttacattacttcatttgggtcctttctgatgttgcttgagcttactctcctgcagttgatctcattcctgttggctaaacattaagtcccatgacaacattaagttaatgcacctatggtgtaggcatcatttatagtaccaggacagtattatagaaaaaaaccttacctgtacattagatgacctaatttcttttcttccattcctagaaacaccataatgtttctaaataatgattttatagtcattgtcacacccttggcttattttacactaaagaacatagttgagtttttggaaggtacaggatttaaaaatttggtctgtaatatacacacacacatataaatgttgcagttaatgaaacaggaaattattgatgcataagatgaatgtttattgtgaaacagtatttcaaatgttattttttaataatttggtttaattggatatttttctgtactataagttgataatggttttttgaagtaactataagttgataatggttttttgaagtttatttaataaaggtgattcattatactgttttatcataccagtaggacttttaatgttaaatcagtatgttgagttagataagtgtttatattagtatttaaataatgaaatattggccagctagtttataccaaatgtttttgcagtccaggggtgaatgtttctgctggtttgatgcctaatacagcttcaaagaaaaaaaaaaagcaaatatgaattcactgttttttatcttttcttcatggactaccccttagaaccaaatttaaaagaagcttctttgtagagcaagagaaatgagacgttctctttttctataatcaaaactccaagaaatagtagatatccaagaattcattctggtaagatctctgaaacattgcgtgagtaaaggaaaggtaatactgacaaaactctcaggatttgcagtgcagtgaatgctgaaataatctttaaccagcaatatagtatcatcaagatttccagtgttagaacattatgttaaaatgtgattattgtttaatgctttgtctctttaaattaaatttgtgtccataaagatgtacagcataattgttcatgtatttatttacagactacaatttccatcgcagctcaataaatagtctttcccctgttagtgctaccctctcttctgggactcccagcgtgcttccttatacttcaaggccttattcttatccaggctatcctttgtcaccaacaatatcacttgctaatggcagccatgttggacagcggctatgtatctccaatcaggcctccttcttctgaagaaaatactaacattagtatgaaaatttgtgtaaatttgtagtatgaaaacttgcaaattaaaatattgttttattttagaatcgggtttgcatatttggttttaaaaaggtatttattccaaagtactaaacatcagctataattcagaataacatggagttgtagaatttataaaaatgcaaagtttaaaaagttattcagtggtttctcttgataaaggtacagcaaactactattctttttaaacttctaggattttcttctactttctgagtgggcaatagaacctagtcatttatgtttttttttttttttgcataattttactaaatagtatttcacaaatattaaagcacttgaagacaatggttatagtagatttgattaccaaggatcactatctgtactggagattagaacaattatatgaccagaagcatctaaccattatgtaaaaagaaatgatgagacaaaaagattaagatacaaattttgtgcagtactaaagaaaaagcagtctaccattgtggtccttgaaaataactatagatatttttgttatttgttagacacaaattataattttgttgttaatgtatttaagcattttatagttatgctttgtgtttttgatattctttgtattgttaataacaagtgttatgggtttttaatgttgaaatcatgtgttaatttttgtacttgaattcaaattttttgacattaaatatgtgatgcttct

SEQ ID NO: 4839 - protein, 470 aa, Homo sapiens
MNEENIDGTNGCSKVRTGIQNEAALLALMEKTGYNMVQENGQRKFGGPPPGWEGPPPPRGCEVFVGKIPRDMYEDELVPVFERAGKIYEFRLMMEFSGENRGYAFVMYTTKEEAQLAIRILNNYEIRPGKFIGVCVSLDNCRLFIGAIPKEKKKEEILDEMKKVTEGVVDVIVYPSATDKTKNRGFAFVEYESHRAAAMARRKLIPGTFQLWGHTIQVDWADPEKEVDEETMQRVKVLYVRNLMISTTEETIKAEFNKFKPGAVERVKKLRDYAFVHFFNREDAVAAMSVMNGKCIDGASIEVTLAKPVNKENTWRQHLNGQISPNSENLIVFANKEESHPKTLGKLPTLPARLNGQHSPSPPEVERCTYPFYPGTKLTPISMYSLKSNHFNSAVMHLDYYCNKNNWAPPEYYLYSTTSQDGKVLLVYKIVIPAIANGSQSYFMPDKLCTTLEDAKELAAQFTLLHLGPF

SEQ ID NO: 4840 - DNA, 2320 bp, Homo sapiens
tgcatttggattattactgcaacaaaaataactgggcaccaccagaatattatttatattcaacaacaagtcaagatgggaaagtactcttggtgtataagatagttattcctgctattgcaaatggatcccagagttacttcatgccagacaaactctgtactacgttagaagatgcaaaggaactggcagcccagtttacattacttcatttggacagggaacacaatctcttcagcctggacctgtgtagaagaatttggagaaaataaacaggtcctttctgatgttgcttgagcttactctcctgcagttgatctcattcctgttggctaaacattaagtcccatgacaacattaagttaatgcacctatggtgtaggcatcatttatagtaccaggacagtattatagaaaaaaaccttacctgtacattagatgacctaatttcttttcttccattcctagaaacaccataatgtttctaaataatgattttatagtcattgtcacacccttggcttattttacactaaagaacatagttgagtttttggaaggtacaggatttaaaaatttggtctgtaatatacacacacacatataaatgttgcagttaatgaaacaggaaattattgatgcataagatgaatgtttattgtgaaacagtatttcaaatgttattttttaataatttggtttaattggatatttttctgtactataagttgataatggttttttgaagtaactataagttgataatggttttttgaagtttatttaataaaggtgattcattatactgttttatcataccagtaggacttttaatgttaaatcagtatgttgagttagataagtgtttatattagtatttaaataatgaaatattggccagctagtttataccaaatgtttttgcagtccaggggtgaatgtttctgctggtttgatgcctaatacagcttcaaagaaaaaaaaaaagcaaatatgaattcactgttttttatcttttcttcatggactaccccttagaaccaaatttaaaagaagcttctttgtagagcaagagaaatgagacgttctctttttctataatcaaaactccaagaaatagtagatatccaagaattcattctggtaagatctctgaaacattgcgtgagtaaaggaaaggtaatactgacaaaactctcaggatttgcagtgcagtgaatgctgaaataatctttaaccagcaatatagtatcatcaagatttccagtgttagaacattatgttaaaatgtgattattgtttaatgctttgtctctttaaattaaatttgtgtccataaagatgtacagcataattgttcatgtatttatttacagactacaatttccatcgcagctcaataaatagtctttcccctgttagtgctaccctctcttctgggactcccagcgtgcttccttatacttcaaggccttattcttatccaggctatcctttgtcaccaacaatatcacttgctaatggcagccatgttggacagcggctatgtatctccaatcaggcctccttcttctgaagaaaatactaacattagtatgaaaatttgtgtaaatttgtagtatgaaaacttgcaaattaaaatattgttttattttagaatcgggtttgcatatttggttttaaaaaggtatttattccaaagtactaaacatcagctataattcagaataacatggagttgtagaatttataaaaatgcaaagtttaaaaagttattcagtggtttctcttgataaaggtacagcaaactactattctttttaaacttctaggattttcttctactttctgagtgggcaatagaacctagtcatttatgtttttttttttttttgcataattttactaaatagtatttcacaaatattaaagcacttgaagacaatggttatagtagatttgattaccaaggatcactatctgtactggagattagaacaattatatgaccagaagcatctaaccattatgtaaaaagaaatgatgagacaaaaagattaagatacaaattttgtgcagtactaaagaaaaagcagtctaccattgtggtccttgaaaataactatagatatttttgttatttgttagacacaaattataattttgttgttaatgtatttaagcattttatagttatgctttgtgtttttgatattctttgtattgttaataacaagtgttatgggtttttaatgttgaaatcatgtgttaatttttgtacttgaattcaaattttttgacattaaatatgtgatgcttc

SEQ ID NO: 4841 - protein, 42 aa, Homo sapiens
MPDKLCTTLEDAKELAAQFTLLHLDREHNLFSLDLCRRIWRK

SEQ ID NO: 4842 - DNA, 660 bp, Homo sapiens
ttgtccctgcctctggaatatgatcacttttatctctattgaccctctcttgccagttatggtcaggacaactaaaaatttagacaaagagctgggacttgacctcatgaaacagacccaagaattcatagtaacagacctcacagcaactcgtgtggacatgcagaacttgataatgcatagaaaatttcctgtaagacagacccagttcaaacaagggattcaggtcagagaaagaatgactgtaacacctactgtctattggaaagagaaggagagcaggagagagtgatggcagaaagaggagcgagagagagagtgagcgagctatagaacttccggacatttcaactttattatttcaagtgtaacaccaattgttgaggagaaaattagcatgcagtggcttggggtcaatcaggcctatcttgaattatctgtttctgtaaaaatgaggggaaaatgagatgtaggtctctgtgaggattaggagtggaaattacgtaagataacataaacattgtatgtgaaacttcttaatagcagagtacattgtagggggatcaataggcattgatttgtagatattaatagatactttttcataattttaaactctgtttttctaagtccatgattaaaaatattttccagcatatt

SEQ ID NO: 4843 - protein, 90 aa, Homo sapiens
MITFISIDPLLPVMVRTTKNLDKELGLDLMKQTQEFIVTDLTATRVDMQNLIMHRKFPVRQTQFKQGIQVRERMTVTPTVYWKEKESRRE

SEQ ID NO: 4844 - DNA, 4632 bp, Homo sapiens
cacacagtgatttctgttatggcgattgggcggctgcagagaccaggactcagttcccctgccctagtctgagcctagtgggtgggactcagctcagagtcagttttccagaagcaggtttcagtgcagagttttcctacacttttcctgcgctagagcagcgagcagcctggaacagacccaggcggaggacacctgtgggggagggagcgcctggaggagcttagagaccccagccgggcgtgatctcaccatgtgcggatttgcgaggcgcgccctggagctgctagagatccggaagcacagccccgaggtgtgcgaagccaccaaacatcccagttaccagtgtccttgaattgatagtggcttctgtttgtcagtctcatataagaactacagctcatcaggaggagatcgcagcagggtaagagacaccaacaccatgttctgcacgaagctcaaggatctcaagatcacaggagagtgtcctttctccttactggcaccaggtcaagttcctaacgagtcttcagaggaggcagcaggaagctcagagagctgcaaagcaaccgtgcccatctgtcaagacattcctgagaagaacatacaagaaagtcttcctcaaagaaaaaccagtcggagccgagtctatcttcacactttggcagagagtatttgcaaactgattttcccagagtttgaacggctgaatgttgcacttcagagaacattggcaaagcacaaaataaaagaaagcaggaaatctttggaaagagaagactttgaaaaaacaattgcagagcaagcagttgcagcaggagttccagtggaggttatcaaagaatctcttggtgaagaggtttttaaaatatgttacgaggaagatgaaaacatccttggggtggttggaggcacccttaaagattttttaaacagcttcagtacccttctgaaacagagcagccattgccaagaagcaggaaaaaggggcaggcttgaggacgcctccattctatgcctggataaggaggatgattttctacatgtttactacttcttccctaagagaaccacctccctgattcttcccggcatcataaaggcagctgctcacgtattatatgaaacggaagtggaagtgtcgttaatgcctccctgcttccataatgattgcagcgagtttgtgaatcagccctacttgttgtactccgttcacatgaaaagcaccaagccatccctgtcccccagcaaaccccagtcctcgctggtgattcccacatcgctattctgcaagacatttccattccatttcatgtttgacaaagatatgacaattctgcaatttggcaatggcatcagaaggctgatgaacaggagagactttcaaggaaagcctaattttgaagaatactttgaaattctgactccaaaaatcaaccagacgtttagcgggatcatgactatgttgaatatgcagtttgttgtacgagtgaggagatgggacaactctgtgaaaaaatcttcaagggttatggacctcaaaggccaaatgatctacattgttgaatccagtgcaatcttgtttttggggtcaccctgtgtggacagattagaagattttacaggacgagggctctacctctcagacatcccaattcacaatgcactgagggatgtggtcttaataggggaacaagcccgagctcaagatggcctgaagaagaggctggggaagctgaaggctacccttgagcaagcccaccaagccctggaggaggagaagaaaaagacagtagaccttctgtgctccatatttccctgtgaggttgctcagcagctgtggcaagggcaagttgtgcaagccaagaagttcagtaatgtcaccatgctcttctcagacatcgttgggttcactgccatctgctcccagtgctcaccgctgcaggtcatcaccatgctcaatgcactgtacactcgcttcgaccagcagtgtggagagctggatgtctacaaggtggagaccattggcgatgcctattgtgtagctgggggattacacaaagagagtgatactcatgctgttcagatagcgctgatggccctgaagatgatggagctctctgatgaagttatgtctccccatggagaacctatcaagatgcgaattggactgcactctggatcagtttttgctggcgtcgttggagttaaaatgccccgttactgtctttttggaaacaatgtcactctggctaacaaatttgagtcctgcagtgtaccacgaaaaatcaatgtcagcccaacaacttacagattactcaaagactgtcctggtttcgtgtttacccctcgatcaagggaggaacttccaccaaacttccctagtgaaatccccggaatctgccattttctggatgcttaccaacaaggaacaaactcaaaaccatgcttccaaaagaaagatgtggaagatggcaatgccaattttttaggcaaagcatcaggaatagattagcaacctatatacctatttataagtctttggggtttgactcattgaagatgtgtagagcctctgaaagcactttagggattgtagatggctaacaagcagtattaaaatttcaggagccaagtcacaatctttctcctgtttaacatgacaaaatgtatgtactcacttcagtacttcagctcttcaagaaaaaaaaaaaaaaccttaaaaagctacttttgtgggagtatttctattatataaccagcacttactacctgtactcaaaattcagcaccttgtacatatatcagataattgtagtcaattgtacaaactgatggagtcacctgcaatctcatatcctggtggaatgccatggttattaaagtgtgtttgtgatagtgtcgtcaaaaaaaaggtttttgaatagaaattacattctttgacaccctcagttctttcaaactttcaactctgcattttattgcattttctcatttaactgttagtatatgtttgaatataggctgactttttttctctattgcactttcttctttttttctttttagaaaataagcaattaggggttagatgcaatatgaatataaaatagttctgtaaataccaaatattatttttagttctggaagttaaaaatactctccatagtaacgtgtgttataataataaatatttcttttgtttgacttttttaaaattctacaatggtaaaagctattttaatccatgttagcaatttaattcctattaattcattttactatcataatagcaaagtattcagaataaaagaggtttatatcttctattaaaatgcagtaatactattcaaatctaatttagctggaagcaacatgggagtaaagtaatcatccaggggacccaccataaaggacattggtaaaacatttacacacgtaaacacacgtgcaggcacacttggaacaatatggacccacttcagcagacatcttctattgccatgctgagctgtttaaagttttaagaagaaaatctaagtatggaagtagaaaataagacttgttcttttggtggatatctcatttttcttgagtatttgtgctgaacattttggtgtatgtctatgaactaagaatcaagtttttgtctcattaaatatacatatatgaagtgtttttattctacttgaaatatcttgacttaaaaaaaacgactgttagtattgatgaagcaaatgaggcagtgactacattatggaaatgtctaagtattttttccggaacttcaactttttctttttgttttacataaacatttaagcagctaggaacttttagttttagttaggtcagttgaagttctctggtgaactaaaaaatctacattttggttggggataaagatttgattttaaaaacagcttgaatttaaagcaagaaaaagatgaacgttatagttttaaaatcaatattagcagagccatagataggctgagctcttatttggggttctgagaaataactcagtttaaaacttctttaactgcctcccttagtacccaggctagcccatggtgacatcagggatattcattactgattggcctctagtattccaagggtactactatagatattacaatgatgctgtttactaagtgataaccccgtatcttacaggactgactttgactcaataaaccactcagcctattattggaaagtgccataggccttgagaaagtatagttacatcctcacaaatatatgaagttaagtcactacttacaaggaaaaaaaatgtaaatacatttttctttctggaaccgaactcttattatggggaaataatagaaataaagaaaatgtaaaagcatgaaatggaatgtagtcttgatcaaacatttcagcagacctcaatttgcttacaatctgtactcaaaaagtttataattcaatcagaattcaaaaagtattttgtgtgtttgtgatgtattagcatatacacaaaacaaatgaggggaatgtatataatcttggtgaaaagttgtatgggagttttttgtacgattcctgcaacttttctataaacgtggcattatatctaaataaaaaattaccaaaaaacat

SEQ ID NO: 4845 - protein, 690 aa, Homo sapiens; identical to SEQ ID NO: 557

SEQ ID NO: 4846 - DNA, 4885 bp, Homo sapiens
cacacagtgatttctgttatggcgattgggcggctgcagagaccaggactcagttcccctgccctagtctgagcctagtgggtgggactcagctcagagtcagttttccagaagcaggtttcagtgcagagttttcctacacttttcctgcgctagagcagcgagcagcctggaacagacccaggcggaggacacctgtgggggagggagcgcctggaggagcttagagaccccagccgggcgtgatctcaccatgtgcggatttgcgaggcgcgccctggagctgctagagatccggaagcacagccccgaggtgtgcgaagccaccaaacatcccagttaccagtgtccttgaattgatagtggcttctgtttgtcagtctcatataagaactacagctcatcaggaggagatcgcagcagggtaagagacaccaacaccatgttctgcacgaagctcaaggatctcaagatcacaggagagtgtcctttctccttactggcaccaggtcaagttcctaacgagtcttcagaggaggcagcaggaagctcagagagctgcaaagcaaccgtgcccatctgtcaagacattcctgagaagaacatacaagaaagtcttcctcaaagaaaaaccagtcggagccgagtctatcttcacactttggcagagagtatttgcaaactgattttcccagagtttgaacggctgaatgttgcacttcagagaacattggcaaagcacaaaataaaagaaagcaggaaatctttggaaagagaagactttgaaaaaacaattgcagagcaagcagttgcagcaggagttccagtggaggttatcaaagaatctcttggtgaagaggtttttaaaatatgttacgaggaagatgaaaacatccttggggtggttggaggcacccttaaagattttttaaacagcttcagtacccttctgaaacagagcagccattgccaagaagcaggaaaaaggggcaggcttgaggacgcctccattctatgcctggataaggaggatgattttctacatgtttactacttcttccctaagagaaccacctccctgattcttcccggcatcataaaggcagctgctcacgtattatatgaaacggaagtggaagtgtcgttaatgcctccctgcttccataatgattgcagcgagtttgtgaatcagccctacttgttgtactccgttcacatgaaaagcaccaagccatccctgtcccccagcaaaccccagtcctcgctggtgattcccacatcgctattctgcaagacatttccattccatttcatgtttgacaaagatatgacaattctgcaatttggcaatggcatcagaaggctgatgaacaggagagactttcaaggaaagcctaattttgaagaatactttgaaattctgactccaaaaatcaaccagacgtttagcgggatcatgactatgttgaatatgcagtttgttgtacgagtgaggagatgggacaactctgtgaaaaaatcttcaagggttatggacctcaaaggccaaatgatctacattgttgaatccagtgcaatcttgtttttggggtcaccctgtgtggacagattagaagattttacaggacgagggctctacctctcagacatcccaattcacaatgcactgagggatgtggtcttaataggggaacaagcccgagctcaagatggcctgaagaagaggctggggaagctgaaggctacccttgagcaagcccaccaagccctggaggaggagaagaaaaagacagtagaccttctgtgctccatatttccctgtgaggttgctcagcagctgtggcaagggcaagttgtgcaagccaagaagttcagtaatgtcaccatgctcttctcagacatcgttgggttcactgccatctgctcccagtgctcaccgctgcaggtcatcaccatgctcaatgcactgtacactcgcttcgaccagcagtgtggagagctggatgtctacaaggtggagaccattggcgatgcctattgtgtagctgggggattacacaaagagagtgatactcatgctgttcagatagcgctgatggccctgaagatgatggagctctctgatgaagttatgtctccccatggagaacctatcaagatgcgaattggactgcactctggatcagtttttgctggcgtcgttggagttaaaatgccccgttactgtctttttggaaacaatgtcactctggctaacaaatttgagtcctgcagtgtaccacgaaaaatcaatgtcagcccaacaacttacagattactcaaagactgtcctggtttcgtgtttacccctcgatcaagggaggaacttccaccaaacttccctagtgaaatccccggaatctgccattttctggatgcttaccaacaaggaacaaactcaaaaccatgcttccaaaagaaagatgtggaagatggcaatgccaattttttaggcaaagcatcaggaatagattagcaacctatatacctatttataagtctttggggtttgactcattgaagatgtgtagagcctctgaaagcactttagggattgtagatggctaacaagcagtattaaaatttcaggagccaagtcacaatctttctcctgtttaacatgacaaaatgtatgtactcacttcagtacttcagctcttcaagaaaaaaaaaaaaaaccttaaaaagctacttttgtgggagtatttctattatataaccagcacttactacctgtactcaaaattcagcaccttgtacatatatcagataattgtagtcaattgtacaaactgatggagtcacctgcaatctcatatcctggtggaatgccatggttattaaagtgtgtttgtgatagtgtcgtcaaaaaaaaggtttttgaatagaaattacattctttgacaccctcagttctttcaaactttcaactctgcattttattgcattttctcatttaactgttagtatatgtttgaatataggctgactttttttctctattgcactttcttctttttttctttttagaaaataagcaattaggggttagatgcaatatgaatataaaatagttctgtaaataccaaatattatttttagttctggaagttaaaaatactctccatagtaacgtgtgttataataataaatatttcttttgtttgacttttttaaaattctacaatggtaaaagctattttaatccatgttagcaatttaattcctattaattcattttactatcataatagcaaagtattcagaataaaagaggtttatatcttctattaaaatgcagtaatactattcaaatctaatttagctggaagcaacatgggagtaaagtaatcatccaggggacccaccataaaggacattggtaaaacatttacacacgtaaacacacgtgcaggcacacttggaacaatatggacccacttcagcagacatcttctattgccatgctgagctgtttaaagttttaagaagaaaatctaagtatggaagtagaaaataagacttgttcttttggtggatatctcatttttcttgagtatttgtgctgaacattttggtgtatgtctatgaactaagaatcaagtttttgtctcattaaatatacatatatgaagtgtttttattctacttgaaatatcttgacttaaaaaaaacgactgttagtattgatgaagcaaatgaggcagtgactacattatggaaatgtctaagtattttttccggaacttcaactttttctttttgttttacataaacatttaagcagctaggaacttttagttttagttaggtcagttgaagttctctggtgaactaaaaaatctacattttggttggggataaagatttgattttaaaaacagcttgaatttaaagcaagaaaaagatgaacgttatagttttaaaatcaatattagcagagccatagataggctgagctcttatttggggttctgagaaataactcagtttaaaacttctttaactgcctcccttagtacccaggctagcccatggtgacatcagggatattcattactgattggcctctagtattccaagggtactactatagatattacaatgatgctgtttactaagtgataaccccgtatcttacaggactgactttgactcaataaaccactcagcctattattggaaagtgccataggccttgagaaagtatagttacatcctcacaaatatatgaagttaagtcactacttacaaggaaaaaaaatgtaaatacatttttctttctggaaccgaactcttattatggggaaataatagaaataaagaaaatgtaaaagcatgaaatggaatgtagtcttgatcaaacatttcagcagacctcaatttgcttacaatctgtactcaaaaagtttataattcaatcagaattcaaaaagtattttgtgtgtttgtgatgtattagcatatacacaaaacaaatgaggggaatgtatataatcttggtgaaaagttgtatgggagttttttgtacgattcctgcaacttttctataaacgtggcattatatctaaataaaaaattaccaaaaaacatattttcacagtgaagttaaatcatctgtgataggttccccagaccagcctacaaaggcccattaaatacagaataatttgtggatcttcaaagaggatgaacatacatttccatgacagagtccatacgaaattcacaatttagatgctaaaaaatttaaggaatatctttttttctctatcttatctgctttgaagcatagcgattagcgagaaacttttcagatccagaccactgatggtagccagagtag

SEQ ID NO: 4847 - protein, 690 aa, Homo sapiens; identical to SEQ ID NO: 557

SEQ ID NO: 4848 - DNA, 4732 bp, Homo sapiens
gttatggcgattgggcggctgcagagaccaggactcagttcccctgccctagtctgagcctagtgggtgggactcagctcagagtcagttttccagaagcaggtttcagtgcagagttttcctacacttttcctgcgctagagcagcgagcagcctggaacagacccaggcggaggacacctgtgggggagggagcgcctggaggagcttagagaccccagccgggcgtgatctcaccatggtgcgttttggctgctactttctttttcagtctttcggtgcggagaaggggaggaggcgggcagaggtctgaaaaaatcgaatgccttatggaaaggaactgcaagggttcctttggggtgatcaaagagggagacacagacacagagagacaaaggcaaggaggactgtctgggagccacgcgggcgatacagtttccgaggcacgccgcgtcccgcctagcctgttgaacaggtagacatgagcgacccaagctgcggatttgcgaggcgcgccctggagctgctagagatccggaagcacagccccgaggtgtgcgaagccaccaaacatcccagttaccagtgtccttgaattgatagtggcttctgtttgtcagtctcatataagaactacagctcatcaggaggagatcgcagcagggtaagagacaccaacaccatgttctgcacgaagctcaaggatctcaagatcacaggagagtgtcctttctccttactggcaccaggtcaagttcctaacgagtcttcagaggaggcagcaggaagctcagagagctgcaaagcaaccgtgcccatctgtcaagacattcctgagaagaacatacaagaaagtcttcctcaaagaaaaaccagtcggagccgagtctatcttcacactttggcagagagtatttgcaaactgattttcccagagtttgaacggctgaatgttgcacttcagagaacattggcaaagcacaaaataaaagaaagcaggaaatctttggaaagagaagactttgaaaaaacaattgcagagcaagcagttgcagcagagcagccattgccaagaagcaggaaaaaggggcaggcttgaggacgcctccattctatgcctggataaggaggatgattttctacatgtttactacttcttccctaagagaaccacctccctgattcttcccggcatcataaaggcagctgctcacgtattatatgaaacggaagtggaagtgtcgttaatgcctccctgcttccataatgattgcagcgagtttgtgaatcagccctacttgttgtactccgttcacatgaaaagcaccaagccatccctgtcccccagcaaaccccagtcctcgctggtgattcccacatcgctattctgcaagacatttccattccatttcatgtttgacaaagatatgacaattctgcaatttggcaatggcatcagaaggctgatgaacaggagagactttcaaggaaagcctaattttgaagaatactttgaaattctgactccaaaaatcaaccagacgtttagcgggatcatgactatgttgaatatgcagtttgttgtacgagtgaggagatgggacaactctgtgaaaaaatcttcaagggttatggacctcaaaggccaaatgatctacattgttgaatccagtgcaatcttgtttttggggtcaccctgtgtggacagattagaagattttacaggacgagggctctacctctcagacatcccaattcacaatgcactgagggatgtggtcttaataggggaacaagcccgagctcaagatggcctgaagaagaggctggggaagctgaaggctacccttgagcaagcccaccaagccctggaggaggagaagaaaaagacagtagaccttctgtgctccatatttccctgtgaggttgctcagcagctgtggcaagggcaagttgtgcaagccaagaagttcagtaatgtcaccatgctcttctcagacatcgttgggttcactgccatctgctcccagtgctcaccgctgcaggtcatcaccatgctcaatgcactgtacactcgcttcgaccagcagtgtggagagctggatgtctacaaggtggagaccattggcgatgcctattgtgtagctgggggattacacaaagagagtgatactcatgctgttcagatagcgctgatggccctgaagatgatggagctctctgatgaagttatgtctccccatggagaacctatcaagatgcgaattggactgcactctggatcagtttttgctggcgtcgttggagttaaaatgccccgttactgtctttttggaaacaatgtcactctggctaacaaatttgagtcctgcagtgtaccacgaaaaatcaatgtcagcccaacaacttacagattactcaaagactgtcctggtttcgtgtttacccctcgatcaagggaggaacttccaccaaacttccctagtgaaatccccggaatctgccattttctggatgcttaccaacaaggaacaaactcaaaaccatgcttccaaaagaaagatgtggaagatggcaatgccaattttttaggcaaagcatcaggaatagattagcaacctatatacctatttataagtctttggggtttgactcattgaagatgtgtagagcctctgaaagcactttagggattgtagatggctaacaagcagtattaaaatttcaggagccaagtcacaatctttctcctgtttaacatgacaaaatgtatgtactcacttcagtacttcagctcttcaagaaaaaaaaaaaaaaccttaaaaagctacttttgtgggagtatttctattatataaccagcacttactacctgtactcaaaattcagcaccttgtacatatatcagataattgtagtcaattgtacaaactgatggagtcacctgcaatctcatatcctggtggaatgccatggttattaaagtgtgtttgtgatagtgtcgtcaaaaaaaaggtttttgaatagaaattacattctttgacaccctcagttctttcaaactttcaactctgcattttattgcattttctcatttaactgttagtatatgtttgaatataggctgactttttttctctattgcactttcttctttttttctttttagaaaataagcaattaggggttagatgcaatatgaatataaaatagttctgtaaataccaaatattatttttagttctggaagttaaaaatactctccatagtaacgtgtgttataataataaatatttcttttgtttgacttttttaaaattctacaatggtaaaagctattttaatccatgttagcaatttaattcctattaattcattttactatcataatagcaaagtattcagaataaaagaggtttatatcttctattaaaatgcagtaatactattcaaatctaatttagctggaagcaacatgggagtaaagtaatcatccaggggacccaccataaaggacattggtaaaacatttacacacgtaaacacacgtgcaggcacacttggaacaatatggacccacttcagcagacatcttctattgccatgctgagctgtttaaagttttaagaagaaaatctaagtatggaagtagaaaataagacttgttcttttggtggatatctcatttttcttgagtatttgtgctgaacattttggtgtatgtctatgaactaagaatcaagtttttgtctcattaaatatacatatatgaagtgtttttattctacttgaaatatcttgacttaaaaaaaacgactgttagtattgatgaagcaaatgaggcagtgactacattatggaaatgtctaagtattttttccggaacttcaactttttctttttgttttacataaacatttaagcagctaggaacttttagttttagttaggtcagttgaagttctctggtgaactaaaaaatctacattttggttggggataaagatttgattttaaaaacagcttgaatttaaagcaagaaaaagatgaacgttatagttttaaaatcaatattagcagagccatagataggctgagctcttatttggggttctgagaaataactcagtttaaaacttctttaactgcctcccttagtacccaggctagcccatggtgacatcagggatattcattactgattggcctctagtattccaagggtactactatagatattacaatgatgctgtttactaagtgataaccccgtatcttacaggactgactttgactcaataaaccactcagcctattattggaaagtgccataggccttgagaaagtatagttacatcctcacaaatatatgaagttaagtcactacttacaaggaaaaaaaatgtaaatacatttttctttctggaaccgaactcttattatggggaaataatagaaataaagaaaatgtaaaagcatgaaatggaatgtagtcttgatcaaacatttcagcagacctcaatttgcttacaatctgtactcaaaaagtttataattcaatcagaattcaaaaagtattttgtgtgtttgtgatgtattagcatatacacaaaacaaatgaggggaatgtatataatcttggtgaaaagttgtatgggagttttttgtacgattcctgcaacttttctataaacgtggcattatatctaaataaaaaattaccaaaaaacat

SEQ ID NO: 4849 - protein, 455 aa, Homo sapiens
MPPCFHNDCSEFVNQPYLLYSVHMKSTKPSLSPSKPQSSLVIPTSLFCKTFPFHFMFDKDMTILQFGNGIRRLMNRRDFQGKPNFEEYFEILTPKINQTFSGIMTMLNMQFVVRVRRWDNSVKKSSRVMDLKGQMIYIVESSAILFLGSPCVDRLEDFTGRGLYLSDIPIHNALRDVVLIGEQARAQDGLKKRLGKLKATLEQAHQALEEEKKKTVDLLCSIFPCEVAQQLWQGQVVQAKKFSNVTMLFSDIVGFTAICSQCSPLQVITMLNALYTRFDQQCGELDVYKVETIGDAYCVAGGLHKESDTHAVQIALMALKMMELSDEVMSPHGEPIKMRIGLHSGSVFAGVVGVKMPRYCLFGNNVTLANKFESCSVPRKINVSPTTYRLLKDCPGFVFTPRSREELPPNFPSEIPGICHFLDAYQQGTNSKPCFQKKDVEDGNANFLGKASGID

SEQ ID NO: 4850 - DNA, 4822 bp, Homo sapiens
gttatggcgattgggcggctgcagagaccaggactcagttcccctgccctagtctgagcctagtgggtgggactcagctcagagtcagttttccagaagcaggtttcagtgcagagttttcctacacttttcctgcgctagagcagcgagcagcctggaacagacccaggcggaggacacctgtgggggagggagcgcctggaggagcttagagaccccagccgggcgtgatctcaccatggtgcgttttggctgctactttctttttcagtctttcggtgcggagaaggggaggaggcgggcagaggtctgaaaaaatcgaatgccttatggaaaggaactgcaagggttcctttggggtgatcaaagagggagacacagacacagagagacaaaggcaaggaggactgtctgggagccacgcgggcgatacagtttccgaggcacgccgcgtcccgcctagcctgttgaacaggtagacatgagcgacccaagctgcggatttgcgaggcgcgccctggagctgctagagatccggaagcacagccccgaggtgtgcgaagccaccaatctcatataagaactacagctcatcaggaggagatcgcagcagggtaagagacaccaacaccatgttctgcacgaagctcaaggatctcaagatcacaggagagtgtcctttctccttactggcaccaggtcaagttcctaacgagtcttcagaggaggcagcaggaagctcagagagctgcaaagcaaccgtgcccatctgtcaagacattcctgagaagaacatacaagaaagtcttcctcaaagaaaaaccagtcggagccgagtctatcttcacactttggcagagagtatttgcaaactgattttcccagagtttgaacggctgaatgttgcacttcagagaacattggcaaagcacaaaataaaagaaagcaggaaatctttggaaagagaagactttgaaaaaacaattgcagagcaagcagttgcagcaggagttccagtggaggttatcaaagaatctcttggtgaagaggtttttaaaatatgttacgaggaagatgaaaacatccttggggtggttggaggcacccttaaagattttttaaacagcttcagtacccttctgaaacagagcagccattgccaagaagcaggaaaaaggggcaggcttgaggacgcctccattctatgcctggataaggaggatgattttctacatgtttactacttcttccctaagagaaccacctccctgattcttcccggcatcataaaggcagctgctcacgtattatatgaaacggaagtggaagtgtcgttaatgcctccctgcttccataatgattgcagcgagtttgtgaatcagccctacttgttgtactccgttcacatgaaaagcaccaagccatccctgtcccccagcaaaccccagtcctcgctggtgattcccacatcgctattctgcaagacatttccattccatttcatgtttgacaaagatatgacaattctgcaatttggcaatggcatcagaaggctgatgaacaggagagactttcaaggaaagcctaattttgaagaatactttgaaattctgactccaaaaatcaaccagacgtttagcgggatcatgactatgttgaatatgcagtttgttgtacgagtgaggagatgggacaactctgtgaaaaaatcttcaagggttatggacctcaaaggccaaatgatctacattgttgaatccagtgcaatcttgtttttggggtcaccctgtgtggacagattagaagattttacaggacgagggctctacctctcagacatcccaattcacaatgcactgagggatgtggtcttaataggggaacaagcccgagctcaagatggcctgaagaagaggctggggaagctgaaggctacccttgagcaagcccaccaagccctggaggaggagaagaaaaagacagtagaccttctgtgctccatatttccctgtgaggttgctcagcagctgtggcaagggcaagttgtgcaagccaagaagttcagtaatgtcaccatgctcttctcagacatcgttgggttcactgccatctgctcccagtgctcaccgctgcaggtcatcaccatgctcaatgcactgtacactcgcttcgaccagcagtgtggagagctggatgtctacaaggtggagaccattggcgatgcctattgtgtagctgggggattacacaaagagagtgatactcatgctgttcagatagcgctgatggccctgaagatgatggagctctctgatgaagttatgtctccccatggagaacctatcaagatgcgaattggactgcactctggatcagtttttgctggcgtcgttggagttaaaatgccccgttactgtctttttggaaacaatgtcactctggctaacaaatttgagtcctgcagtgtaccacgaaaaatcaatgtcagcccaacaacttacagattactcaaagactgtcctggtttcgtgtttacccctcgatcaagggaggaacttccaccaaacttccctagtgaaatccccggaatctgccattttctggatgcttaccaacaaggaacaaactcaaaaccatgcttccaaaagaaagatgtggaagatggcaatgccaattttttaggcaaagcatcaggaatagattagcaacctatatacctatttataagtctttggggtttgactcattgaagatgtgtagagcctctgaaagcactttagggattgtagatggctaacaagcagtattaaaatttcaggagccaagtcacaatctttctcctgtttaacatgacaaaatgtatgtactcacttcagtacttcagctcttcaagaaaaaaaaaaaaaaccttaaaaagctacttttgtgggagtatttctattatataaccagcacttactacctgtactcaaaattcagcaccttgtacatatatcagataattgtagtcaattgtacaaactgatggagtcacctgcaatctcatatcctggtggaatgccatggttattaaagtgtgtttgtgatagtgtcgtcaaaaaaaaggtttttgaatagaaattacattctttgacaccctcagttctttcaaactttcaactctgcattttattgcattttctcatttaactgttagtatatgtttgaatataggctgactttttttctctattgcactttcttctttttttctttttagaaaataagcaattaggggttagatgcaatatgaatataaaatagttctgtaaataccaaatattatttttagttctggaagttaaaaatactctccatagtaacgtgtgttataataataaatatttcttttgtttgacttttttaaaattctacaatggtaaaagctattttaatccatgttagcaatttaattcctattaattcattttactatcataatagcaaagtattcagaataaaagaggtttatatcttctattaaaatgcagtaatactattcaaatctaatttagctggaagcaacatgggagtaaagtaatcatccaggggacccaccataaaggacattggtaaaacatttacacacgtaaacacacgtgcaggcacacttggaacaatatggacccacttcagcagacatcttctattgccatgctgagctgtttaaagttttaagaagaaaatctaagtatggaagtagaaaataagacttgttcttttggtggatatctcatttttcttgagtatttgtgctgaacattttggtgtatgtctatgaactaagaatcaagtttttgtctcattaaatatacatatatgaagtgtttttattctacttgaaatatcttgacttaaaaaaaacgactgttagtattgatgaagcaaatgaggcagtgactacattatggaaatgtctaagtattttttccggaacttcaactttttctttttgttttacataaacatttaagcagctaggaacttttagttttagttaggtcagttgaagttctctggtgaactaaaaaatctacattttggttggggataaagatttgattttaaaaacagcttgaatttaaagcaagaaaaagatgaacgttatagttttaaaatcaatattagcagagccatagataggctgagctcttatttggggttctgagaaataactcagtttaaaacttctttaactgcctcccttagtacccaggctagcccatggtgacatcagggatattcattactgattggcctctagtattccaagggtactactatagatattacaatgatgctgtttactaagtgataaccccgtatcttacaggactgactttgactcaataaaccactcagcctattattggaaagtgccataggccttgagaaagtatagttacatcctcacaaatatatgaagttaagtcactacttacaaggaaaaaaaatgtaaatacatttttctttctggaaccgaactcttattatggggaaataatagaaataaagaaaatgtaaaagcatgaaatggaatgtagtcttgatcaaacatttcagcagacctcaatttgcttacaatctgtactcaaaaagtttataattcaatcagaattcaaaaagtattttgtgtgtttgtgatgtattagcatatacacaaaacaaatgaggggaatgtatataatcttggtgaaaagttgtatgggagttttttgtacgattcctgcaacttttctataaacgtggcattatatctaaataaaaaattaccaaaaaacat

SEQ ID NO: 4851 - protein, 690 aa, Homo sapiens; identical to SEQ ID NO: 557

SEQ ID NO: 4852 - DNA, 4872 bp, Homo sapiens
gttatggcgattgggcggctgcagagaccaggactcagttcccctgccctagtctgagcctagtgggtgggactcagctcagagtcagttttccagaagcaggtttcagtgcagagttttcctacacttttcctgcgctagagcagcgagcagcctggaacagacccaggcggaggacacctgtgggggagggagcgcctggaggagcttagagaccccagccgggcgtgatctcaccatggtgcgttttggctgctactttctttttcagtctttcggtgcggagaaggggaggaggcgggcagaggtctgaaaaaatcgaatgccttatggaaaggaactgcaagggttcctttggggtgatcaaagagggagacacagacacagagagacaaaggcaaggaggactgtctgggagccacgcgggcgatacagtttccgaggcacgccgcgtcccgcctagcctgttgaacaggtagacatgagcgacccaagctgcggatttgcgaggcgcgccctggagctgctagagatccggaagcacagccccgaggtgtgcgaagccaccaaacatcccagttaccagtgtccttgaattgatagtggcttctgtttgtcagtctcatataagaactacagctcatcaggaggagatcgcagcagggtaagagacaccaacaccatgttctgcacgaagctcaaggatctcaagatcacaggagagtgtcctttctccttactggcaccaggtcaagttcctaacgagtcttcagaggaggcagcaggaagctcagagagctgcaaagcaaccgtgcccatctgtcaagacattcctgagaagaacatacaagaaagtcttcctcaaagaaaaaccagtcggagccgagtctatcttcacactttggcagagagtatttgcaaactgattttcccagagtttgaacggctgaatgttgcacttcagagaacattggcaaagcacaaaataaaagaaagcaggaaatctttggaaagagaagactttgaaaaaacaattgcagagcaagcagttgcagcaggagttccagtggaggttatcaaagaatctcttggtgaagaggtttttaaaatatgttacgaggaagatgaaaacatccttggggtggttggaggcacccttaaagattttttaaacagcttcagtacccttctgaaacagagcagccattgccaagaagcaggaaaaaggggcaggcttgaggacgcctccattctatgcctggataaggaggatgattttctacatgtttactacttcttccctaagagaaccacctccctgattcttcccggcatcataaaggcagctgctcacgtattatatgaaacggaagtggaagtgtcgttaatgcctccctgcttccataatgattgcagcgagtttgtgaatcagccctacttgttgtactccgttcacatgaaaagcaccaagccatccctgtcccccagcaaaccccagtcctcgctggtgattcccacatcgctattctgcaagacatttccattccatttcatgtttgacaaagatatgacaattctgcaatttggcaatggcatcagaaggctgatgaacaggagagactttcaaggaaagcctaattttgaagaatactttgaaattctgactccaaaaatcaaccagacgtttagcgggatcatgactatgttgaatatgcagtttgttgtacgagtgaggagatgggacaactctgtgaaaaaatcttcaagggttatggacctcaaaggccaaatgatctacattgttgaatccagtgcaatcttgtttttggggtcaccctgtgtggacagattagaagattttacaggacgagggctctacctctcagacatcccaattcacaatgcactgagggatgtggtcttaataggggaacaagcccgagctcaagatggcctgaagaagaggctggggaagctgaaggctacccttgagcaagcccaccaagccctggaggaggagaagaaaaagacagtagaccttctgtgctccatatttccctgtgaggttgctcagcagctgtggcaagggcaagttgtgcaagccaagaagttcagtaatgtcaccatgctcttctcagacatcgttgggttcactgccatctgctcccagtgctcaccgctgcaggtcatcaccatgctcaatgcactgtacactcgcttcgaccagcagtgtggagagctggatgtctacaaggtggagaccattggcgatgcctattgtgtagctgggggattacacaaagagagtgatactcatgctgttcagatagcgctgatggccctgaagatgatggagctctctgatgaagttatgtctccccatggagaacctatcaagatgcgaattggactgcactctggatcagtttttgctggcgtcgttggagttaaaatgccccgttactgtctttttggaaacaatgtcactctggctaacaaatttgagtcctgcagtgtaccacgaaaaatcaatgtcagcccaacaacttacagattactcaaagactgtcctggtttcgtgtttacccctcgatcaagggaggaacttccaccaaacttccctagtgaaatccccggaatctgccattttctggatgcttaccaacaaggaacaaactcaaaaccatgcttccaaaagaaagatgtggaagatggcaatgccaattttttaggcaaagcatcaggaatagattagcaacctatatacctatttataagtctttggggtttgactcattgaagatgtgtagagcctctgaaagcactttagggattgtagatggctaacaagcagtattaaaatttcaggagccaagtcacaatctttctcctgtttaacatgacaaaatgtatgtactcacttcagtacttcagctcttcaagaaaaaaaaaaaaaaccttaaaaagctacttttgtgggagtatttctattatataaccagcacttactacctgtactcaaaattcagcaccttgtacatatatcagataattgtagtcaattgtacaaactgatggagtcacctgcaatctcatatcctggtggaatgccatggttattaaagtgtgtttgtgatagtgtcgtcaaaaaaaaggtttttgaatagaaattacattctttgacaccctcagttctttcaaactttcaactctgcattttattgcattttctcatttaactgttagtatatgtttgaatataggctgactttttttctctattgcactttcttctttttttctttttagaaaataagcaattaggggttagatgcaatatgaatataaaatagttctgtaaataccaaatattatttttagttctggaagttaaaaatactctccatagtaacgtgtgttataataataaatatttcttttgtttgacttttttaaaattctacaatggtaaaagctattttaatccatgttagcaatttaattcctattaattcattttactatcataatagcaaagtattcagaataaaagaggtttatatcttctattaaaatgcagtaatactattcaaatctaatttagctggaagcaacatgggagtaaagtaatcatccaggggacccaccataaaggacattggtaaaacatttacacacgtaaacacacgtgcaggcacacttggaacaatatggacccacttcagcagacatcttctattgccatgctgagctgtttaaagttttaagaagaaaatctaagtatggaagtagaaaataagacttgttcttttggtggatatctcatttttcttgagtatttgtgctgaacattttggtgtatgtctatgaactaagaatcaagtttttgtctcattaaatatacatatatgaagtgtttttattctacttgaaatatcttgacttaaaaaaaacgactgttagtattgatgaagcaaatgaggcagtgactacattatggaaatgtctaagtattttttccggaacttcaactttttctttttgttttacataaacatttaagcagctaggaacttttagttttagttaggtcagttgaagttctctggtgaactaaaaaatctacattttggttggggataaagatttgattttaaaaacagcttgaatttaaagcaagaaaaagatgaacgttatagttttaaaatcaatattagcagagccatagataggctgagctcttatttggggttctgagaaataactcagtttaaaacttctttaactgcctcccttagtacccaggctagcccatggtgacatcagggatattcattactgattggcctctagtattccaagggtactactatagatattacaatgatgctgtttactaagtgataaccccgtatcttacaggactgactttgactcaataaaccactcagcctattattggaaagtgccataggccttgagaaagtatagttacatcctcacaaatatatgaagttaagtcactacttacaaggaaaaaaaatgtaaatacatttttctttctggaaccgaactcttattatggggaaataatagaaataaagaaaatgtaaaagcatgaaatggaatgtagtcttgatcaaacatttcagcagacctcaatttgcttacaatctgtactcaaaaagtttataattcaatcagaattcaaaaagtattttgtgtgtttgtgatgtattagcatatacacaaaacaaatgaggggaatgtatataatcttggtgaaaagttgtatgggagttttttgtacgattcctgcaacttttctataaacgtggcattatatctaaataaaaaattaccaaaaaacat

SEQ ID NO: 4853 - protein, 690 aa, Homo sapiens; identical to SEQ ID NO: 557

SEQ ID NO: 4854 - DNA, 5075 bp, Homo sapiens
gttatggcgattgggcggctgcagagaccaggactcagttcccctgccctagtctgagcctagtgggtgggactcagctcagagtcagttttccagaagcaggtttcagtgcagagttttcctacacttttcctgcgctagagcagcgagcagcctggaacagacccaggcggaggacacctgtgggggagggagcgcctggaggagcttagagaccccagccgggcgtgatctcaccatggtgcgttttggctgctactttctttttcagtctttcggtgcggagaaggggaggaggcgggcagaggtctgaaaaaatcgaatgccttatggaaaggaactgcaagggttcctttggggtgatcaaagagggagacacagacacagagagacaaaggcaaggaggactgtctgggagccacgcgggcgatacagtttccgaggcacgccgcgtcccgcctagcctgttgaacaggtagacatgagcgacccaagctgcggatttgcgaggcgcgccctggagctgctagagatccggaagcacagccccgaggtgtgcgaagccaccaatctcatataagaactacagctcatcaggaggagatcgcagcagggtaagagacaccaacaccatgttctgcacgaagctcaaggatctcaagatcacaggagagtgtcctttctccttactggcaccaggtcaagttcctaacgagtcttcagaggaggcagcaggaagctcagagagctgcaaagcaaccgtgcccatctgtcaagacattcctgagaagaacatacaagaaagtcttcctcaaagaaaaaccagtcggagccgagtctatcttcacactttggcagagagtatttgcaaactgattttcccagagtttgaacggctgaatgttgcacttcagagaacattggcaaagcacaaaataaaagaaagcaggaaatctttggaaagagaagactttgaaaaaacaattgcagagcaagcagttgcagcaggagttccagtggaggttatcaaagaatctcttggtgaagaggtttttaaaatatgttacgaggaagatgaaaacatccttggggtggttggaggcacccttaaagattttttaaacagcttcagtacccttctgaaacagagcagccattgccaagaagcaggaaaaaggggcaggcttgaggacgcctccattctatgcctggataaggaggatgattttctacatgtttactacttcttccctaagagaaccacctccctgattcttcccggcatcataaaggcagctgctcacgtattatatgaaacggaagtggaagtgtcgttaatgcctccctgcttccataatgattgcagcgagtttgtgaatcagccctacttgttgtactccgttcacatgaaaagcaccaagccatccctgtcccccagcaaaccccagtcctcgctggtgattcccacatcgctattctgcaagacatttccattccatttcatgtttgacaaagatatgacaattctgcaatttggcaatggcatcagaaggctgatgaacaggagagactttcaaggaaagcctaattttgaagaatactttgaaattctgactccaaaaatcaaccagacgtttagcgggatcatgactatgttgaatatgcagtttgttgtacgagtgaggagatgggacaactctgtgaaaaaatcttcaagggttatggacctcaaaggccaaatgatctacattgttgaatccagtgcaatcttgtttttggggtcaccctgtgtggacagattagaagattttacaggacgagggctctacctctcagacatcccaattcacaatgcactgagggatgtggtcttaataggggaacaagcccgagctcaagatggcctgaagaagaggctggggaagctgaaggctacccttgagcaagcccaccaagccctggaggaggagaagaaaaagacagtagaccttctgtgctccatatttccctgtgaggttgctcagcagctgtggcaagggcaagttgtgcaagccaagaagttcagtaatgtcaccatgctcttctcagacatcgttgggttcactgccatctgctcccagtgctcaccgctgcaggtcatcaccatgctcaatgcactgtacactcgcttcgaccagcagtgtggagagctggatgtctacaaggtggagaccattggcgatgcctattgtgtagctgggggattacacaaagagagtgatactcatgctgttcagatagcgctgatggccctgaagatgatggagctctctgatgaagttatgtctccccatggagaacctatcaagatgcgaattggactgcactctggatcagtttttgctggcgtcgttggagttaaaatgccccgttactgtctttttggaaacaatgtcactctggctaacaaatttgagtcctgcagtgtaccacgaaaaatcaatgtcagcccaacaacttacagattactcaaagactgtcctggtttcgtgtttacccctcgatcaagggaggaacttccaccaaacttccctagtgaaatccccggaatctgccattttctggatgcttaccaacaaggaacaaactcaaaaccatgcttccaaaagaaagatgtggaagatggcaatgccaattttttaggcaaagcatcaggaatagattagcaacctatatacctatttataagtctttggggtttgactcattgaagatgtgtagagcctctgaaagcactttagggattgtagatggctaacaagcagtattaaaatttcaggagccaagtcacaatctttctcctgtttaacatgacaaaatgtatgtactcacttcagtacttcagctcttcaagaaaaaaaaaaaaaaccttaaaaagctacttttgtgggagtatttctattatataaccagcacttactacctgtactcaaaattcagcaccttgtacatatatcagataattgtagtcaattgtacaaactgatggagtcacctgcaatctcatatcctggtggaatgccatggttattaaagtgtgtttgtgatagtgtcgtcaaaaaaaaggtttttgaatagaaattacattctttgacaccctcagttctttcaaactttcaactctgcattttattgcattttctcatttaactgttagtatatgtttgaatataggctgactttttttctctattgcactttcttctttttttctttttagaaaataagcaattaggggttagatgcaatatgaatataaaatagttctgtaaataccaaatattatttttagttctggaagttaaaaatactctccatagtaacgtgtgttataataataaatatttcttttgtttgacttttttaaaattctacaatggtaaaagctattttaatccatgttagcaatttaattcctattaattcattttactatcataatagcaaagtattcagaataaaagaggtttatatcttctattaaaatgcagtaatactattcaaatctaatttagctggaagcaacatgggagtaaagtaatcatccaggggacccaccataaaggacattggtaaaacatttacacacgtaaacacacgtgcaggcacacttggaacaatatggacccacttcagcagacatcttctattgccatgctgagctgtttaaagttttaagaagaaaatctaagtatggaagtagaaaataagacttgttcttttggtggatatctcatttttcttgagtatttgtgctgaacattttggtgtatgtctatgaactaagaatcaagtttttgtctcattaaatatacatatatgaagtgtttttattctacttgaaatatcttgacttaaaaaaaacgactgttagtattgatgaagcaaatgaggcagtgactacattatggaaatgtctaagtattttttccggaacttcaactttttctttttgttttacataaacatttaagcagctaggaacttttagttttagttaggtcagttgaagttctctggtgaactaaaaaatctacattttggttggggataaagatttgattttaaaaacagcttgaatttaaagcaagaaaaagatgaacgttatagttttaaaatcaatattagcagagccatagataggctgagctcttatttggggttctgagaaataactcagtttaaaacttctttaactgcctcccttagtacccaggctagcccatggtgacatcagggatattcattactgattggcctctagtattccaagggtactactatagatattacaatgatgctgtttactaagtgataaccccgtatcttacaggactgactttgactcaataaaccactcagcctattattggaaagtgccataggccttgagaaagtatagttacatcctcacaaatatatgaagttaagtcactacttacaaggaaaaaaaatgtaaatacatttttctttctggaaccgaactcttattatggggaaataatagaaataaagaaaatgtaaaagcatgaaatggaatgtagtcttgatcaaacatttcagcagacctcaatttgcttacaatctgtactcaaaaagtttataattcaatcagaattcaaaaagtattttgtgtgtttgtgatgtattagcatatacacaaaacaaatgaggggaatgtatataatcttggtgaaaagttgtatgggagttttttgtacgattcctgcaacttttctataaacgtggcattatatctaaataaaaaattaccaaaaaacatattttcacagtgaagttaaatcatctgtgataggttccccagaccagcctacaaaggcccattaaatacagaataatttgtggatcttcaaagaggatgaacatacatttccatgacagagtccatacgaaattcacaatttagatgctaaaaaatttaaggaatatctttttttctctatcttatctgctttgaagcatagcgattagcgagaaacttttcagatccagaccactgatggtagccagagtag

SEQ ID NO: 4855 - protein, 690 aa, Homo sapiens; identical to SEQ ID NO: 557

SEQ ID NO: 4856 - DNA, 2984 bp, Homo sapiens
ttatggcgattgggcggctgcagagaccaggactcagttcccctgccctagtctgagcctagtgggtgggactcagctcagagtcagttttccagaagcaggtttcagtgcagagttttcctacacttttcctgcgctagagcagcgagcagcctggaacagacccaggcggaggacacctgtgggggagggagcgcctggaggagcttagagaccccagccgggcgtgatctcaccatgtgcggatttgcgaggcgcgccctggagctgctagagatccggaagcacagccccgaggtgtgcgaagccaccaagactgcggctcttggagaaagcgtgagcagggggccaccgcggtctccgcgcctgtctgcaccctgtcgcctgagctgcctgacagtgacaatgacatcccagttaccagtgtccttgaattgatagtggcttctgtttgtcagtctcatataagaactacagctcatcaggaggagatcgcagcagggtaagagacaccaacaccatgttctgcacgaagctcaaggatctcaagatcacaggagagtgtcctttctccttactggcaccaggtcaagttcctaacgagtcttcagaggaggcagcaggaagctcagagagctgcaaagcaaccgtgcccatctgtcaagacattcctgagaagaacatacaagaaagtcttcctcaaagaaaaaccagtcggagccgagtctatcttcacactttggcagagagtatttgcaaactgattttcccagagtttgaacggctgaatgttgcacttcagagaacattggcaaagcacaaaataaaagaaagcaggaaatctttggaaagagaagactttgaaaaaacaattgcagagcaagcagttgcagcaggagttccagtggaggttatcaaagaatctcttggtgaagaggtttttaaaatatgttacgaggaagatgaaaacatccttggggtggttggaggcacccttaaagattttttaaacagcttcagtacccttctgaaacagagcagccattgccaagaagcaggaaaaaggggcaggcttgaggacgcctccattctatgcctggataaggaggatgattttctacatgtttactacttcttccctaagagaaccacctccctgattcttcccggcatcataaaggcagctgctcacgtattatatgaaacggaagtggaagtgtcgttaatgcctccctgcttccataatgattgcagcgagtttgtgaatcagccctacttgttgtactccgttcacatgaaaagcaccaagccatccctgtcccccagcaaaccccagtcctcgctggtgattcccacatcgctattctgcaagacatttccattccatttcatgtttgacaaagatatgacaattctgcaatttggcaatggcatcagaaggctgatgaacaggagagactttcaaggaaagcctaattttgaagaatactttgaaattctgactccaaaaatcaaccagacgtttagcgggatcatgactatgttgaatatgcagtttgttgtacgagtgaggagatgggacaactctgtgaaaaaatcttcaagggttatggacctcaaaggccaaatgatctacattgttgaatccagtgcaatcttgtttttggggtcaccctgtgtggacagattagaagattttacaggacgagggctctacctctcagacatcccaattcacaatgcactgagggatgtggtcttaataggggaacaagcccgagctcaagatggcctgaagaagaggctggggaagctgaaggctacccttgagcaagcccaccaagccctggaggaggagaagaaaaagacagtagaccttctgtgctccatatttccctgtgaggttgctcagcagctgtggcaagggcaagttgtgcaagccaagaagttcagtaatgtcaccatgctcttctcagacatcgttgggttcactgccatctgctcccagtgctcaccgctgcaggtcatcaccatgctcaatgcactgtacactcgcttcgaccagcagtgtggagagctggatgtctacaaggtggagaccattggcgatgcctattgtgtagctgggggattacacaaagagagtgatactcatgctgttcagatagcgctgatggccctgaagatgatggagctctctgatgaagttatgtctccccatggagaacctatcaagatgcgaattggactgcactctggatcagtttttgctggcgtcgttggagttaaaatgccccgttactgtctttttggaaacaatgtcactctggctaacaaatttgagtcctgcagtgtaccacgaaaaatcaatgtcagcccaacaacttacagattactcaaagactgtcctggtttcgtgtttacccctcgatcaagggaggaacttccaccaaacttccctagtgaaatccccggaatctgccattttctggatgcttaccaacaaggaacaaactcaaaaccatgcttccaaaagaaagatgtggaagatggcaatgccaattttttaggcaaagcatcaggaatagattagcaacctatatacctatttataagtctttggggtttgactcattgaagatgtgtagagcctctgaaagcactttagggattgtagatggctaacaagcagtattaaaatttcaggagccaagtcacaatctttctcctgtttaacatgacaaaatgtatgtactcacttcagtacttcagctcttcaagaaaaaaaaaaaaaaccttaaaaagctacttttgtgggagtatttctattatataaccagcacttactacctgtactcaaaattcagcaccttgtacatatatcagataattgtagtcaattgtacaaactgatggagtcacctgcaatctcatatcctggtggaatgccatggttattaaagtgtgtttgtgatagtgtcgtc

SEQ ID NO: 4857 - protein, 690 aa, Homo sapiens; identical to SEQ ID NO: 557

SEQ ID NO: 4858 - DNA, 4572 bp, Homo sapiens
gacgggggtgggcgccgagcagcgccgcgccggctgctgagctcgcggggccgggccgtgagaacgcgcggggcgcgccggggccgctggtctcccacggccagggcgcctgggccccagagcccatcagccgcgtgcagcgctgcggcctccggcgcgccggcaggcaagcgagcgggcgcagctgggggatgcctggaccccggaggcagcagggctggaggcggtggcgggcttcagggcaacttcacccggccggctgcggcgtggacatcccagttaccagtgtccttgaattgatagtggcttctgtttgtcagtctcatataagaactacagctcatcaggaggagatcgcagcagggtaagagacaccaacaccatgttctgcacgaagctcaaggatctcaagatcacaggagagtgtcctttctccttactggcaccaggtcaagttcctaacgagtcttcagaggaggcagcaggaagctcagagagctgcaaagcaaccgtgcccatctgtcaagacattcctgagaagaacatacaagaaagtcttcctcaaagaaaaaccagtcggagccgagtctatcttcacactttggcagagagtatttgcaaactgattttcccagagtttgaacggctgaatgttgcacttcagagaacattggcaaagcacaaaataaaagaaagcaggaaatctttggaaagagaagactttgaaaaaacaattgcagagcaagcagttgcagcaggagttccagtggaggttatcaaagaatctcttggtgaagaggtttttaaaatatgttacgaggaagatgaaaacatccttggggtggttggaggcacccttaaagattttttaaacagcttcagtacccttctgaaacagagcagccattgccaagaagcaggaaaaaggggcaggcttgaggacgcctccattctatgcctggataaggaggatgattttctacatgtttactacttcttccctaagagaaccacctccctgattcttcccggcatcataaaggcagctgctcacgtattatatgaaacggaagtggaagtgtcgttaatgcctccctgcttccataatgattgcagcgagtttgtgaatcagccctacttgttgtactccgttcacatgaaaagcaccaagccatccctgtcccccagcaaaccccagtcctcgctggtgattcccacatcgctattctgcaagacatttccattccatttcatgtttgacaaagatatgacaattctgcaatttggcaatggcatcagaaggctgatgaacaggagagactttcaaggaaagcctaattttgaagaatactttgaaattctgactccaaaaatcaaccagacgtttagcgggatcatgactatgttgaatatgcagtttgttgtacgagtgaggagatgggacaactctgtgaaaaaatcttcaagggttatggacctcaaaggccaaatgatctacattgttgaatccagtgcaatcttgtttttggggtcaccctgtgtggacagattagaagattttacaggacgagggctctacctctcagacatcccaattcacaatgcactgagggatgtggtcttaataggggaacaagcccgagctcaagatggcctgaagaagaggctggggaagctgaaggctacccttgagcaagcccaccaagccctggaggaggagaagaaaaagacagtagaccttctgtgctccatatttccctgtgaggttgctcagcagctgtggcaagggcaagttgtgcaagccaagaagttcagtaatgtcaccatgctcttctcagacatcgttgggttcactgccatctgctcccagtgctcaccgctgcaggtcatcaccatgctcaatgcactgtacactcgcttcgaccagcagtgtggagagctggatgtctacaaggtggagaccattggcgatgcctattgtgtagctgggggattacacaaagagagtgatactcatgctgttcagatagcgctgatggccctgaagatgatggagctctctgatgaagttatgtctccccatggagaacctatcaagatgcgaattggactgcactctggatcagtttttgctggcgtcgttggagttaaaatgccccgttactgtctttttggaaacaatgtcactctggctaacaaatttgagtcctgcagtgtaccacgaaaaatcaatgtcagcccaacaacttacagattactcaaagactgtcctggtttcgtgtttacccctcgatcaagggaggaacttccaccaaacttccctagtgaaatccccggaatctgccattttctggatgcttaccaacaaggaacaaactcaaaaccatgcttccaaaagaaagatgtggaagatggcaatgccaattttttaggcaaagcatcaggaatagattagcaacctatatacctatttataagtctttggggtttgactcattgaagatgtgtagagcctctgaaagcactttagggattgtagatggctaacaagcagtattaaaatttcaggagccaagtcacaatctttctcctgtttaacatgacaaaatgtatgtactcacttcagtacttcagctcttcaagaaaaaaaaaaaaaaccttaaaaagctacttttgtgggagtatttctattatataaccagcacttactacctgtactcaaaattcagcaccttgtacatatatcagataattgtagtcaattgtacaaactgatggagtcacctgcaatctcatatcctggtggaatgccatggttattaaagtgtgtttgtgatagtgtcgtcaaaaaaaaggtttttgaatagaaattacattctttgacaccctcagttctttcaaactttcaactctgcattttattgcattttctcatttaactgttagtatatgtttgaatataggctgactttttttctctattgcactttcttctttttttctttttagaaaataagcaattaggggttagatgcaatatgaatataaaatagttctgtaaataccaaatattatttttagttctggaagttaaaaatactctccatagtaacgtgtgttataataataaatatttcttttgtttgacttttttaaaattctacaatggtaaaagctattttaatccatgttagcaatttaattcctattaattcattttactatcataatagcaaagtattcagaataaaagaggtttatatcttctattaaaatgcagtaatactattcaaatctaatttagctggaagcaacatgggagtaaagtaatcatccaggggacccaccataaaggacattggtaaaacatttacacacgtaaacacacgtgcaggcacacttggaacaatatggacccacttcagcagacatcttctattgccatgctgagctgtttaaagttttaagaagaaaatctaagtatggaagtagaaaataagacttgttcttttggtggatatctcatttttcttgagtatttgtgctgaacattttggtgtatgtctatgaactaagaatcaagtttttgtctcattaaatatacatatatgaagtgtttttattctacttgaaatatcttgacttaaaaaaaacgactgttagtattgatgaagcaaatgaggcagtgactacattatggaaatgtctaagtattttttccggaacttcaactttttctttttgttttacataaacatttaagcagctaggaacttttagttttagttaggtcagttgaagttctctggtgaactaaaaaatctacattttggttggggataaagatttgattttaaaaacagcttgaatttaaagcaagaaaaagatgaacgttatagttttaaaatcaatattagcagagccatagataggctgagctcttatttggggttctgagaaataactcagtttaaaacttctttaactgcctcccttagtacccaggctagcccatggtgacatcagggatattcattactgattggcctctagtattccaagggtactactatagatattacaatgatgctgtttactaagtgataaccccgtatcttacaggactgactttgactcaataaaccactcagcctattattggaaagtgccataggccttgagaaagtatagttacatcctcacaaatatatgaagttaagtcactacttacaaggaaaaaaaatgtaaatacatttttctttctggaaccgaactcttattatggggaaataatagaaataaagaaaatgtaaaagcatgaaatggaatgtagtcttgatcaaacatttcagcagacctcaatttgcttacaatctgtactcaaaaagtttataattcaatcagaattcaaaaagtattttgtgtgtttgtgatgtattagcatatacacaaaacaaatgaggggaatgtatataatcttggtgaaaagttgtatgggagttttttgtacgattcctgcaacttttctataaacgtggcattatatctaaataaaaaattaccaaaaaacat

SEQ ID NO: 4859 - protein, 690 aa, Homo sapiens; identical to SEQ ID NO: 557

SEQ ID NO: 4860 - DNA, 4825 bp, Homo sapiens
gacgggggtgggcgccgagcagcgccgcgccggctgctgagctcgcggggccgggccgtgagaacgcgcggggcgcgccggggccgctggtctcccacggccagggcgcctgggccccagagcccatcagccgcgtgcagcgctgcggcctccggcgcgccggcaggcaagcgagcgggcgcagctgggggatgcctggaccccggaggcagcagggctggaggcggtggcgggcttcagggcaacttcacccggccggctgcggcgtggacatcccagttaccagtgtccttgaattgatagtggcttctgtttgtcagtctcatataagaactacagctcatcaggaggagatcgcagcagggtaagagacaccaacaccatgttctgcacgaagctcaaggatctcaagatcacaggagagtgtcctttctccttactggcaccaggtcaagttcctaacgagtcttcagaggaggcagcaggaagctcagagagctgcaaagcaaccgtgcccatctgtcaagacattcctgagaagaacatacaagaaagtcttcctcaaagaaaaaccagtcggagccgagtctatcttcacactttggcagagagtatttgcaaactgattttcccagagtttgaacggctgaatgttgcacttcagagaacattggcaaagcacaaaataaaagaaagcaggaaatctttggaaagagaagactttgaaaaaacaattgcagagcaagcagttgcagcaggagttccagtggaggttatcaaagaatctcttggtgaagaggtttttaaaatatgttacgaggaagatgaaaacatccttggggtggttggaggcacccttaaagattttttaaacagcttcagtacccttctgaaacagagcagccattgccaagaagcaggaaaaaggggcaggcttgaggacgcctccattctatgcctggataaggaggatgattttctacatgtttactacttcttccctaagagaaccacctccctgattcttcccggcatcataaaggcagctgctcacgtattatatgaaacggaagtggaagtgtcgttaatgcctccctgcttccataatgattgcagcgagtttgtgaatcagccctacttgttgtactccgttcacatgaaaagcaccaagccatccctgtcccccagcaaaccccagtcctcgctggtgattcccacatcgctattctgcaagacatttccattccatttcatgtttgacaaagatatgacaattctgcaatttggcaatggcatcagaaggctgatgaacaggagagactttcaaggaaagcctaattttgaagaatactttgaaattctgactccaaaaatcaaccagacgtttagcgggatcatgactatgttgaatatgcagtttgttgtacgagtgaggagatgggacaactctgtgaaaaaatcttcaagggttatggacctcaaaggccaaatgatctacattgttgaatccagtgcaatcttgtttttggggtcaccctgtgtggacagattagaagattttacaggacgagggctctacctctcagacatcccaattcacaatgcactgagggatgtggtcttaataggggaacaagcccgagctcaagatggcctgaagaagaggctggggaagctgaaggctacccttgagcaagcccaccaagccctggaggaggagaagaaaaagacagtagaccttctgtgctccatatttccctgtgaggttgctcagcagctgtggcaagggcaagttgtgcaagccaagaagttcagtaatgtcaccatgctcttctcagacatcgttgggttcactgccatctgctcccagtgctcaccgctgcaggtcatcaccatgctcaatgcactgtacactcgcttcgaccagcagtgtggagagctggatgtctacaaggtggagaccattggcgatgcctattgtgtagctgggggattacacaaagagagtgatactcatgctgttcagatagcgctgatggccctgaagatgatggagctctctgatgaagttatgtctccccatggagaacctatcaagatgcgaattggactgcactctggatcagtttttgctggcgtcgttggagttaaaatgccccgttactgtctttttggaaacaatgtcactctggctaacaaatttgagtcctgcagtgtaccacgaaaaatcaatgtcagcccaacaacttacagattactcaaagactgtcctggtttcgtgtttacccctcgatcaagggaggaacttccaccaaacttccctagtgaaatccccggaatctgccattttctggatgcttaccaacaaggaacaaactcaaaaccatgcttccaaaagaaagatgtggaagatggcaatgccaattttttaggcaaagcatcaggaatagattagcaacctatatacctatttataagtctttggggtttgactcattgaagatgtgtagagcctctgaaagcactttagggattgtagatggctaacaagcagtattaaaatttcaggagccaagtcacaatctttctcctgtttaacatgacaaaatgtatgtactcacttcagtacttcagctcttcaagaaaaaaaaaaaaaaccttaaaaagctacttttgtgggagtatttctattatataaccagcacttactacctgtactcaaaattcagcaccttgtacatatatcagataattgtagtcaattgtacaaactgatggagtcacctgcaatctcatatcctggtggaatgccatggttattaaagtgtgtttgtgatagtgtcgtcaaaaaaaaggtttttgaatagaaattacattctttgacaccctcagttctttcaaactttcaactctgcattttattgcattttctcatttaactgttagtatatgtttgaatataggctgactttttttctctattgcactttcttctttttttctttttagaaaataagcaattaggggttagatgcaatatgaatataaaatagttctgtaaataccaaatattatttttagttctggaagttaaaaatactctccatagtaacgtgtgttataataataaatatttcttttgtttgacttttttaaaattctacaatggtaaaagctattttaatccatgttagcaatttaattcctattaattcattttactatcataatagcaaagtattcagaataaaagaggtttatatcttctattaaaatgcagtaatactattcaaatctaatttagctggaagcaacatgggagtaaagtaatcatccaggggacccaccataaaggacattggtaaaacatttacacacgtaaacacacgtgcaggcacacttggaacaatatggacccacttcagcagacatcttctattgccatgctgagctgtttaaagttttaagaagaaaatctaagtatggaagtagaaaataagacttgttcttttggtggatatctcatttttcttgagtatttgtgctgaacattttggtgtatgtctatgaactaagaatcaagtttttgtctcattaaatatacatatatgaagtgtttttattctacttgaaatatcttgacttaaaaaaaacgactgttagtattgatgaagcaaatgaggcagtgactacattatggaaatgtctaagtattttttccggaacttcaactttttctttttgttttacataaacatttaagcagctaggaacttttagttttagttaggtcagttgaagttctctggtgaactaaaaaatctacattttggttggggataaagatttgattttaaaaacagcttgaatttaaagcaagaaaaagatgaacgttatagttttaaaatcaatattagcagagccatagataggctgagctcttatttggggttctgagaaataactcagtttaaaacttctttaactgcctcccttagtacccaggctagcccatggtgacatcagggatattcattactgattggcctctagtattccaagggtactactatagatattacaatgatgctgtttactaagtgataaccccgtatcttacaggactgactttgactcaataaaccactcagcctattattggaaagtgccataggccttgagaaagtatagttacatcctcacaaatatatgaagttaagtcactacttacaaggaaaaaaaatgtaaatacatttttctttctggaaccgaactcttattatggggaaataatagaaataaagaaaatgtaaaagcatgaaatggaatgtagtcttgatcaaacatttcagcagacctcaatttgcttacaatctgtactcaaaaagtttataattcaatcagaattcaaaaagtattttgtgtgtttgtgatgtattagcatatacacaaaacaaatgaggggaatgtatataatcttggtgaaaagttgtatgggagttttttgtacgattcctgcaacttttctataaacgtggcattatatctaaataaaaaattaccaaaaaacatattttcacagtgaagttaaatcatctgtgataggttccccagaccagcctacaaaggcccattaaatacagaataatttgtggatcttcaaagaggatgaacatacatttccatgacagagtccatacgaaattcacaatttagatgctaaaaaatttaaggaatatctttttttctctatcttatctgctttgaagcatagcgattagcgagaaacttttcagatccagaccactgatggtagccagagtag

SEQ ID NO: 4861 - protein, 690 aa, Homo sapiens; identical to SEQ ID NO: 557

SEQ ID NO: 4862 - DNA, 522 bp, Homo sapiens
cccttctgaaacagagcagccattgccaagaagcaggaaaaaggggcaggcttgaggacgcctccattctatgcctggataaggaggatgattttctacatgtttactacttcttccctaagagaaccacctccctgattcttcccggcatcataaaggcagctgctcacgtattatatgaaacggaagtggaagtgtcgttaatgcctccctgcttccataatgattgcagcgagtttgtgaatcagccctacttgttgtactccgttcacatgaaaagcaccaagccatccctgtcccccagcaaaccccagtcctcaatttgcttacaatctgtactcaaaaagtttataattcaatcagaattcaaaaagtattttgtgtgtttgtgatgtattagcatatacacaaaacaaatgaggggaatgtatataatcttggtgaaaagttgtatgggagttttttgtacgattcctgcaacttttctataaacgtggcattatatctaaataaaaaattacc

SEQ ID NO: 4863 - protein, 62 aa, Homo sapiens
MPPCFHNDCSEFVNQPYLLYSVHMKSTKPSLSPSKPQSSICLQSVLKKFIIQSEFKKYFVCL

SEQ ID NO: 4864 - DNA, 2849 bp, Homo sapiens
catctgctcccagtgctcaccgctgcaggtcatcaccatgctcaatgcactgtacactcgcttcgaccagcagtgtggagagctggatgtctacaaggtaggagtggaccagggaaataattgttttaccagcaaactcactggggaacaagcactgtgcctaggacctgaattataatgcaactgaaaggccacctctgtagggtcttgcaagcccagtcctgggagcaggtggagaccattggcgatgcctattgtgtagctgggggattacacaaagagagtgatactcatgctgttcagatagcgctgatggccctgaagatgatggagctctctgatgaagttatgtctccccatggagaacctatcaagatgcgaattggactgcactctggatcagtttttgctggcgtcgttggagttaaaatgccccgttactgtctttttggaaacaatgtcactctggctaacaaatttgagtcctgcagtgtaccacgaaaaatcaatgtcagcccaacaacttacagattactcaaagactgtcctggtttcgtgtttacccctcgatcaagggaggaacttccaccaaacttccctagtgaaatccccggaatctgccattttctggatgcttaccaacaaggaacaaactcaaaaccatgcttccaaaagaaagatgtggaagatggcaatgccaattttttaggcaaagcatcaggaatagattagcaacctatatacctatttataagtctttggggtttgactcattgaagatgtgtagagcctctgaaagcactttagggattgtagatggctaacaagcagtattaaaatttcaggagccaagtcacaatctttctcctgtttaacatgacaaaatgtatgtactcacttcagtacttcagctcttcaagaaaaaaaaaaaaaaccttaaaaagctacttttgtgggagtatttctattatataaccagcacttactacctgtactcaaaattcagcaccttgtacatatatcagataattgtagtcaattgtacaaactgatggagtcacctgcaatctcatatcctggtggaatgccatggttattaaagtgtgtttgtgatagtgtcgtcaaaaaaaaggtttttgaatagaaattacattctttgacaccctcagttctttcaaactttcaactctgcattttattgcattttctcatttaactgttagtatatgtttgaatataggctgactttttttctctattgcactttcttctttttttctttttagaaaataagcaattaggggttagatgcaatatgaatataaaatagttctgtaaataccaaatattatttttagttctggaagttaaaaatactctccatagtaacgtgtgttataataataaatatttcttttgtttgacttttttaaaattctacaatggtaaaagctattttaatccatgttagcaatttaattcctattaattcattttactatcataatagcaaagtattcagaataaaagaggtttatatcttctattaaaatgcagtaatactattcaaatctaatttagctggaagcaacatgggagtaaagtaatcatccaggggacccaccataaaggacattggtaaaacatttacacacgtaaacacacgtgcaggcacacttggaacaatatggacccacttcagcagacatcttctattgccatgctgagctgtttaaagttttaagaagaaaatctaagtatggaagtagaaaataagacttgttcttttggtggatatctcatttttcttgagtatttgtgctgaacattttggtgtatgtctatgaactaagaatcaagtttttgtctcattaaatatacatatatgaagtgtttttattctacttgaaatatcttgacttaaaaaaaacgactgttagtattgatgaagcaaatgaggcagtgactacattatggaaatgtctaagtattttttccggaacttcaactttttctttttgttttacataaacatttaagcagctaggaacttttagttttagttaggtcagttgaagttctctggtgaactaaaaaatctacattttggttggggataaagatttgattttaaaaacagcttgaatttaaagcaagaaaaagatgaacgttatagttttaaaatcaatattagcagagccatagataggctgagctcttatttggggttctgagaaataactcagtttaaaacttctttaactgcctcccttagtacccaggctagcccatggtgacatcagggatattcattactgattggcctctagtattccaagggtactactatagatattacaatgatgctgtttactaagtgataaccccgtatcttacaggactgactttgactcaataaaccactcagcctattattggaaagtgccataggccttgagaaagtatagttacatcctcacaaatatatgaagttaagtcactacttacaaggaaaaaaaatgtaaatacatttttctttctggaaccgaactcttattatggggaaataatagaaataaagaaaatgtaaaagcatgaaatggaatgtagtcttgatcaaacatttcagcagacctcaatttgcttacaatctgtactcaaaaagtttataattcaatcagaattcaaaaagtattttgtgtgtttgtgatgtattagcatatacacaaaacaaatgaggggaatgtatataatcttggtgaaaagttgtatgggagttttttgtacgattcctgcaacttttctataaacgtggcattatatctaaataaaaaattaccaaaaaacat

SEQ ID NO: 4865 - protein, 184 aa, Homo sapiens
MQLKGHLCRVLQAQSWEQVETIGDAYCVAGGLHKESDTHAVQIALMALKMMELSDEVMSPHGEPIKMRIGLHSGSVFAGVVGVKMPRYCLFGNNVTLANKFESCSVPRKINVSPTTYRLLKDCPGFVFTPRSREELPPNFPSEIPGICHFLDAYQQGTNSKPCFQKKDVEDGNANFLGKASGID

SEQ ID NO: 4866 - DNA, 3102 bp, Homo sapiens
catctgctcccagtgctcaccgctgcaggtcatcaccatgctcaatgcactgtacactcgcttcgaccagcagtgtggagagctggatgtctacaaggtaggagtggaccagggaaataattgttttaccagcaaactcactggggaacaagcactgtgcctaggacctgaattataatgcaactgaaaggccacctctgtagggtcttgcaagcccagtcctgggagcaggtggagaccattggcgatgcctattgtgtagctgggggattacacaaagagagtgatactcatgctgttcagatagcgctgatggccctgaagatgatggagctctctgatgaagttatgtctccccatggagaacctatcaagatgcgaattggactgcactctggatcagtttttgctggcgtcgttggagttaaaatgccccgttactgtctttttggaaacaatgtcactctggctaacaaatttgagtcctgcagtgtaccacgaaaaatcaatgtcagcccaacaacttacagattactcaaagactgtcctggtttcgtgtttacccctcgatcaagggaggaacttccaccaaacttccctagtgaaatccccggaatctgccattttctggatgcttaccaacaaggaacaaactcaaaaccatgcttccaaaagaaagatgtggaagatggcaatgccaattttttaggcaaagcatcaggaatagattagcaacctatatacctatttataagtctttggggtttgactcattgaagatgtgtagagcctctgaaagcactttagggattgtagatggctaacaagcagtattaaaatttcaggagccaagtcacaatctttctcctgtttaacatgacaaaatgtatgtactcacttcagtacttcagctcttcaagaaaaaaaaaaaaaaccttaaaaagctacttttgtgggagtatttctattatataaccagcacttactacctgtactcaaaattcagcaccttgtacatatatcagataattgtagtcaattgtacaaactgatggagtcacctgcaatctcatatcctggtggaatgccatggttattaaagtgtgtttgtgatagtgtcgtcaaaaaaaaggtttttgaatagaaattacattctttgacaccctcagttctttcaaactttcaactctgcattttattgcattttctcatttaactgttagtatatgtttgaatataggctgactttttttctctattgcactttcttctttttttctttttagaaaataagcaattaggggttagatgcaatatgaatataaaatagttctgtaaataccaaatattatttttagttctggaagttaaaaatactctccatagtaacgtgtgttataataataaatatttcttttgtttgacttttttaaaattctacaatggtaaaagctattttaatccatgttagcaatttaattcctattaattcattttactatcataatagcaaagtattcagaataaaagaggtttatatcttctattaaaatgcagtaatactattcaaatctaatttagctggaagcaacatgggagtaaagtaatcatccaggggacccaccataaaggacattggtaaaacatttacacacgtaaacacacgtgcaggcacacttggaacaatatggacccacttcagcagacatcttctattgccatgctgagctgtttaaagttttaagaagaaaatctaagtatggaagtagaaaataagacttgttcttttggtggatatctcatttttcttgagtatttgtgctgaacattttggtgtatgtctatgaactaagaatcaagtttttgtctcattaaatatacatatatgaagtgtttttattctacttgaaatatcttgacttaaaaaaaacgactgttagtattgatgaagcaaatgaggcagtgactacattatggaaatgtctaagtattttttccggaacttcaactttttctttttgttttacataaacatttaagcagctaggaacttttagttttagttaggtcagttgaagttctctggtgaactaaaaaatctacattttggttggggataaagatttgattttaaaaacagcttgaatttaaagcaagaaaaagatgaacgttatagttttaaaatcaatattagcagagccatagataggctgagctcttatttggggttctgagaaataactcagtttaaaacttctttaactgcctcccttagtacccaggctagcccatggtgacatcagggatattcattactgattggcctctagtattccaagggtactactatagatattacaatgatgctgtttactaagtgataaccccgtatcttacaggactgactttgactcaataaaccactcagcctattattggaaagtgccataggccttgagaaagtatagttacatcctcacaaatatatgaagttaagtcactacttacaaggaaaaaaaatgtaaatacatttttctttctggaaccgaactcttattatggggaaataatagaaataaagaaaatgtaaaagcatgaaatggaatgtagtcttgatcaaacatttcagcagacctcaatttgcttacaatctgtactcaaaaagtttataattcaatcagaattcaaaaagtattttgtgtgtttgtgatgtattagcatatacacaaaacaaatgaggggaatgtatataatcttggtgaaaagttgtatgggagttttttgtacgattcctgcaacttttctataaacgtggcattatatctaaataaaaaattaccaaaaaacatattttcacagtgaagttaaatcatctgtgataggttccccagaccagcctacaaaggcccattaaatacagaataatttgtggatcttcaaagaggatgaacatacatttccatgacagagtccatacgaaattcacaatttagatgctaaaaaatttaaggaatatctttttttctctatcttatctgctttgaagcatagcgattagcgagaaacttttcagatccagaccactgatggtagccagagtag

SEQ ID NO: 4867 - protein, 184 aa, Homo sapiens; identical to SEQ ID NO: 4865

SEQ ID NO: 4868 - DNA, 3080 bp, Homo sapiens
aaggcggctgttctcgctccagctcgatgctgcctccccggcccggttgcgctgtagccgctgccgcctctgcctgggtcccttcggccgtacctctgcgtgggggctgcctccccggctcccggtgcagacaccatgtacggatttgtgaatcacgccctggagttgctggtgatccgcaattacggccccgaggtgtgggaagacatcaaaaaagaggcacagttagatgaagaaggacagtttcttgtcagaataatatatgatgactccaaaacttatgatttggttgctgctgcaagcaaagtcctcaatctcaatgctggagaaatcctccaaatgtttgggaagatgtttttcgtcttttgccaagaatctggttatgatacaatcttgcgtgtcctgggctctaatgtcagagaatttctacagaaccttgatgctctgcacgaccaccttgctaccatctacccaggaatgcgtgcaccttcctttaggtgcactgatgcagaaaagggcaaaggactcattttgcactactactcagagagagaaggacttcaggatattgtcattggaatcatcaaaacagtggcacaacaaatccatggcactgaaatagacatgaaggttattcagcaaagaaatgaagaatgtgatcatactcaatttttaattgaagaaaaagagtcaaaagaagaggatttttatgaagatcttgacagatttgaagaaaatggtacccaggaatcacgcatcagcccatatacattctgcaaagcttttccttttcatataatatttgaccgggacctagtggtcactcagtgtggcaatgctatatacagagttctcccccagctccagcctgggaattgcagccttctgtctgtcttctcgctggttcgtcctcatattgatattagtttccatgggatcctttctcacatcaatactgtttttgtattgagaagcaaggaaggattgttggatgtggagaaattagaatgtgaggatgaactgactgggactgagatcagctgcttacgtctcaagggtcaaatgatctacttacctgaagcagatagcatactttttctatgttcaccaagtgtcatgaacctggacgatttgacaaggagagggctgtatctaagtgacatccctctgcatgatgccacgcgcgatcttgttcttttgggagaacaatttagagaggaatacaaactcacccaagaactggaaatcctcactgacaggctacagctcacgttaagagccctggaagatgaaaagaaaaagacagacactggcattgtgggcttcaatgctttctgtagcaagcatgcatctggagaaggagccatgaagatcgtcaacctcctcaacgacctctacaccagatttgacacactgactgattcccggaaaaacccatttgtttataaggtggagactgttggtgacaagtatatgacagtgagtggtttaccagagccatgcattcaccatgcacgatccatctgccacctggccttggacatgatggaaattgctggccaggttcaagtagatggtgaatctgttcagataacaatagggatacacactggagaggtagttacaggtgtcataggacagcggatgcctcgatactgtctttttgggaatactgtcaacctcacaagccgaacagaaaccacaggagaaaagggaaaaataaatgtgtctgaatatacatacagatgtcttatgtctccagaaaattcagatccacaattccacttggagcacagaggcccagtgtccatgaagggcaaaaaagaaccaatgcaagtttggtttctatccagaaaaaatacaggaacagaggaaacaaagcaggatgatgactgaatcttggattatggggtgaagaggagtacagactaggttccagttttctcctaacacgtgccaagcccaggagcagttcttccctatggatacagattttcttttgtccttgtccattaccccaagactttcttctagatatatctctcactatccgttattcaaccttagctctgctttctattactttttaggctttagtatattatctaaagtttggcttttgatgtggatgatgtgagcttcatgtgtcttaaaatctactacaagcattacctaacatggtgatctgcaagtagtaggcacccaataaatatttgttgaatttagttaaatgaaactgaacagtgtttggccatgtgtatatttatatcatgtttaccaaatctgtttagtgttccacatatatgtatatgtatattttaatgactataatgtaataaagtttatatcatgttggtgtatatcattatagaaatcattttctaaaggagtgaattctaagttttaggggaaaaaatgcaatttattttcagactcccaaagtaagaattaacatatcatgctaagaaaatagtgactattttgaagtatgctacttccctttcagaaatatagaatacacgtttctgttattaaagtatttgattactaattcaaatcatatggcaattataattcttctaaaatgctatcatttgtaactgtatcccctgtattaaatctcattaaccacaggcagctgttacagaaagctgcattgtttcacattgagctgttacattagttcaggctaaatgttgggagctccaaccacatccaagaataaatctggaaacacactgctgggatactgctgttagagcccttcttggccttgtattcccagaaatgagctccctttccttagcttagaagaatgtgattatatccaggacatcatgttcagaaaacttagtttactttcagcatagaatgcattactgttggaataattggcctctagctcttaaatgtctctgataacttattaatatctatctttataaaatagagtgcaactacttttgtgtaaaaatgtttgcctttaaatttagtatttcatatcagcacatcgatatatgtataaatgttccatgttaatgtgtaaaagagtctgtaataaattatttttttcacgtgtc

SEQ ID NO: 4869 - protein, 586 aa, Homo sapiens
MYGFVNHALELLVIRNYGPEVWEDIKKEAQLDEEGQFLVRIIYDDSKTYDLVAAASKVLNLNAGEILQMFGKMFFVFCQESGYDTILRVLGSNVREFLQNLDALHDHLATIYPGMRAPSFRCTDAEKGKGLILHYYSEREGLQDIVIGIIKTVAQQIHGTEIDMKVIQQRNEECDHTQFLIEEKESKEEDFYEDLDRFEENGTQESRISPYTFCKAFPFHIIFDRDLVVTQCGNAIYRVLPQLQPGNCSLLSVFSLVRPHIDISFHGILSHINTVFVLRSKEGLLDVEKLECEDELTGTEISCLRLKGQMIYLPEADSILFLCSPSVMNLDDLTRRGLYLSDIPLHDATRDLVLLGEQFREEYKLTQELEILTDRLQLTLRALEDEKKKTDTGIVGFNAFCSKHASGEGAMKIVNLLNDLYTRFDTLTDSRKNPFVYKVETVGDKYMTVSGLPEPCIHHARSICHLALDMMEIAGQVQVDGESVQITIGIHTGEVVTGVIGQRMPRYCLFGNTVNLTSRTETTGEKGKINVSEYTYRCLMSPENSDPQFHLEHRGPVSMKGKKEPMQVWFLSRKNTGTEETKQDDD

SEQ ID NO: 4870 - DNA, 3179 bp, Homo sapiens
aaggcggctgttctcgctccagctcgatgctgcctccccggcccggttgcgctgtagccgctgccgcctctgcctgggtcccttcggccgtacctctgcgtgggggctgcctccccggctcccggtgcagacaccatgtacggatttgtgaatcacgccctggagttgctggtgatccgcaattacggccccgaggtgtgggaagacatcaaaaaagaggcacagttagatgaagaaggacagtttcttgtcagaataatatatgatgactccaaaacttatgatttggttgctgctgcaagcaaagtcctcaatctcaatgctggagaaatcctccaaatgtttgggaagatgtttttcgtcttttgccaagaatctggttatgatacaatcttgcgtgtcctgggctctaatgtcagagaatttctacagaaccttgatgctctgcacgaccaccttgctaccatctacccaggaatgcgtgcaccttcctttaggtgcactgatgcagaaaagggcaaaggactcattttgcactactactcagagagagaaggacttcaggatattgtcattggaatcatcaaaacagtggcacaacaaatccatggcactgaaatagacatgaaggttattcagcaaagaaatgaagaatgtgatcatactcaatttttaattgaagaaaaagagtcaaaagaagaggatttttatgaagatcttgacagatttgaagaaaatggtacccaggaatcacgcatcagcccatatacattctgcaaagcttttccttttcatataatatttgaccgggacctagtggtcactcagtgtggcaatgctatatacagagttctcccccagctccagcctgggaattgcagccttctgtctgtcttctcgctggttcgtcctcatattgatattagtttccatgggatcctttctcacatcaatactgtttttgtattgagaagcaaggaaggattgttggatgtggagaaattagaatgtgaggatgaactgactgggactgagatcagctgcttacgtctcaagggtcaaatgatctacttacctgaagcagatagcatactttttctatgttcaccaagtgtcatgaacctggacgatttgacaaggagagggctgtatctaagtgacatccctctgcatgatgccacgcgcgatcttgttcttttgggagaacaatttagagaggaatacaaactcacccaagaactggaaatcctcactgacaggctacagctcacgttaagagccctggaagatgaaaagaaaaagacagacacattgctgtattctgtccttcctccgtctgttgccaatgagctgcggcacaagcgtccagtgcctgccaaaagatatgacaatgtgaccatcctctttagtggcattgtgggcttcaatgctttctgtagcaagcatgcatctggagaaggagccatgaagatcgtcaacctcctcaacgacctctacaccagatttgacacactgactgattcccggaaaaacccatttgtttataaggtggagactgttggtgacaagtatatgacagtgagtggtttaccagagccatgcattcaccatgcacgatccatctgccacctggccttggacatgatggaaattgctggccaggttcaagtagatggtgaatctgttcagataacaatagggatacacactggagaggtagttacaggtgtcataggacagcggatgcctcgatactgtctttttgggaatactgtcaacctcacaagccgaacagaaaccacaggagaaaagggaaaaataaatgtgtctgaatatacatacagatgtcttatgtctccagaaaattcagatccacaattccacttggagcacagaggcccagtgtccatgaagggcaaaaaagaaccaatgcaagtttggtttctatccagaaaaaatacaggaacagaggaaacaaagcaggatgatgactgaatcttggattatggggtgaagaggagtacagactaggttccagttttctcctaacacgtgccaagcccaggagcagttcttccctatggatacagattttcttttgtccttgtccattaccccaagactttcttctagatatatctctcactatccgttattcaaccttagctctgctttctattactttttaggctttagtatattatctaaagtttggcttttgatgtggatgatgtgagcttcatgtgtcttaaaatctactacaagcattacctaacatggtgatctgcaagtagtaggcacccaataaatatttgttgaatttagttaaatgaaactgaacagtgtttggccatgtgtatatttatatcatgtttaccaaatctgtttagtgttccacatatatgtatatgtatattttaatgactataatgtaataaagtttatatcatgttggtgtatatcattatagaaatcattttctaaaggagtgaattctaagttttaggggaaaaaatgcaatttattttcagactcccaaagtaagaattaacatatcatgctaagaaaatagtgactattttgaagtatgctacttccctttcagaaatatagaatacacgtttctgttattaaagtatttgattactaattcaaatcatatggcaattataattcttctaaaatgctatcatttgtaactgtatcccctgtattaaatctcattaaccacaggcagctgttacagaaagctgcattgtttcacattgagctgttacattagttcaggctaaatgttgggagctccaaccacatccaagaataaatctggaaacacactgctgggatactgctgttagagcccttcttggccttgtattcccagaaatgagctccctttccttagcttagaagaatgtgattatatccaggacatcatgttcagaaaacttagtttactttcagcatagaatgcattactgttggaataattggcctctagctcttaaatgtctctgataacttattaatatctatctttataaaatagagtgcaactacttttgtgtaaaaatgtttgcctttaaatttagtatttcatatcagcacatcgatatatgtataaatgttccatgttaatgtgtaaaagagtctgtaataaattatttttttcacgtgtc

SEQ ID NO: 4871 - protein, 619 aa, Homo sapiens; identical to SEQ ID NO: 559

SEQ ID NO: 4872 - DNA, 3224 bp, Homo sapiens
aaggcggctgttctcgctccagctcgatgctgcctccccggcccggttgcgctgtagccgctgccgcctctgcctgggtcccttcggccgtacctctgcgtgggggctgcctccccggctcccggtgcagacaccatgtacggatttgtgaatcacgccctggagttgctggtgatccgcaattacggccccgaggtgtgggaagacatcaaaaaagaggcacagttagatgaagaaggacagtttcttgtcagaataatatatgatgactccaaaacttatgatttggttgctgctgcaagcaaagtcctcaatctcaatgctggagaaatcctccaaatgtttgggaagatgtttttcgtcttttgccaagaatctggttatgatacaatcttgcgtgtcctgggctctaatgtcagagaatttctacagaaccttgatgctctgcacgaccaccttgctaccatctacccaggaatgcgtgcaccttcctttaggtgcactgatgcagaaaagggcaaaggactcattttgcactactactcagagagagaaggacttcaggatattgtcattggaatcatcaaaacagtggcacaacaaatccatggcactgaaatagacatgaaggttattcagcaaagaaatgaagaatgtgatcatactcaatttttaattgaagaaaaagagtcaaaagaagaggatttttatgaagatcttgacagatttgaagaaaatggtacccaggaatcacgcatcagcccatatacattctgcaaagcttttccttttcatataatatttgaccgggacctagtggtcactcagtgtggcaatgctatatacagagttctcccccagctccagcctgggaattgcagccttctgtctgtcttctcgctggttcgtcctcatattgatattagtttccatgggatcctttctcacatcaatactgtttttgtattgagaagcaaggaaggattgttggatgtggagaaattagaatgtgaggatgaactgactgggactgagatcagctgcttacgtctcaagggtcaaatgatctacttacctgaagcagatagcatactttttctatgttcaccaagtgtcatgaacctggacgatttgacaaggagagggctgtatctaagtgacatccctctgcatgatgccacgcgcgatcttgttcttttgggagaacaatttagagaggaatacaaactcacccaagaactggaaatcctcactgacaggctacagctcacgttaagagccctggaagatgaaaagaaaaagacagacacattgctgtattctgtccttcctccgtctgttgccaatgagctgcggcacaagcgtccagtgcctgccaaaagatatgacaatgtgaccatcctctttagtggcattgtgggcttcaatgctttctgtagcaagcatgcatctggagaaggagccatgaagatcgtcaacctcctcaacgacctctacaccagatttgacacactgactgattcccggaaaaacccatttgtttataaggtggagactgttggtgacaagtatatgacagtgagtggtttaccagagccatgcattcaccatgcacgatccatctgccacctggccttggacatgatggaaattgctggccaggttcaagtagatggtgaatctgttcagataacaatagggatacacactggagaggtagttacaggtgtcataggacagcggatgcctcgatactgtctttttgggaatactgtcaacctcacaagccgaacagaaaccacaggagaaaagggaaaaataaatgtgtctgaatatacatacagatgtcttatgtctccagaaaattcagatccacaattccacttggagcacagaggcccagtgtccatgaagggcaaaaaagaaccaatgcaagtttggtttctatccagaaaaaatacaggaacagaggaaacaaagcaggatgatgactgaatcttggattatggggtgaagaggagtacagactaggttccagttttctcctaacacgtgccaagcccaggagcagttcttccctatggatacagattttcttttgtccttgtccattaccccaagactttcttctagatatatctctcactatccgttattcaaccttagctctgctttctattactttttaggctttagtatattatctaaagtttggcttttgatgtggatgatgtgagcttcatgtgtcttaaaatctactacaagcattacctaacatggtgatctgcaagtagtaggcacccaataaatatttgttgaatttagttaaatgaaactgaacagtgtttggccatgtgtatatttatatcatgtttaccaaatctgtttagtgttccacatatatgtatatgtatattttaatgactataatgtaataaagtttatatcatgttggtgtatatcattatagaaatcattttctaaaggagtgaattctaagttttaggggaaaaaatgcaatttattttcagactcccaaagtaagaattaacatatcatgctaagaaaatagtgactattttgaagtatgctacttccctttcagaaatatagaatacacgtttctgttattaaagtatttgattactaattcaaatcatatggcaattataattcttctaaaatgctatcatttgtaactgtatcccctgtattaaatctcattaaccacaggcagctgttacagaaagctgcattgtttcacattgagctgttacattagttcaggctaaatgttgggagctccaaccacatccaagaataaatctggaaacacactgctgggatactgctgttagagcccttcttggccttgtattcccagaaatgagctccctttccttagcttagaagaatgtgattatatccaggacatcatgttcagaaaacttagtttactttcagcatagaatgcattactgttggaataattggcctctagctcttaaatgtctctgataacttattaatatctatctttataaaatagagtgcaactacttttgtgtaaaaatgtttgcctttaaatttagtatttcatatcagcacatcgatatatgtataaatgttccatgttaatgtgtaaaagagtctgtaataaattatttttttcacgtgtctctatacagtttttatttcaataaaaatattaacattatttttca

SEQ ID NO: 4873 - protein, 619 aa, Homo sapiens; identical to SEQ ID NO: 559

SEQ ID NO: 4874 - DNA, 3125 bp, Homo sapiens
aaggcggctgttctcgctccagctcgatgctgcctccccggcccggttgcgctgtagccgctgccgcctctgcctgggtcccttcggccgtacctctgcgtgggggctgcctccccggctcccggtgcagacaccatgtacggatttgtgaatcacgccctggagttgctggtgatccgcaattacggccccgaggtgtgggaagacatcaaaaaagaggcacagttagatgaagaaggacagtttcttgtcagaataatatatgatgactccaaaacttatgatttggttgctgctgcaagcaaagtcctcaatctcaatgctggagaaatcctccaaatgtttgggaagatgtttttcgtcttttgccaagaatctggttatgatacaatcttgcgtgtcctgggctctaatgtcagagaatttctacagaaccttgatgctctgcacgaccaccttgctaccatctacccaggaatgcgtgcaccttcctttaggtgcactgatgcagaaaagggcaaaggactcattttgcactactactcagagagagaaggacttcaggatattgtcattggaatcatcaaaacagtggcacaacaaatccatggcactgaaatagacatgaaggttattcagcaaagaaatgaagaatgtgatcatactcaatttttaattgaagaaaaagagtcaaaagaagaggatttttatgaagatcttgacagatttgaagaaaatggtacccaggaatcacgcatcagcccatatacattctgcaaagcttttccttttcatataatatttgaccgggacctagtggtcactcagtgtggcaatgctatatacagagttctcccccagctccagcctgggaattgcagccttctgtctgtcttctcgctggttcgtcctcatattgatattagtttccatgggatcctttctcacatcaatactgtttttgtattgagaagcaaggaaggattgttggatgtggagaaattagaatgtgaggatgaactgactgggactgagatcagctgcttacgtctcaagggtcaaatgatctacttacctgaagcagatagcatactttttctatgttcaccaagtgtcatgaacctggacgatttgacaaggagagggctgtatctaagtgacatccctctgcatgatgccacgcgcgatcttgttcttttgggagaacaatttagagaggaatacaaactcacccaagaactggaaatcctcactgacaggctacagctcacgttaagagccctggaagatgaaaagaaaaagacagacactggcattgtgggcttcaatgctttctgtagcaagcatgcatctggagaaggagccatgaagatcgtcaacctcctcaacgacctctacaccagatttgacacactgactgattcccggaaaaacccatttgtttataaggtggagactgttggtgacaagtatatgacagtgagtggtttaccagagccatgcattcaccatgcacgatccatctgccacctggccttggacatgatggaaattgctggccaggttcaagtagatggtgaatctgttcagataacaatagggatacacactggagaggtagttacaggtgtcataggacagcggatgcctcgatactgtctttttgggaatactgtcaacctcacaagccgaacagaaaccacaggagaaaagggaaaaataaatgtgtctgaatatacatacagatgtcttatgtctccagaaaattcagatccacaattccacttggagcacagaggcccagtgtccatgaagggcaaaaaagaaccaatgcaagtttggtttctatccagaaaaaatacaggaacagaggaaacaaagcaggatgatgactgaatcttggattatggggtgaagaggagtacagactaggttccagttttctcctaacacgtgccaagcccaggagcagttcttccctatggatacagattttcttttgtccttgtccattaccccaagactttcttctagatatatctctcactatccgttattcaaccttagctctgctttctattactttttaggctttagtatattatctaaagtttggcttttgatgtggatgatgtgagcttcatgtgtcttaaaatctactacaagcattacctaacatggtgatctgcaagtagtaggcacccaataaatatttgttgaatttagttaaatgaaactgaacagtgtttggccatgtgtatatttatatcatgtttaccaaatctgtttagtgttccacatatatgtatatgtatattttaatgactataatgtaataaagtttatatcatgttggtgtatatcattatagaaatcattttctaaaggagtgaattctaagttttaggggaaaaaatgcaatttattttcagactcccaaagtaagaattaacatatcatgctaagaaaatagtgactattttgaagtatgctacttccctttcagaaatatagaatacacgtttctgttattaaagtatttgattactaattcaaatcatatggcaattataattcttctaaaatgctatcatttgtaactgtatcccctgtattaaatctcattaaccacaggcagctgttacagaaagctgcattgtttcacattgagctgttacattagttcaggctaaatgttgggagctccaaccacatccaagaataaatctggaaacacactgctgggatactgctgttagagcccttcttggccttgtattcccagaaatgagctccctttccttagcttagaagaatgtgattatatccaggacatcatgttcagaaaacttagtttactttcagcatagaatgcattactgttggaataattggcctctagctcttaaatgtctctgataacttattaatatctatctttataaaatagagtgcaactacttttgtgtaaaaatgtttgcctttaaatttagtatttcatatcagcacatcgatatatgtataaatgttccatgttaatgtgtaaaagagtctgtaataaattatttttttcacgtgtctctatacagtttttatttcaataaaaatattaacattatttttca

SEQ ID NO: 4875 - protein, 586 aa, Homo sapiens; identical to SEQ ID NO: 4869

SEQ ID NO: 4876 - DNA, 570 bp, Homo sapiens
gtagccgctgccgcctctgcctgggtcccttcggccgtacctctgcgtgggggctgcctccccggctcccggtgcagacaccatgtacggatttgtgaatcacgccctggagttgctggtgatccgcaattacggccccgaggtgtgggaagacatcaagtaagtggccggctaccctggctgtggcccaggtcggcgcccagtgtgggaggccccccgcgcctcgcctggtcctcagcctgctggccgggtcgcgggcgcgcatccttggaggtgcctccgcgcctcgctcccggctcgctgcagctgcgctcccacgctccgggactggaaccaggaggggaggggcggctggggcggggctgcgagggcgagaaccgcggaaaggagcccctaggggtcaccacggcttcccgacccggcctgagcgtgggaacgcgctgccggcgctcccaggctcagcaggccgggcagctcccacgcgtgcagagccccgagggaccacacgggcctccgcgaggttcctgcgcccggaggccttagaaacaaacggaagactttggctccttt

SEQ ID NO: 4877 - protein, 180 aa, Homo sapiens
VAAAASAWVPSAVPLRGGCLPGSRCRHHVRICESRPGVAGDPQLRPRGVGRHQVSGRLPWLWPRSAPSVGGPPRLAWSSACWPGRGRASLEVPPRLAPGSLQLRSHAPGLEPGGEGRLGRGCEGENRGKEPLGVTTASRPGLSVGTRCRRSQAQQAGQLPRVQSPEGPHGPPRGSCARRP

SEQ ID NO: 4878 - DNA, 537 bp, Homo sapiens
gtagccgctgccgcctctgcctgggtcccttcggccgtacctctgcgtgggggctgcctccccggctcccggtgcagacaccatgtacggatttgtgaatcacgccctggagttgctggtgatccgcaattacggccccgaggtgtgggaagacatcaaaaaagaggcacagttagatgaagaaggacagtttcttgtcagaataatatatgatgactccaaaacttatgatttggttgctgctgcaagcaaagtcctcaatctcaatgctggagaaatcctccaaatgtttgggaagatgtttttcgtcttttgccaagaatctggttatgatacaatcttgcgtgtcctgggctctaatgtcagagaatttctacaggtaagcaatttgaggtcctatagttaaaagttctgtgtttataactctcaaatatagactctagaatacttttgttcactcagctgtacaagagtgtcttgcttctgaaatggaatcgtagtcacctttttctaattcacataaaatcatcgttattg

SEQ ID NO: 4879 - protein, 107 aa, Homo sapiens
MYGFVNHALELLVIRNYGPEVWEDIKKEAQLDEEGQFLVRIIYDDSKTYDLVAAASKVLNLNAGEILQMFGKMFFVFCQESGYDTILRVLGSNVREFLQVSNLRSYS

SEQ ID NO: 4880 - DNA, 3052 bp, Homo sapiens
gtagccgctgccgcctctgcctgggtcccttcggccgtacctctgcgtgggggctgcctccccggctcccggtgcagacaccatgaaaagaggcacagttagatgaagaaggacagtttcttgtcagaataatatatgatgactccaaaacttatgatttggttgctgctgcaagcaaagtcctcaatctcaatgctggagaaatcctccaaatgtttgggaagatgtttttcgtcttttgccaagaatctggttatgatacaatcttgcgtgtcctgggctctaatgtcagagaatttctacagaaccttgatgctctgcacgaccaccttgctaccatctacccaggaatgcgtgcaccttcctttaggtgcactgatgcagaaaagggcaaaggactcattttgcactactactcagagagagaaggacttcaggatattgtcattggaatcatcaaaacagtggcacaacaaatccatggcactgaaatagacatgaaggttattcagcaaagaaatgaagaatgtgatcatactcaatttttaattgaagaaaaagagtcaaaagaagaggatttttatgaagatcttgacagatttgaagaaaatggtacccaggaatcacgcatcagcccatatacattctgcaaagcttttccttttcatataatatttgaccgggacctagtggtcactcagtgtggcaatgctatatacagagttctcccccagctccagcctgggaattgcagccttctgtctgtcttctcgctggttcgtcctcatattgatattagtttccatgggatcctttctcacatcaatactgtttttgtattgagaagcaaggaaggattgttggatgtggagaaattagaatgtgaggatgaactgactgggactgagatcagctgcttacgtctcaagggtcaaatgatctacttacctgaagcagatagcatactttttctatgttcaccaagtgtcatgaacctggacgatttgacaaggagagggctgtatctaagtgacatccctctgcatgatgccacgcgcgatcttgttcttttgggagaacaatttagagaggaatacaaactcacccaagaactggaaatcctcactgacaggctacagctcacgttaagagccctggaagatgaaaagaaaaagacagacacattgctgtattctgtccttcctccgtctgttgccaatgagctgcggcacaagcgtccagtgcctgccaaaagatatgacaatgtgaccatcctctttagtggcattgtgggcttcaatgctttctgtagcaagcatgcatctggagaaggagccatgaagatcgtcaacctcctcaacgacctctacaccagatttgacacactgactgattcccggaaaaacccatttgtttataaggtggagactgttggtgacaagtatatgacagtgagtggtttaccagagccatgcattcaccatgcacgatccatctgccacctggccttggacatgatggaaattgctggccaggttcaagtagatggtgaatctgttcagataacaatagggatacacactggagaggtagttacaggtgtcataggacagcggatgcctcgatactgtctttttgggaatactgtcaacctcacaagccgaacagaaaccacaggagaaaagggaaaaataaatgtgtctgaatatacatacagatgtcttatgtctccagaaaattcagatccacaattccacttggagcacagaggcccagtgtccatgaagggcaaaaaagaaccaatgcaagtttggtttctatccagaaaaaatacaggaacagaggaaacaaagcaggatgatgactgaatcttggattatggggtgaagaggagtacagactaggttccagttttctcctaacacgtgccaagcccaggagcagttcttccctatggatacagattttcttttgtccttgtccattaccccaagactttcttctagatatatctctcactatccgttattcaaccttagctctgctttctattactttttaggctttagtatattatctaaagtttggcttttgatgtggatgatgtgagcttcatgtgtcttaaaatctactacaagcattacctaacatggtgatctgcaagtagtaggcacccaataaatatttgttgaatttagttaaatgaaactgaacagtgtttggccatgtgtatatttatatcatgtttaccaaatctgtttagtgttccacatatatgtatatgtatattttaatgactataatgtaataaagtttatatcatgttggtgtatatcattatagaaatcattttctaaaggagtgaattctaagttttaggggaaaaaatgcaatttattttcagactcccaaagtaagaattaacatatcatgctaagaaaatagtgactattttgaagtatgctacttccctttcagaaatatagaatacacgtttctgttattaaagtatttgattactaattcaaatcatatggcaattataattcttctaaaatgctatcatttgtaactgtatcccctgtattaaatctcattaaccacaggcagctgttacagaaagctgcattgtttcacattgagctgttacattagttcaggctaaatgttgggagctccaaccacatccaagaataaatctggaaacacactgctgggatactgctgttagagcccttcttggccttgtattcccagaaatgagctccctttccttagcttagaagaatgtgattatatccaggacatcatgttcagaaaacttagtttactttcagcatagaatgcattactgttggaataattggcctctagctcttaaatgtctctgataacttattaatatctatctttataaaatagagtgcaactacttttgtgtaaaaatgtttgcctttaaatttagtatttcatatcagcacatcgatatatgtataaatgttccatgttaatgtgtaaaagagtctgtaataaattatttttttcacgtgtc

SEQ ID NO: 4881 - protein, 551 aa, Homo sapiens
MFGKMFFVFCQESGYDTILRVLGSNVREFLQNLDALHDHLATIYPGMRAPSFRCTDAEKGKGLILHYYSEREGLQDIVIGIIKTVAQQIHGTEIDMKVIQQRNEECDHTQFLIEEKESKEEDFYEDLDRFEENGTQESRISPYTFCKAFPFHIIFDRDLVVTQCGNAIYRVLPQLQPGNCSLLSVFSLVRPHIDISFHGILSHINTVFVLRSKEGLLDVEKLECEDELTGTEISCLRLKGQMIYLPEADSILFLCSPSVMNLDDLTRRGLYLSDIPLHDATRDLVLLGEQFREEYKLTQELEILTDRLQLTLRALEDEKKKTDTLLYSVLPPSVANELRHKRPVPAKRYDNVTILFSGIVGFNAFCSKHASGEGAMKIVNLLNDLYTRFDTLTDSRKNPFVYKVETVGDKYMTVSGLPEPCIHHARSICHLALDMMEIAGQVQVDGESVQITIGIHTGEVVTGVIGQRMPRYCLFGNTVNLTSRTETTGEKGKINVSEYTYRCLMSPENSDPQFHLEHRGPVSMKGKKEPMQVWFLSRKNTGTEETKQDDD

SEQ ID NO: 4882 - DNA, 3097 bp, Homo sapiens
gtagccgctgccgcctctgcctgggtcccttcggccgtacctctgcgtgggggctgcctccccggctcccggtgcagacaccatgaaaagaggcacagttagatgaagaaggacagtttcttgtcagaataatatatgatgactccaaaacttatgatttggttgctgctgcaagcaaagtcctcaatctcaatgctggagaaatcctccaaatgtttgggaagatgtttttcgtcttttgccaagaatctggttatgatacaatcttgcgtgtcctgggctctaatgtcagagaatttctacagaaccttgatgctctgcacgaccaccttgctaccatctacccaggaatgcgtgcaccttcctttaggtgcactgatgcagaaaagggcaaaggactcattttgcactactactcagagagagaaggacttcaggatattgtcattggaatcatcaaaacagtggcacaacaaatccatggcactgaaatagacatgaaggttattcagcaaagaaatgaagaatgtgatcatactcaatttttaattgaagaaaaagagtcaaaagaagaggatttttatgaagatcttgacagatttgaagaaaatggtacccaggaatcacgcatcagcccatatacattctgcaaagcttttccttttcatataatatttgaccgggacctagtggtcactcagtgtggcaatgctatatacagagttctcccccagctccagcctgggaattgcagccttctgtctgtcttctcgctggttcgtcctcatattgatattagtttccatgggatcctttctcacatcaatactgtttttgtattgagaagcaaggaaggattgttggatgtggagaaattagaatgtgaggatgaactgactgggactgagatcagctgcttacgtctcaagggtcaaatgatctacttacctgaagcagatagcatactttttctatgttcaccaagtgtcatgaacctggacgatttgacaaggagagggctgtatctaagtgacatccctctgcatgatgccacgcgcgatcttgttcttttgggagaacaatttagagaggaatacaaactcacccaagaactggaaatcctcactgacaggctacagctcacgttaagagccctggaagatgaaaagaaaaagacagacacattgctgtattctgtccttcctccgtctgttgccaatgagctgcggcacaagcgtccagtgcctgccaaaagatatgacaatgtgaccatcctctttagtggcattgtgggcttcaatgctttctgtagcaagcatgcatctggagaaggagccatgaagatcgtcaacctcctcaacgacctctacaccagatttgacacactgactgattcccggaaaaacccatttgtttataaggtggagactgttggtgacaagtatatgacagtgagtggtttaccagagccatgcattcaccatgcacgatccatctgccacctggccttggacatgatggaaattgctggccaggttcaagtagatggtgaatctgttcagataacaatagggatacacactggagaggtagttacaggtgtcataggacagcggatgcctcgatactgtctttttgggaatactgtcaacctcacaagccgaacagaaaccacaggagaaaagggaaaaataaatgtgtctgaatatacatacagatgtcttatgtctccagaaaattcagatccacaattccacttggagcacagaggcccagtgtccatgaagggcaaaaaagaaccaatgcaagtttggtttctatccagaaaaaatacaggaacagaggaaacaaagcaggatgatgactgaatcttggattatggggtgaagaggagtacagactaggttccagttttctcctaacacgtgccaagcccaggagcagttcttccctatggatacagattttcttttgtccttgtccattaccccaagactttcttctagatatatctctcactatccgttattcaaccttagctctgctttctattactttttaggctttagtatattatctaaagtttggcttttgatgtggatgatgtgagcttcatgtgtcttaaaatctactacaagcattacctaacatggtgatctgcaagtagtaggcacccaataaatatttgttgaatttagttaaatgaaactgaacagtgtttggccatgtgtatatttatatcatgtttaccaaatctgtttagtgttccacatatatgtatatgtatattttaatgactataatgtaataaagtttatatcatgttggtgtatatcattatagaaatcattttctaaaggagtgaattctaagttttaggggaaaaaatgcaatttattttcagactcccaaagtaagaattaacatatcatgctaagaaaatagtgactattttgaagtatgctacttccctttcagaaatatagaatacacgtttctgttattaaagtatttgattactaattcaaatcatatggcaattataattcttctaaaatgctatcatttgtaactgtatcccctgtattaaatctcattaaccacaggcagctgttacagaaagctgcattgtttcacattgagctgttacattagttcaggctaaatgttgggagctccaaccacatccaagaataaatctggaaacacactgctgggatactgctgttagagcccttcttggccttgtattcccagaaatgagctccctttccttagcttagaagaatgtgattatatccaggacatcatgttcagaaaacttagtttactttcagcatagaatgcattactgttggaataattggcctctagctcttaaatgtctctgataacttattaatatctatctttataaaatagagtgcaactacttttgtgtaaaaatgtttgcctttaaatttagtatttcatatcagcacatcgatatatgtataaatgttccatgttaatgtgtaaaagagtctgtaataaattatttttttcacgtgtctctatacagtttttatttcaataaaaatattaacattatttttca

SEQ ID NO: 4883 - protein, 551 aa, Homo sapiens; identical to SEQ ID NO: 4881

SEQ ID NO: 4884 - DNA, 1420 bp, Homo sapiens
aagaattcttgctaacagaaattaacttctaagtaaagcagtggaaataattgaacattaatgagccaattacaatcataagtactttttaggggatactttagtgatttttgtcctctaatgaaatgaaaaccaacagactggattgagaaggctgctttttttcttgctgttgtggttgttttgctcttcctctgtagtctggctcaaaggaaacaaagcaggatgatgactgaatcttggattatggggtgaagaggagtacagactaggttccagttttctcctaacacgtgccaagcccaggagcagttcttccctatggatacagattttcttttgtccttgtccattaccccaagactttcttctagatatatctctcactatccgttattcaaccttagctctgctttctattactttttaggctttagtatattatctaaagtttggcttttgatgtggatgatgtgagcttcatgtgtcttaaaatctactacaagcattacctaacatggtgatctgcaagtagtaggcacccaataaatatttgttgaatttagttaaatgaaactgaacagtgtttggccatgtgtatatttatatcatgtttaccaaatctgtttagtgttccacatatatgtatatgtatattttaatgactataatgtaataaagtttatatcatgttggtgtatatcattatagaaatcattttctaaaggagtgaattctaagttttaggggaaaaaatgcaatttattttcagactcccaaagtaagaattaacatatcatgctaagaaaatagtgactattttgaagtatgctacttccctttcagaaatatagaatacacgtttctgttattaaagtatttgattactaattcaaatcatatggcaattataattcttctaaaatgctatcatttgtaactgtatcccctgtattaaatctcattaaccacaggcagctgttacagaaagctgcattgtttcacattgagctgttacattagttcaggctaaatgttgggagctccaaccacatccaagaataaatctggaaacacactgctgggatactgctgttagagcccttcttggccttgtattcccagaaatgagctccctttccttagcttagaagaatgtgattatatccaggacatcatgttcagaaaacttagtttactttcagcatagaatgcattactgttggaataattggcctctagctcttaaatgtctctgataacttattaatatctatctttataaaatagagtgcaactacttttgtgtaaaaatgtttgcctttaaatttagtatttcatatcagcacatcgatatatgtataaatgttccatgttaatgtgtaaaagagtctgtaataaattatttttttcacgtgtc

SEQ ID NO: 4885 - protein, 51 aa, Homo sapiens
MDTDFLLSLSITPRLSSRYISHYPLFNLSSAFYYFLGFSILSKVWLLMWMM

SEQ ID NO: 4886 - DNA, 1465 bp, Homo sapiens
aagaattcttgctaacagaaattaacttctaagtaaagcagtggaaataattgaacattaatgagccaattacaatcataagtactttttaggggatactttagtgatttttgtcctctaatgaaatgaaaaccaacagactggattgagaaggctgctttttttcttgctgttgtggttgttttgctcttcctctgtagtctggctcaaaggaaacaaagcaggatgatgactgaatcttggattatggggtgaagaggagtacagactaggttccagttttctcctaacacgtgccaagcccaggagcagttcttccctatggatacagattttcttttgtccttgtccattaccccaagactttcttctagatatatctctcactatccgttattcaaccttagctctgctttctattactttttaggctttagtatattatctaaagtttggcttttgatgtggatgatgtgagcttcatgtgtcttaaaatctactacaagcattacctaacatggtgatctgcaagtagtaggcacccaataaatatttgttgaatttagttaaatgaaactgaacagtgtttggccatgtgtatatttatatcatgtttaccaaatctgtttagtgttccacatatatgtatatgtatattttaatgactataatgtaataaagtttatatcatgttggtgtatatcattatagaaatcattttctaaaggagtgaattctaagttttaggggaaaaaatgcaatttattttcagactcccaaagtaagaattaacatatcatgctaagaaaatagtgactattttgaagtatgctacttccctttcagaaatatagaatacacgtttctgttattaaagtatttgattactaattcaaatcatatggcaattataattcttctaaaatgctatcatttgtaactgtatcccctgtattaaatctcattaaccacaggcagctgttacagaaagctgcattgtttcacattgagctgttacattagttcaggctaaatgttgggagctccaaccacatccaagaataaatctggaaacacactgctgggatactgctgttagagcccttcttggccttgtattcccagaaatgagctccctttccttagcttagaagaatgtgattatatccaggacatcatgttcagaaaacttagtttactttcagcatagaatgcattactgttggaataattggcctctagctcttaaatgtctctgataacttattaatatctatctttataaaatagagtgcaactacttttgtgtaaaaatgtttgcctttaaatttagtatttcatatcagcacatcgatatatgtataaatgttccatgttaatgtgtaaaagagtctgtaataaattatttttttcacgtgtctctatacagtttttatttcaataaaaatattaacattatttttca

SEQ ID NO: 4887 - protein, 51 aa, Homo sapiens; identical to SEQ ID NO: 4885

SEQ ID NO: 4888 - DNA, 4835 bp, Homo sapiens
gcctagggaggaggagcgagaatcagcctggttcagtgactgagacaaactggaggtgaaaggagctggtactgtccactgtgctgtcggtgctgaacctgagacgcgagcggaccagttgctccagcacctgaaggcaacgccctcttgcaccctctgtgccctgtgggacccgcttcaccaacaggacccatatcaacttgacaaaggagtgtggtatcggacgtgggagagagtcctctgtttgccacctgggcgctcattcaggcgtgactttggagatttctatagttttagaccaaactatttttttttccccagctaagacgatcttttgagagttttttttttttattgtgatttatatttccacagcgtttaggaatctttctgggggacttttgtgactgttaaaataaggtgaaaagcaataaggatgtttaagtgctggtcagttgtcttggttctcggattcatttttctggagtcggaaggaaggccaaccaaagaaggaggatatggccttaaatcctatcagcctctaatgagattgcgacataagcaggaaaaaaatcaagaaagttcaagagtcaaaggatttatgattcaggatggcccttttggatcttgtgaaaataagtactgtggtttgggaagacactgtgttaccagcagagagacagggcaagcagaatgtgcctgtatggacctttgcaaacgtcactacaaacctgtgtgtggatctgacggagaattctatgaaaaccactgtgaagtgcacagagctgcttgcctgaaaaaacaaaagattaccattgttcacaatgaagactgcttctttaaaggagataagtgcaagactactgaatacagcaagatgaaaaatatgctattagatttacaaaatcaaaaatatattatgcaagaaaatgaaaatcctaatggcgacgacatatctcggaagaagctattggtggatcaaatgtttaaatattttgatgcagacagtaatggacttgtagatattaatgaactaactcaggtgataaaacaggaagaacttggcaaggatctctttgattgtactttgtatgttctattgaaatatgatgattttaatgctgacaagcacctggctcttgaagaattttatagagcattccaagtgatccagttgagtctgccagaagatcagaaactaagcatcactgcagcaactgtgggacaaagtgctgttctgagctgtgccattcaaggaaccctgagacctcccattatctggaaaaggaacaatattattctaaataatttagatttggaagacatcaatgactttggagatgatgggtccttgtatattactaaggttaccacaactcacgttggcaattacacctgctatgcagatggctatgaacaagtctatcagactcacatcttccaagtgaatgttcctccagtcatccgggtgtatccagagagtcaggctagagagcctggggtaactgccagtcttaggtgccatgcagagggcataccaaagcctcagcttggctggttgaagaatggaattgatattacaccaaagctttccaaacaactcacgcttcaagcaaatggcagtgaggttcacataagcaatgtgcgctatgaagatactggagcatacacttgtatcgcaaagaatgaagcaggagtggatgaagacatctcttctctttttgtggaagactctgctagaaagaccctagctaacatattatggagagaagaaggtctgggaattgggaacatgttctatgttttttatgaagatggaatcaaagtgatacaacccatagaatgtgaatttcagaggcacattaagcctagtgaaaagctccttggatttcaggatgaagtctgtcccaaagctgagggagatgaagttcagaggtgtgtgtgggcatcagctgttaatgtcaaagacaagttcatttatgttgcacagccaactttggacagagtccttattgttgatgtgcagtcccaaaaagttgttcaggcagtgagcacagaccctgtcccagttaaattacactatgacaaatcacatgatcaggtctgggtgctaagctggggtaccttggagaagacatcaccaacactacaggtaattaccctggccagtgggaatgtgcctcaccacacgatccacacccaaccagtgggaaagcaatttgacagagtggatgattttttcattcccaccacaacactcattatcacccatatgaggtttggatttattcttcataaagatgaagctgcactacaaaaaattgatcttgaaaccatgtcatacatcaagacaattaacttgaaggactataagtgcgttcctcagtcattggcatatacacacttgggaggctactacttcattggctgcaaacctgacagcaccggagcagtttccccacaggtcatggtggacggtgtaactgactcagtcattgggttcaatagtgatgtgacgggcactccatatgtctctccagatggccactaccttgtcagcattaatgatgtgaaaggtcttgtaagggttcagtacattaccatcagaggagaaatacaggaggcttttgatatttacacaaatctgcacatatctgatctggcatttcaaccatcctttactgaagcccaccaatataacatctacggtagttcaagcacacaaactgatgtgctctttgtggagctctcttctgggaaggtcaagatgataaagagtctcaaggaaccactcaaggcagaagaatggccttggaaccggaaaaacaggcaaatccaggacagtggcttgtttggtcaatacctgatgacaccttccaaggactctctcttcatcctagatggacgactcaataaattaaactgtgagatcactgaagttgaaaaaggaaatacagtcatttgggttggagatgcctaaaaaccctacgatacaattattgaatgaagcgttttacaatacattgcacttaatccattgtttaaatttacaacttaactttccaagtttatatcctagtcaaacaaaatttacttggttggtccaaataaaataaattgtttttgactaagtgactaagacatacacaattaattatattggttaattagaaatactcagcacaatatttaatgagaaatcacatcagtcacaagaatcaaatatgtaaattatgctttaaacaataaagtaggatttaaatcatttaaaaaactaaactgcagggaatttcagatgacataaagcattatttcattttgagggtagtttattttttttctctgtccttttggtatgattaaacaagaaataaaaggtgttgtggaaacttaaaattcttaattcaaaatattcggtcctgtccactgtttataatattttgtgccttgaagggaatgtcacaggaggaaaaggaagactaaagcctgcatactaaatgctctcataactataaatctcttgttgttaaaaaacatctcttgcaccaaatcctgtcttcagtcttttgtttaaccctcaatgaactaccaattgaaggcataagttggtcttaggttgtatacaggtgtcaaactccacttgacatttactgtataatctgcagcatgctatagaaagtggggaggaagggaggaaaaataattacagtcaaaatatttgcaatctatctactcattttgctttcaatcactagagtgcattatgtttttaatgcaagtttgtctgggatgtcaactgcctacagatgtttattactagcagaatagattatttattaatagattgtttcttttcatatagtccaatgtttcatcatcaggaactttcggttttaaaaaagaaacattacttttgtctgctaaagtaaaccatatatagggaaattaacacctaggaaaagaaaactggcaagagaattgatgaggtattagtggcttagaagaattagtaatataagttgggaataaaggggtagcccgacagtggtaagtaaaaatgtagtactccattgtttttgctatttaaatataatgtatcaaaaacctttattctaaaatttccacaaatgattccttttatccatcttcttgtaatcctaaaagcatcttctcactatgtgctgtagtttgaaacctaacgaatcctcctacttgagacactgtagaaaagtaaaaattgttgcttctgttttgttttaagaggaaatgagaaggccagcagaagtagattaaaactagagagctggtttattaaaataagcagataattatccaggcttaaagtaatagcttacatgttttgaaaatccttgtacttatttttgtttttattgttgcaaaaaaatgttaatgggctgttgaaatgacctccatttacttaaggtaatccaataaggtcttttttaaatatacaaattttactcaagtttaaattgtataaaactgcttagaaacctgaaattttatagtgtgtaatatcttatgtgtatatagcatcctgagctgtgtgatacagtagatttcttcttagcagaaacatgcgaggtagatttaataaacaacaaaaatcagcttatgtttctacttattgaatctgctttactttttagcaattttcttccttgtgaacatgaaccatataaagtgtctgtgacttaatgatttcatgtaagtctgtcgcatacatccttcttttgtagcttacaccatgtggatgctctgtctgtagacactgcttgataaaaggagaataaacctcttacattttaaccctt

SEQ ID NO: 4889 - protein, 847 aa, Homo sapiens
MFKCWSVVLVLGFIFLESEGRPTKEGGYGLKSYQPLMRLRHKQEKNQESSRVKGFMIQDGPFGSCENKYCGLGRHCVTSRETGQAECACMDLCKRHYKPVCGSDGEFYENHCEVHRAACLKKQKITIVHNEDCFFKGDKCKTTEYSKMKNMLLDLQNQKYIMQENENPNGDDISRKKLLVDQMFKYFDADSNGLVDINELTQVIKQEELGKDLFDCTLYVLLKYDDFNADKHLALEEFYRAFQVIQLSLPEDQKLSITAATVGQSAVLSCAIQGTLRPPIIWKRNNIILNNLDLEDINDFGDDGSLYITKVTTTHVGNYTCYADGYEQVYQTHIFQVNVPPVIRVYPESQAREPGVTASLRCHAEGIPKPQLGWLKNGIDITPKLSKQLTLQANGSEVHISNVRYEDTGAYTCIAKNEAGVDEDISSLFVEDSARKTLANILWREEGLGIGNMFYVFYEDGIKVIQPIECEFQRHIKPSEKLLGFQDEVCPKAEGDEVQRCVWASAVNVKDKFIYVAQPTLDRVLIVDVQSQKVVQAVSTDPVPVKLHYDKSHDQVWVLSWGTLEKTSPTLQVITLASGNVPHHTIHTQPVGKQFDRVDDFFIPTTTLIITHMRFGFILHKDEAALQKIDLETMSYIKTINLKDYKCVPQSLAYTHLGGYYFIGCKPDSTGAVSPQVMVDGVTDSVIGFNSDVTGTPYVSPDGHYLVSINDVKGLVRVQYITIRGEIQEAFDIYTNLHISDLAFQPSFTEAHQYNIYGSSSTQTDVLFVELSSGKVKMIKSLKEPLKAEEWPWNRKNRQIQDSGLFGQYLMTPSKDSLFILDGRLNKLNCEITEVEKGNTVIWVGDA

SEQ ID NO: 4890 - DNA, 1088 bp, Homo sapiens
aggattctaaacccctggaaagagttttaggcacaagattaagaggtggatggaactggaggtcatatcttaaatgaaacaagccaagcaaagaaagtcaaatatcacatattctcactcctaagtagggactaaaaaatgtgtacacatggatgtagagaatggaatgattgacagcaatatagacacacagatgacccaacatggaaaataatatattgtaaaagtcattcagttgtggggaaatgtgcagagaggattctatttggacttgttataaataagcaagattgtatcaacaatctagagagcctctgaagtgtaactaccctttcagcatttcagaagaccatacactattcccgttgatgagactatacaggatgaacaaaacagaaaaaaattgtgtcctcatggagcagactgcataaattttattcagaaaagatatgctacagaaggtgacagtgttggagtggagtgactgaaattatacatgtagccacagggataaattgatttttgaataaaattctgaatgagaagttatatgaagcaggcctggcacggtggctcatgcctgtaatcccagcactttgggaggctgaggaggacgcatcacctgaagtcaggaatttgagaccagcctgaccaacatggagaaaccccatctcaactaaaaatacaaaattagcctggtgtggtggcgcatccctgtaatcccagctactcacgaggctgagccaggagaatcacttgaacccaggacacggcagttttgcattattgttttgtactactaagctttgacacgaactatggggaagatctaaaattaatatacaaccatacctcaaaatattgcaggatcagttccagaccactgccatgaagtcaatattgcaacaaagtgcccaaaaatcatggtctagttttccctgctttcaccctcacaactggagggttcatggagctctccaggggatgacggttgtgccatgcagagcagcatttctaagcaagtgtgagttcatgtgagtagagccaaacacgagtcaaatttccattaaaaaaactatgagttccgc

SEQ ID NO: 4891 - protein, 49 aa, Homo sapiens
MKSILQQSAQKSWSSFPCFHPHNWRVHGALQGMTVVPCRAAFLSKCEFM

SEQ ID NO: 4892 - DNA, 367 bp, Homo sapiens
ttaatatacaaccatacctcaaaatattgcaggatcagttccagaccactgccatgaagtcaatattgcaacaaagtgcccaaaaatcatggtctagttttccctgctttcaccctcacaactggagggttcatggagctctccaggggatgacggttgtgccatgcagagcagcatttctaagcaagtgtgagttcatgagtgtgattgaaactgctgtttcacatagaaaggcctgcgtgcagcaggttgcaaacaggtcctgaagggacggcacatcccagctggagcgtgtggcccatctgcccgattagcaccgtggctgaaaggagctgacaagcagcttctatttttatctaatctttaa

SEQ ID NO: 4893 - protein, 70 aa, Homo sapiens; identical to SEQ ID NO: 563

SEQ ID NO: 4894 - DNA, 572 bp, Homo sapiens
gaagtttctgacaggttggctctgggccacatcagatgaagacacgcagcctcctgtttagtcttctggattgatcgtggtaaagcagcactggcctttgggaagaacagccttcctgttcaggaaaaatccacgtttgcatctgtccgctcttttttgcttatgaaatctcatttgccttcctctgcagtggagcacagagtcttgctctgtggcccaagctggagtgcagtggtgcaatctcagcttactgaagcctccacctgtcaggttcaagcaattctagtgcctcaggctcctgagtagctgggactacaggtatgtgccactacacccagctaatttttgtatttttagtagagacggggtttcaccatgttgaccaggctggtctcaattgctggcctcacatgatctgcccgcctcagtctcccaaagtgctgggattacagaagtgagccaccacacccagccaggtcattgggtattatattttgttcaggatatataagtgctatctgcagaaggtcatttattaacagtttattcagttatactagaagtagaactct

SEQ ID NO: 4895 - protein, 47 aa, Homo sapiens
MKSHLPSSAVEHRVLLCGPSWSAVVQSQLTEASTCQVQAILVPQAPE

SEQ ID NO: 4896 - DNA, 2163 bp, Homo sapiens
ggtgtttgtttcagtggtcactgaagtaatctctccgcaggcccatgccagccatactgcccagacttgaattctctccagagaagtttctcatccaagatccccagtaaagaaaggactactgaaggaaaaaggaaagaaaatagagcttctttcatctttattctggggttttctgcaatttttttaaagagaaaggtaagctacataaaaaggagtttgcttggtgagcaatggtggagtgaggctcatgatttgagtatttcaagatgtcaactaagggcacctcaaccaaatgcacctcatgcccactgactcaacaggtcgagaccttaaggaaatgcggcattccattgcataatgcttcaatatgagttaacaagacaaatgagcagagaaactatgactctccatgctgcagaaggaaaatgctcctagcgaacatctgctttgggaccaaggacagaacccagagggctaacaaagaagcaccatggagttggtacacagacctctgagaacggatcctaaatggctatcgctgctacctggcatctcaccagagaactggttctggaagctctcaaggaaggttgaagcttttaactgctactgaccaatacaggaaaaacagaaatgtatggagtctcactatgtcacccaggctggagtgcagtggcgtgatctcggctcactgaaacctccaccgcccaggttcaagcaatcctcctgtctcagcctcctgagtagctgcaactacaggcacctgccaccatgcctggctaatttttgtatttttagtagagacagggtttctccatgttggccaggctggtctcaaactcctgacctcaggtgatccacccacctcggcctcctaaagtgctgggatttcaggcgtgagccactgccttcagctggaaatagcatttactttagagtgtgattgtaaagattagtgtgataatatgtacagaacatcttatattcatggagggcacacatttgttcaatgaattgtactgatgagatcacaaatcacatttcctcacccttcaaccactgcgcatccaatatcatttccaagtaggtatgatttctgaatcataatagaaactaacacttcttgggtatttctgttttgtgcctagcaccactataagtgttttacctatattaactcaattaattctcccaagaatttatgaagtaaatgcttttatttttccaattttaccgaagaggaaattaaggcagagaaagttaaaagaaaaaaaaaaaccttatattacgtagctagaaagtgtcagagctagggtttgaacccaagcaatctggctccagagtcttagccactggtacagtgattctttaataggactactaataactatattcttattgctaactattctataagacttctgggtatttacaggactgtcttgtgtaattattaatagggcactttacccaattcagccaaaattcctaaggagaatcattgacttagaaaaaccacatctgattgaattgagcacgccaagaatgaggagagatggtgtctcctttcacaagggtatctggacagagcttaaagtgtcaatctaattataaactgttattctcctattatggaaaaaccctgtaattggatactagaaaattctctgtaaaaccttgtccctcaggcaaggcttaatactggtctcagaagcccagttaagtatgttttaaaaaattggttatccttaaaaatactgaagggaaatacttcccattaatgcagttgtcattggatggtaacataataggtaatatatatttttttcttttttaaaagtcttttattcaaaatttttcttaagaggaagaattgttataaaaacaatgtatttcttaagtataagaaaacatttctacaaaaagtagaaattttagataagtaaaaataaaatgaattatacataattaattacaccattgcatgttaaaaatctgctatattttccaaattgttctaatgtaaggatattcataaattgtgtgagtctgtataaaagatggaatcatattcttcatgttgctttctattctgttgtgcttttcacttacaagaatactgtgaatatacttcactatgaataaatgcacatgtatgtc

SEQ ID NO: 4897 - protein, 72 aa, Homo sapiens
MESHYVTQAGVQWRDLGSLKPPPPRFKQSSCLSLLSSCNYRHLPPCLANFCIFSRDRVSPCWPGWSQTPDLR

SEQ ID NO: 4898 - DNA, 1503 bp, Homo sapiens
agctctggagataagaaggccaaaatgagtcctatggagtatttgcacagccagtttcttctggaagcttcaagagagagtctgttccttgccttttccagcttctagaggcagccgacactccttggctcatggccacataactctgacctgtgtctattgtcacatcactgactcttctgacctcctaccaggacccttgtgattacattgggcctgcttggataacccaggatagcttctccatcttaaggttgttaatcacatctgcagaatgcctgttgccatataagttaacatattcacaggttctaggaagaaggacatggacatcttccaggaagcattattctgtctaccacagcagttctttcaactgtatgtttcccagaccattcatccttccctgcacaaagtcaagttcatcaacgttcttactgaaatgtgatgttgtttatcacgaatatatataaagcaaagactctctaatcctgtactttgcatctggcatttcaaaatgaagtctaaaagtgtacaatttctactcctatgcaagtttcctcttcttagatttgacctcctattctggactatgaagatggagactccatagagagaaattgaagtaactgagaaaacaacacattgccagttgctgtgttctaaactagactctcatttaaggctgtatatgcatactggatagtgggatttgaatgtgtatcagtcaaaagtggaatgttctgcaatgatacctatatttttactactacagaagatgttgaatggtataatgtgcacagtgctggaatagagagcaggagtcctagggaggagttttagctttgccattacctagatgtataatcttgtaaaagtgattggacctttgcaggcctcagttccctcatttataaaatgaagaacacagactagattatttctaatgtctttcccaactccaagaattaaggccccctcattccactgtgattctttttcttaattaattaatttatttttattttattataagtaccgggatacatgtgcagaatatgcaggtttcttacataggtatacatgcaccaaggtggtttgctgcacctatcaacccgtcatctaggttttaaaccccacatgcattaggtatttgtcctaatgttctctctcccctggccccccatccaccaacaggcccgagtgtgtgatgttctactccctgtctccctgtgttctcattgttcaactcccacttatgagtgagaacatgtggtgtttggttttctgttcctgtgttagtttgctgagcttccagcttcacacgtgtccctgcaaaagacatgatcctattcttttttctggctgcatagtattccatggtgtataagtgccacatttgctttatctagtcgatcattgatgggcatttgggttagttctaagtgtttgctattgtgaatagtgctgcaataaacatacatgtgcatgtgtctttatagt

SEQ ID NO: 4899 - protein, 40 aa, Homo sapiens
MDIFQEALFCLPQQFFQLYVSQTIHPSLHKVKFINVLTEM

SEQ ID NO: 4900 - DNA, 1033 bp, Homo sapiens
gtgcgtggaaatggccggctcaagcagccgagacagagcagagtgtgagagagctaatggaagtaagctgctgaagaaaccgtattcacctgcctatggcccgtgagtgttcttgaagctatctggcgttcatccacccactcccctcggacctcagcatgggctggaacctcaccctagacctaacagatgctctcatgagcactcttcaaactcagaaatttcccttacgtcatcacgagccgaagatttctaattaaattcctcccgagttcattctgcttcctgccacactgtgaaaaaggtgcctttcttctggtttgccttctaccatgactgcaagtttcctgaggcctccccagccatgcagaactaacatttggataccacttacctctgagacagttcttttggaaattataaatatatttctttccggggatcaaaagaatccacatcaacatgaaagatgaagtgttgaatctgaattcacagctgctttatgcaatctggaaaaaggtcaagctggagtgcagtggcccaatcctggctcactgcaacctctgcctcctgggctcaaggcatccttccacctcagcctcccaagtagctgggactacaggagagaagacaatgaggtcagctagaatgatggattgtcatcactggggcacgggaaaggggttgagcaagtcaatgtatgttttccagagcctacagaatgtgtctgattctctgaagtatattttttctaaatgccagattcaagcattaagcactgtgcagttttgagagaagaagttataaagcaaaactgacttgagtaaccaccagcccaacattcgggactttgtggggattgctatggctctgccggacttacaagcaatagtgatgcagaacctgtcattagcatgtgtaatgcttgtcaaaaaataatctcccaagaaatgttttaattttcactggtcagtgcactaccaatactagttttggcatggcggataataaataacaaacctttgtttcgaat

SEQ ID NO: 4901 - protein, 109 aa, Homo sapiens
MKDEVLNLNSQLLYAIWKKVKLECSGPILAHCNLCLLGSRHPSTSASQVAGTTGEKTMRSARMMDCHHWGTGKGLSKSMYVFQSLQNVSDSLKYIFSKCQIQALSTVQF

SEQ ID NO: 4902 - DNA, 485 bp, Homo sapiens
cagaaagcagaggggaggaagctccaccgtcatgagaatgggaagcagaggcagcggcagcgtgcacagacatcctttgaaggtttgttataaacacagaaactgatgtctgggaaaagacaacacagcggaacatatccaagggacaacagtttacctgcctcccagaaggatgctgagtagccatgtcaactctctcaaccaacaacagtcaatgtagctcaaagtgcagggtggatgtgagatgagacatttgagagagagtgagcaaaccctgctggaataaagataacctggcctcatattaacatcaaatgtctagaattccaaaaacagaagatcacacaaactatgctaactccgagtggaatttcaagacattaatgtaagagagggtgaccaaaccatgctggagtaaagataacctgtccagtattatcccaacggactgcttgacaaatcatgatttgccaaacttaattcag

SEQ ID NO: 4903 - protein, 32 aa, Homo sapiens
RFVINTETDVWEKTTQRNISKGQQFTCLPEGC

SEQ ID NO: 4904 - DNA, 166 bp, Homo sapiens
acttagtgttttttgaaagaatggtactctgtctacataacaaaactagttatttataatacaattaaagtgataaaggtcttgagattttatctatcttaagatatattttccacattggttcttgaaattctcttaacattaatggcacaggcagccatgaagt

SEQ ID NO: 4905 - protein, 31 aa, Homo sapiens
CFLKEWYSVYITKLVIYNTIKVIKVLRFYLS

SEQ ID NO: 4906 - DNA, 860 bp, Homo sapiens
cggcgcggtgtgcgcgcggctcgggcggacgcggcggctgctgccggggagcgagccggcggcgcgggcgagccgagcgcgagaggccaatgagacttgaaccctgagcctaagttgtcaccagcaggactgatgtgcacacagaaggaatgaagtatggatgtgaaagaacgcaggccttactgctccctgaccaagagcagacgagagaaggaacggcgctacacaaattcctccgcagacaatgaggagtgccgggtacccacacagaagtcctacagttccagcgagacattgaaagcttttgatcatgattcctcgcggctgctttacggcaacagagtgaaggatttggttcacagagaagcagacgagttcactagacaaggacagaattttaccctaaggcagttaggagtttgtgaaccagcaactcgaagaggactggcattttgtgcggaaatggggctccctcacagaggttactctatcagtgcagggtcagatgctgatactgaaaatgaagcagtgatgtccccagagcatgccatgagactttggggcaggggggtcaaatcaggccgcagctcctgcctgtcaagtcggtccaactcagccctcaccctgacagatacggagcacgaaaacaagtccgacagtgagaatgcttgagatgtgttcttggaagttctattgtatcactaaaggttgaaaagagaaggagatggatgaaataactcaccaaaaggaaacgaatttaagagccagatgctgatgtgttttcatctggtttaacatgagagcttgccttgactgttttcttcatttgaaataactgtgaatgaggctgtttttcccag

SEQ ID NO: 4907 - protein, 171 aa, Homo sapiens
MDVKERRPYCSLTKSRREKERRYTNSSADNEECRVPTQKSYSSSETLKAFDHDSSRLLYGNRVKDLVHREADEFTRQGQNFTLRQLGVCEPATRRGLAFCAEMGLPHRGYSISAGSDADTENEAVMSPEHAMRLWGRGVKSGRSSCLSSRSNSALTLTDTEHENKSDSENA

SEQ ID NO: 4908 - DNA, 8998 bp, Homo sapiens
gggtctggagcttggaggagaagtctgaactaaggataaactaaagagaggccaatgagacttgaaccctgagcctaagttgtcaccagcaggactgatgtgcacacagaaggaatgaagtatggatgtgaaagaacgcaggccttactgctccctgaccaagagcagacgagagaaggaacggcgctacacaaattcctccgcagacaatgaggagtgccgggtacccacacagaagtcctacagttccagcgagacattgaaagcttttgatcatgattcctcgcggctgctttacggcaacagagtgaaggatttggttcacagagaagcagacgagttcactagacaaggacagaattttaccctaaggcagttaggagtttgtgaaccagcaactcgaagaggactggcattttgtgcggaaatggggctccctcacagaggttactctatcagtgcagggtcagatgctgatactgaaaatgaagcagtgatgtccccagagcatgccatgagactttggggcaggggggtcaaatcaggccgcagctcctgcctgtcaagtcggtccaactcagccctcaccctgacagatacggagcacgaaaacaagtccgacagtgagaatgagcaacctgcaagcaatcaaggccagtctaccctgcagcccttgccgccttcccataagcagcactctgcacagcatcatccatccatcacttctctcaacagaaactccctgaccaatagaaggaaccagagtccggccccgccggctgctttgcccgccgagctgcaaaccacacccgagtccgtccagctgcaggacagctgggtccttggcagtaatgtaccactggaaagcaggcatttcctattcaaaacaggaacaggtacaacgccactgttcagtactgcaaccccaggatacacaatggcatctggctctgtttattcaccacctactcggccactacctagaaacaccctatcaagaagtgcttttaaattcaagaagtcttcaaagtactgtagctggaaatgcactgcactgtgtgccgtaggggtctcggtgctcctggcaatactcctgtcttattttatagcaatgcatctctttggcctcaactggcagctacagcagactgaaaatgacacatttgagaatggaaaagtgaattctgataccatgccaacaaacactgtgtcattaccttctggagacaatggaaaattaggtggatttacgcaagaaaataacaccatagattccggagaacttgatattggccgaagagcaattcaagagattcctcccgggatcttctggagatcacagctcttcattgatcagccacagtttcttaaattcaatatctctcttcagaaggatgcattgattggagtatatggccggaaaggcttaccgccttcccatactcagtatgacttcgtggagctcctggatggcagcaggctgattgccagagagcagcggagcctgcttgagacggagagagccgggcggcaggcgagatccgtcagccttcatgaggccggctttatccagtacttggattctggaatctggcatctggctttttataatgatgggaaaaatgcagagcaggtgtcttttaataccattgttatagagtctgtggtggaatgtccccgaaattgccatggaaatggagaatgcgtttctggaacttgccattgttttccaggatttctgggtccggattgttcaagagccgcctgtccagtgttatgtagtggcaacgggcagtactccaagggccgctgcctgtgtttcagcggctggaagggcaccgagtgtgatgtgccgactacccagtgtattgacccacagtgtgggggtcgtgggatttgtatcatgggctcttgtgcttgcaactcaggatacaaaggagaaagttgtgaagaagctgactgtatagaccctgggtgttctaatcatggtgtgtgtatccacggggaatgtcactgcagtccaggatggggaggtagcaattgtgaaatactgaagaccatgtgtccagaccagtgctccggccacggaacgtatcttcaagaaagtggctcctgcacgtgtgaccctaactggactggcccagactgctcaaacgaaatatgttctgtggactgtggctcacacggcgtttgcatgggggggacgtgtcgctgtgaagaaggctggacgggcccagcctgtaatcagagagcctgccacccccgctgtgccgagcacgggacctgcaaggatggcaagtgtgaatgcagccagggctggaatggagagcactgcactatcgagggttgtcctggtctgtgcaacagcaatggaagatgtaccctggaccaaaatggctggcattgtgtgtgccagcctggatggagaggagcaggctgtgacgtagccatggagactctttgcacagatagcaaggacaatgaaggagatggactcattgactgcatggatcccgattgctgcctacagagttcctgccagaatcagccctattgtcggggactgccggatcctcaggacatcattagccaaagccttcaatcgccttctcagcaagctgccaaatccttttatgatcgaatcagtttccttataggatctgatagcacccatgttatacctggagaaagtcctttcaataagagccttgcatctgtcatcagaggccaagtactgactgctgatggaactccacttattggagtaaatgtctcgtttttccattacccagaatatggatatactattacccgccaggacggaatgtttgacttggtggcaaatggtggggcctctctaactttggtatttgaacgatccccattcctcactcagtatcatactgtgtggattccatggaatgtcttttatgtgatggataccctagtcatgaagaaagaagagaatgatattcccagctgtgatctgagtggattcgtgaggccaaatcccatcattgtgtcatcacctttatccacctttttcagatcttctcctgaagacagtcccatcattcccgaaacacaggtactccacgaggaaactacaattccaggaacagatttgaaactctcctacttgagttccagagctgcagggtataagtcagttctcaagatcaccatgacccagtctattattccatttaatttaatgaaggttcatcttatggtagctgtagtaggaagactcttccaaaagtggtttcctgcctcaccaaacttggcctatactttcatatgggataaaacagatgcatataatcagaaagtctatggtctatctgaagctgttgtgtcagttggatatgagtatgagtcgtgtttggacctgactctgtgggaaaagaggactgccattctgcagggctatgaattggatgcgtccaacatgggtggctggacattagataaacatcacgtgctggatgtacagaacggtatactgtacaagggaaacggggaaaaccagttcatctcccagcagcctccagtcgtgagtagcatcatgggcaatgggcgaaggcgcagcatttcctgccccagttgcaatggtcaagctgatggtaacaagttactggccccagtggcgctagcttgtgggatcgatggcagtctgtacgtaggcgatttcaactatgtgcggcggatattcccttctggaaatgtaacaagtgtcttagaactaagcagcaacccagctcatagatactaccttgcaacggatccagtcacgggagatctgtacgtttctgacacaaacacccgcagaatttatcgcccaaagtcacttacgggggcaaaagacttgactaaaaatgcagaagtcgtcgcagggacaggggagcaatgccttccgtttgacgaggcgagatgtggggatggagggaaggccgtggaagccacactcatgagtcccaaaggaatggcagttgataagaatggattaatctactttgttgatggaaccatgattaggaaagttgaccaaaatggaatcatatcaactcttctgggctctaacgatttgacttcagccagacctttaacttgtgacaccagcatgcacatcagccaggtacgtctggaatggcccactgacctagccattaaccctatggataactccatttatgtcctggataataatgtagttttacagatcactgaaaatcgtcaagttcgcattgctgctggacggcccatgcactgtcaggttcccggagtggaatatcctgtggggaagcacgcggtgcagacaacactggaatcagccactgccattgctgtgtcctacagtggggtcctgtacattactgaaactgatgagaagaaaattaaccggataaggcaggtcacaacagatggagaaatctccttagtggccggaataccttcagagtgtgactgcaaaaatgatgccaactgtgactgttaccagagtggagatggctacgccaaggatgccaaactcagtgccccatcctccctggctgcttctccagatggtacactgtatattgcagatctagggaatatccggatccgggctgtgtcaaagaataagcctttacttaactctatgaacttctatgaagttgcgtctccaactgatcaagaactctacatctttgacatcaatggtactcaccaatatactgtaagtttagtcactggtgattacctttacaattttagctacagcaatgacaatgatattactgctgtgacagacagcaatggcaacacccttagaattagacgggacccaaatcgcatgccagttcgagtggtgtctcctgataaccaagtgatatggttgacaataggaacaaatggatgtttgaaaagcatgactgctcaaggactggaattagttttgtttacttaccatggcaatagtggccttttagccactaaaagtgatgaaactggatggacaacgttttttgactatgacagtgaaggtcgtctgacaaatgttacgtttccaactggagtggtcacaaacctgcatggggacatggacaaggctatcacagtggacattgagtcatctagccgagaagaagatgtcagcatcacttcaaatctgtcctcgatcgattctttctacaccatggttcaagatcagttaagaaacagctaccagattggttatgacggctccctcagaattatctacgccagtggcctggactcacactaccaaacagagccgcacgttctggctggcaccgctaatccgacggttgccaaaagaaacatgactttgcctggcgagaacggtcaaaacttggtggaatggagattccgaaaagagcaagcccaagggaaagtcaatgtctttggccgcaagctcagggttaatggcagaaacctcctttcagttgactttgatcgaacaacaaagacagaaaagatctatgacgaccaccgtaaatttctactgaggatcgcctacgacacgtctgggcacccgactctctggctgccaagcagcaagctgatggccgtcaatgtcacctattcatccacaggtcaaattgccagcatccagcgaggcaccactagcgagaaagtagattatgacggacaggggaggatcgtgtctcgggtctttgctgatggtaaaacatggagttacacatatttagaaaagtccatggttcttctgcttcatagccagcggcagtacatcttcgaatacgatatgtgggaccgcctgtctgccatcaccatgcccagtgtggctcgccacaccatgcagaccatccgatccattggctactaccgcaacatatacaaccccccggaaagcaacgcctccatcatcacggactacaacgaggaagggctgcttctacaaacagctttcttgggtacaagtcggagggtcttattcaaatacagaaggcagactaggctctcagaaattttatatgatagcacaagagtcagttttacctatgatgaaacagcaggagtcctaaagacagtaaacctccagagtgatggttttatttgcaccattagatacaggcaaattggtcccctgattgacaggcagattttccgctttagtgaagatgggatggtaaatgcaagatttgactatagctatgacaacagctttcgagtgaccagcatgcagggtgtgatcaatgaaacgccactgcctattgatctgtatcagtttgatgacatttctggcaaagttgagcagtttggaaagtttggagttatatattatgatattaaccagatcatttctacagctgtaatgacctatacgaagcactttgatgctcatggccgtatcaaggagattcaatatgagatattcaggtcgctcatgtactggattacaattcagtatgataacatgggtcgggtaaccaagagagagattaaaatagggccctttgccaacaccaccaaatatgcttatgaatatgatgttgatggacagctccaaacagtttacctcaatgaaaagataatgtggcggtacaactacgatctgaatggaaacctccatttactgaacccaagtaacagtgcgcgtctgacaccccttcgctatgacctgcgagacagaatcactcgactgggtgatgttcaatatcggttggatgaagatggtttcctacgtcaaaggggcacggaaatctttgaatatagctccaaggggcttctaactcgagtttacagtaaaggcagtggctggacagtgatctaccgttatgacggcctgggaaggcgtgtttctagcaaaaccagtctaggacagcacctgcagtttttttatgctgacttaacttatcccactaggattactcatgtctacaaccattcgagttcagaaattacctccctgtattatgatctccaaggacatctttttgccatggaaatcagcagtggggatgaattctatattgcatcggataacacagggacaccactggctgtgttcagtagcaatgggcttatgctgaaacagattcagtacactgcatatggggaaatctattttgactctaatattgactttcaactggtaattggatttcatggtggcctgtatgacccactcaccaaattaatccactttggagaaagagattatgacattttggcaggacggtggacaacacctgacatagaaatctggaaaagaattgggaaggacccagctccttttaacttgtacatgtttaggaataacaaccctgcaagcaaaatccatgacgtgaaagattacatcacagatgttaacagctggctggtgacatttggtttccatctgcacaatgctattcctggattccctgttcccaaatttgatttaacagaaccttcttacgaacttgtgaagagtcagcagtgggatgatataccgcccatcttcggagtccagcagcaagtggcgcggcaggccaaggccttcctgtcgctggggaagatggccgaggtgcaggtgagccggcgccgggccggcggcgcgcagtcctggctgtggttcgccacggtcaagtcgctgatcggcaagggcgtcatgctggccgtcagccagggccgcgtgcagaccaacgtgctcaacatcgccaacgaggactgcatcaaggtggcggccgtgctcaacaacgccttctacctggagaacctgcacttcaccatcgagggcaaggacacgcactacttcatcaagaccaccacgcccgagagcgacctgggcacgctgcggttgaccagcggccgcaaggcgctggagaacggcatcaacgtgacggtgtcgcagtccaccacggtggtgaacggcaggacgcgcaggttcgcggacgtggagatgcagttcggcgcgctggcgctgcacgtgcgctacggcatgaccctggacgaggagaaggcgcgcatcctggagcaggcgcggcagcgcgcgctcgcccgggcctgggcgcgcgagcagcagcgcgtgcgcgacggcgaggagggcgcgcgcctctggacggagggcgagaagcggcagctgctgagcgccggcaaggtgcagggctacgacgggtactacgtactctcggtggagcagtaccccgagctggccgacagcgccaacaacatccagttcctgcggcagagcgagatcggcaggaggtaacgcccgggccgcgcccgccgagccgctcacgccctgcccacattgtcctgtggcacaacccgagtgggactctccaacgcccaagagccttcctcccgggggaatgagactgctgttacgacccacacccacaccgcgaaaacaaggaccgcttttttccgaatgaccttaaaggtgatcggctttaacgaatatgtttacatatgcatagcgctgcactcagtcggactgaacgtagccagaggaaaaaaaaatcatcaaggacaaaggcctcgacctgttgcgctgggccgtctgttccttctaggcactgtatttaactaactttaaaaaagaaaaaaaaatgtgtacagtgtttccaaatagtcccgaattgtcgacctttgcttacaagaagtagtctgtctgcataggatgtgatagctatctctgttcattttacaatgtggggcaaagttactgtttctagacaacccaactgctttccctgtgcagctttgtagaaggacattggcacagtgacttctgcggcggggatttattaatggattttacaatgctaacgtggtttcccttcggggaaaaaactggcaactagaatccttgtcactgataagcaaaggaaatcctgatttttttgtaaattatgtgagacaagttgtttatggatttttatatgaattacaatttactgtacatcaaatcttagtctcagaggagttaatttatgtaaagtgtttaaaaatttatacttaaaaataaaatgataaaaacgtg

SEQ ID NO: 4909 - protein, 2699 aa, Homo sapiens
MDVKERRPYCSLTKSRREKERRYTNSSADNEECRVPTQKSYSSSETLKAFDHDSSRLLYGNRVKDLVHREADEFTRQGQNFTLRQLGVCEPATRRGLAFCAEMGLPHRGYSISAGSDADTENEAVMSPEHAMRLWGRGVKSGRSSCLSSRSNSALTLTDTEHENKSDSENEQPASNQGQSTLQPLPPSHKQHSAQHHPSITSLNRNSLTNRRNQSPAPPAALPAELQTTPESVQLQDSWVLGSNVPLESRHFLFKTGTGTTPLFSTATPGYTMASGSVYSPPTRPLPRNTLSRSAFKFKKSSKYCSWKCTALCAVGVSVLLAILLSYFIAMHLFGLNWQLQQTENDTFENGKVNSDTMPTNTVSLPSGDNGKLGGFTQENNTIDSGELDIGRRAIQEIPPGIFWRSQLFIDQPQFLKFNISLQKDALIGVYGRKGLPPSHTQYDFVELLDGSRLIAREQRSLLETERAGRQARSVSLHEAGFIQYLDSGIWHLAFYNDGKNAEQVSFNTIVIESVVECPRNCHGNGECVSGTCHCFPGFLGPDCSRAACPVLCSGNGQYSKGRCLCFSGWKGTECDVPTTQCIDPQCGGRGICIMGSCACNSGYKGESCEEADCIDPGCSNHGVCIHGECHCSPGWGGSNCEILKTMCPDQCSGHGTYLQESGSCTCDPNWTGPDCSNEICSVDCGSHGVCMGGTCRCEEGWTGPACNQRACHPRCAEHGTCKDGKCECSQGWNGEHCTIEGCPGLCNSNGRCTLDQNGWHCVCQPGWRGAGCDVAMETLCTDSKDNEGDGLIDCMDPDCCLQSSCQNQPYCRGLPDPQDIISQSLQSPSQQAAKSFYDRISFLIGSDSTHVIPGESPFNKSLASVIRGQVLTADGTPLIGVNVSFFHYPEYGYTITRQDGMFDLVANGGASLTLVFERSPFLTQYHTVWIPWNVFYVMDTLVMKKEENDIPSCDLSGFVRPNPIIVSSPLSTFFRSSPEDSPIIPETQVLHEETTIPGTDLKLSYLSSRAAGYKSVLKITMTQSIIPFNLMKVHLMVAVVGRLFQKWFPASPNLAYTFIWDKTDAYNQKVYGLSEAVVSVGYEYESCLDLTLWEKRTAILQGYELDASNMGGWTLDKHHVLDVQNGILYKGNGENQFISQQPPVVSSIMGNGRRRSISCPSCNGQADGNKLLAPVALACGIDGSLYVGDFNYVRRIFPSGNVTSVLELSSNPAHRYYLATDPVTGDLYVSDTNTRRIYRPKSLTGAKDLTKNAEVVAGTGEQCLPFDEARCGDGGKAVEATLMSPKGMAVDKNGLIYFVDGTMIRKVDQNGIISTLLGSNDLTSARPLTCDTSMHISQVRLEWPTDLAINPMDNSIYVLDNNVVLQITENRQVRIAAGRPMHCQVPGVEYPVGKHAVQTTLESATAIAVSYSGVLYITETDEKKINRIRQVTTDGEISLVAGIPSECDCKNDANCDCYQSGDGYAKDAKLSAPSSLAASPDGTLYIADLGNIRIRAVSKNKPLLNSMNFYEVASPTDQELYIFDINGTHQYTVSLVTGDYLYNFSYSNDNDITAVTDSNGNTLRIRRDPNRMPVRVVSPDNQVIWLTIGTNGCLKSMTAQGLELVLFTYHGNSGLLATKSDETGWTTFFDYDSEGRLTNVTFPTGVVTNLHGDMDKAITVDIESSSREEDVSITSNLSSIDSFYTMVQDQLRNSYQIGYDGSLRIIYASGLDSHYQTEPHVLAGTANPTVAKRNMTLPGENGQNLVEWRFRKEQAQGKVNVFGRKLRVNGRNLLSVDFDRTTKTEKIYDDHRKFLLRIAYDTSGHPTLWLPSSKLMAVNVTYSSTGQIASIQRGTTSEKVDYDGQGRIVSRVFADGKTWSYTYLEKSMVLLLHSQRQYIFEYDMWDRLSAITMPSVARHTMQTIRSIGYYRNIYNPPESNASIITDYNEEGLLLQTAFLGTSRRVLFKYRRQTRLSEILYDSTRVSFTYDETAGVLKTVNLQSDGFICTIRYRQIGPLIDRQIFRFSEDGMVNARFDYSYDNSFRVTSMQGVINETPLPIDLYQFDDISGKVEQFGKFGVIYYDINQIISTAVMTYTKHFDAHGRIKEIQYEIFRSLMYWITIQYDNMGRVTKREIKIGPFANTTKYAYEYDVDGQLQTVYLNEKIMWRYNYDLNGNLHLLNPSNSARLTPLRYDLRDRITRLGDVQYRLDEDGFLRQRGTEIFEYSSKGLLTRVYSKGSGWTVIYRYDGLGRRVSSKTSLGQHLQFFYADLTYPTRITHVYNHSSSEITSLYYDLQGHLFAMEISSGDEFYIASDNTGTPLAVFSSNGLMLKQIQYTAYGEIYFDSNIDFQLVIGFHGGLYDPLTKLIHFGERDYDILAGRWTTPDIEIWKRIGKDPAPFNLYMFRNNNPASKIHDVKDYITDVNSWLVTFGFHLHNAIPGFPVPKFDLTEPSYELVKSQQWDDIPPIFGVQQQVARQAKAFLSLGKMAEVQVSRRRAGGAQSWLWFATVKSLIGKGVMLAVSQGRVQTNVLNIANEDCIKVAAVLNNAFYLENLHFTIEGKDTHYFIKTTTPESDLGTLRLTSGRKALENGINVTVSQSTTVVNGRTRRFADVEMQFGALALHVRYGMTLDEEKARILEQARQRALARAWAREQQRVRDGEEGARLWTEGEKRQLLSAGKVQGYDGYYVLSVEQYPELADSANNIQFLRQSEIGRR

SEQ ID NO: 4910 - DNA, 10894 bp, Homo sapiens
gggtctggagcttggaggagaagtctgaactaaggataaactaaagagaggccaatgagacttgaaccctgagcctaagttgtcaccagcaggactgatgtgcacacagaaggaatgaagtatggatgtgaaagaacgcaggccttactgctccctgaccaagagcagacgagagaaggaacggcgctacacaaattcctccgcagacaatgaggagtgccgggtacccacacagaagtcctacagttccagcgagacattgaaagcttttgatcatgattcctcgcggctgctttacggcaacagagtgaaggatttggttcacagagaagcagacgagttcactagacaaggacagaattttaccctaaggcagttaggagtttgtgaaccagcaactcgaagaggactggcattttgtgcggaaatggggctccctcacagaggttactctatcagtgcagggtcagatgctgatactgaaaatgaagcagtgatgtccccagagcatgccatgagactttggggcaggggggtcaaatcaggccgcagctcctgcctgtcaagtcggtccaactcagccctcaccctgacagatacggagcacgaaaacaagtccgacagtgagaatgagcaacctgcaagcaatcaaggccagtctaccctgcagcccttgccgccttcccataagcagcactctgcacagcatcatccatccatcacttctctcaacagaaactccctgaccaatagaaggaaccagagtccggccccgccggctgctttgcccgccgagctgcaaaccacacccgagtccgtccagctgcaggacagctgggtccttggcagtaatgtaccactggaaagcaggcatttcctattcaaaacaggaacaggtacaacgccactgttcagtactgcaaccccaggatacacaatggcatctggctctgtttattcaccacctactcggccactacctagaaacaccctatcaagaagtgcttttaaattcaagaagtcttcaaagtactgtagctggaaatgcactgcactgtgtgccgtaggggtctcggtgctcctggcaatactcctgtcttattttatagcaatgcatctctttggcctcaactggcagctacagcagactgaaaatgacacatttgagaatggaaaagtgaattctgataccatgccaacaaacactgtgtcattaccttctggagacaatggaaaattaggtggatttacgcaagaaaataacaccatagattccggagaacttgatattggccgaagagcaattcaagagattcctcccgggatcttctggagatcacagctcttcattgatcagccacagtttcttaaattcaatatctctcttcagaaggatgcattgattggagtatatggccggaaaggcttaccgccttcccatactcagtatgacttcgtggagctcctggatggcagcaggctgattgccagagagcagcggagcctgcttgagacggagagagccgggcggcaggcgagatccgtcagccttcatgaggccggctttatccagtacttggattctggaatctggcatctggctttttataatgatgggaaaaatgcagagcaggtgtcttttaataccattgttatagagtctgtggtggaatgtccccgaaattgccatggaaatggagaatgcgtttctggaacttgccattgttttccaggatttctgggtccggattgttcaagagccgcctgtccagtgttatgtagtggcaacgggcagtactccaagggccgctgcctgtgtttcagcggctggaagggcaccgagtgtgatgtgccgactacccagtgtattgacccacagtgtgggggtcgtgggatttgtatcatgggctcttgtgcttgcaactcaggatacaaaggagaaagttgtgaagaagctgactgtatagaccctgggtgttctaatcatggtgtgtgtatccacggggaatgtcactgcagtccaggatggggaggtagcaattgtgaaatactgaagaccatgtgtccagaccagtgctccggccacggaacgtatcttcaagaaagtggctcctgcacgtgtgaccctaactggactggcccagactgctcaaacgaaatatgttctgtggactgtggctcacacggcgtttgcatgggggggacgtgtcgctgtgaagaaggctggacgggcccagcctgtaatcagagagcctgccacccccgctgtgccgagcacgggacctgcaaggatggcaagtgtgaatgcagccagggctggaatggagagcactgcactatcgagggttgtcctggtctgtgcaacagcaatggaagatgtaccctggaccaaaatggctggcattgtgtgtgccagcctggatggagaggagcaggctgtgacgtagccatggagactctttgcacagatagcaaggacaatgaaggagatggactcattgactgcatggatcccgattgctgcctacagagttcctgccagaatcagccctattgtcggggactgccggatcctcaggacatcattagccaaagccttcaatcgccttctcagcaagctgccaaatccttttatgatcgaatcagtttccttataggatctgatagcacccatgttatacctggagaaagtcctttcaataagagccttgcatctgtcatcagaggccaagtactgactgctgatggaactccacttattggagtaaatgtctcgtttttccattacccagaatatggatatactattacccgccaggacggaatgtttgacttggtggcaaatggtggggcctctctaactttggtatttgaacgatccccattcctcactcagtatcatactgtgtggattccatggaatgtcttttatgtgatggataccctagtcatgaagaaagaagagaatgatattcccagctgtgatctgagtggattcgtgaggccaaatcccatcattgtgtcatcacctttatccacctttttcagatcttctcctgaagacagtcccatcattcccgaaacacaggtactccacgaggaaactacaattccaggaacagatttgaaactctcctacttgagttccagagctgcagggtataagtcagttctcaagatcaccatgacccagtctattattccatttaatttaatgaaggttcatcttatggtagctgtagtaggaagactcttccaaaagtggtttcctgcctcaccaaacttggcctatactttcatatgggataaaacagatgcatataatcagaaagtctatggtctatctgaagctgttgtgtcagttggatatgagtatgagtcgtgtttggacctgactctgtgggaaaagaggactgccattctgcagggctatgaattggatgcgtccaacatgggtggctggacattagataaacatcacgtgctggatgtacagaacggtatactgtacaagggaaacggggaaaaccagttcatctcccagcagcctccagtcgtgagtagcatcatgggcaatgggcgaaggcgcagcatttcctgccccagttgcaatggtcaagctgatggtaacaagttactggccccagtggcgctagcttgtgggatcgatggcagtctgtacgtaggcgatttcaactatgtgcggcggatattcccttctggaaatgtaacaagtgtcttagaactaagcagcaacccagctcatagatactaccttgcaacggatccagtcacgggagatctgtacgtttctgacacaaacacccgcagaatttatcgcccaaagtcacttacgggggcaaaagacttgactaaaaatgcagaagtcgtcgcagggacaggggagcaatgccttccgtttgacgaggcgagatgtggggatggagggaaggccgtggaagccacactcatgagtcccaaaggaatggcagttgataagaatggattaatctactttgttgatggaaccatgattaggaaagttgaccaaaatggaatcatatcaactcttctgggctctaacgatttgacttcagccagacctttaacttgtgacaccagcatgcacatcagccaggtacgtctggaatggcccactgacctagccattaaccctatggataactccatttatgtcctggataataatgtagttttacagatcactgaaaatcgtcaagttcgcattgctgctggacggcccatgcactgtcaggttcccggagtggaatatcctgtggggaagcacgcggtgcagacaacactggaatcagccactgccattgctgtgtcctacagtggggtcctgtacattactgaaactgatgagaagaaaattaaccggataaggcaggtcacaacagatggagaaatctccttagtggccggaataccttcagagtgtgactgcaaaaatgatgccaactgtgactgttaccagagtggagatggctacgccaaggatgccaaactcagtgccccatcctccctggctgcttctccagatggtacactgtatattgcagatctagggaatatccggatccgggctgtgtcaaagaataagcctttacttaactctatgaacttctatgaagttgcgtctccaactgatcaagaactctacatctttgacatcaatggtactcaccaatatactgtaagtttagtcactggtgattacctttacaattttagctacagcaatgacaatgatattactgctgtgacagacagcaatggcaacacccttagaattagacgggacccaaatcgcatgccagttcgagtggtgtctcctgataaccaagtgatatggttgacaataggaacaaatggatgtttgaaaagcatgactgctcaaggactggaattagttttgtttacttaccatggcaatagtggccttttagccactaaaagtgatgaaactggatggacaacgttttttgactatgacagtgaaggtcgtctgacaaatgttacgtttccaactggagtggtcacaaacctgcatggggacatggacaaggctatcacagtggacattgagtcatctagccgagaagaagatgtcagcatcacttcaaatctgtcctcgatcgattctttctacaccatggttcaagatcagttaagaaacagctaccagattggttatgacggctccctcagaattatctacgccagtggcctggactcacactaccaaacagagccgcacgttctggctggcaccgctaatccgacggttgccaaaagaaacatgactttgcctggcgagaacggtcaaaacttggtggaatggagattccgaaaagagcaagcccaagggaaagtcaatgtctttggccgcaagctcagggttaatggcagaaacctcctttcagttgactttgatcgaacaacaaagacagaaaagatctatgacgaccaccgtaaatttctactgaggatcgcctacgacacgtctgggcacccgactctctggctgccaagcagcaagctgatggccgtcaatgtcacctattcatccacaggtcaaattgccagcatccagcgaggcaccactagcgagaaagtagattatgacggacaggggaggatcgtgtctcgggtctttgctgatggtaaaacatggagttacacatatttagaaaagtccatggttcttctgcttcatagccagcggcagtacatcttcgaatacgatatgtgggaccgcctgtctgccatcaccatgcccagtgtggctcgccacaccatgcagaccatccgatccattggctactaccgcaacatatacaaccccccggaaagcaacgcctccatcatcacggactacaacgaggaagggctgcttctacaaacagctttcttgggtacaagtcggagggtcttattcaaatacagaaggcagactaggctctcagaaattttatatgatagcacaagagtcagttttacctatgatgaaacagcaggagtcctaaagacagtaaacctccagagtgatggttttatttgcaccattagatacaggcaaattggtcccctgattgacaggcagattttccgctttagtgaagatgggatggtaaatgcaagatttgactatagctatgacaacagctttcgagtgaccagcatgcagggtgtgatcaatgaaacgccactgcctattgatctgtatcagtttgatgacatttctggcaaagttgagcagtttggaaagtttggagttatatattatgatattaaccagatcatttctacagctgtaatgacctatacgaagcactttgatgctcatggccgtatcaaggagattcaatatgagatattcaggtcgctcatgtactggattacaattcagtatgataacatgggtcgggtaaccaagagagagattaaaatagggccctttgccaacaccaccaaatatgcttatgaatatgatgttgatggacagctccaaacagtttacctcaatgaaaagataatgtggcggtacaactacgatctgaatggaaacctccatttactgaacccaagtaacagtgcgcgtctgacaccccttcgctatgacctgcgagacagaatcactcgactgggtgatgttcaatatcggttggatgaagatggtttcctacgtcaaaggggcacggaaatctttgaatatagctccaaggggcttctaactcgagtttacagtaaaggcagtggctggacagtgatctaccgttatgacggcctgggaaggcgtgtttctagcaaaaccagtctaggacagcacctgcagtttttttatgctgacttaacttatcccactaggattactcatgtctacaaccattcgagttcagaaattacctccctgtattatgatctccaaggacatctttttgccatggaaatcagcagtggggatgaattctatattgcatcggataacacagggacaccactggctgtgttcagtagcaatgggcttatgctgaaacagattcagtacactgcatatggggaaatctattttgactctaatattgactttcaactggtaattggatttcatggtggcctgtatgacccactcaccaaattaatccactttggagaaagagattatgacattttggcaggacggtggacaacacctgacatagaaatctggaaaagaattgggaaggacccagctccttttaacttgtacatgtttaggaataacaaccctgcaagcaaaatccatgacgtgaaagattacatcacagatgttaacagctggctggtgacatttggtttccatctgcacaatgctattcctggattccctgttcccaaatttgatttaacagaaccttcttacgaacttgtgaagagtcagcagtgggatgatataccgcccatcttcggagtccagcagcaagtggcgcggcaggccaaggccttcctgtcgctggggaagatggccgaggtgcaggtgagccggcgccgggccggcggcgcgcagtcctggctgtggttcgccacggtcaagtcgctgatcggcaagggcgtcatgctggccgtcagccagggccgcgtgcagaccaacgtgctcaacatcgccaacgaggactgcatcaaggtggcggccgtgctcaacaacgccttctacctggagaacctgcacttcaccatcgagggcaaggacacgcactacttcatcaagaccaccacgcccgagagcgacctgggcacgctgcggttgaccagcggccgcaaggcgctggagaacggcatcaacgtgacggtgtcgcagtccaccacggtggtgaacggcaggacgcgcaggttcgcggacgtggagatgcagttcggcgcgctggcgctgcacgtgcgctacggcatgaccctggacgaggagaaggcgcgcatcctggagcaggcgcggcagcgcgcgctcgcccgggcctgggcgcgcgagcagcagcgcgtgcgcgacggcgaggagggcgcgcgcctctggacggagggcgagaagcggcagctgctgagcgccggcaaggtgcagggctacgacgggtactacgtactctcggtggagcagtaccccgagctggccgacagcgccaacaacatccagttcctgcggcagagcgagatcggcaggaggtaacgcccgggccgcgcccgccgagccgctcacgccctgcccacattgtcctgtggcacaacccgagtgggactctccaacgcccaagagccttcctcccgggggaatgagactgctgttacgacccacacccacaccgcgaaaacaaggaccgcttttttccgaatgaccttaaaggtgatcggctttaacgaatatgtttacatatgcatagcgctgcactcagtcggactgaacgtagccagaggaaaaaaaaatcatcaaggacaaaggcctcgacctgttgcgctgggccgtctgttccttctaggcactgtatttaactaactttaaaaaagaaaaaaaaatgtgtacagtgtttccaaatagtcccgaattgtcgacctttgcttacaagaagtagtctgtctgcataggatgtgatagctatctctgttcattttacaatgtggggcaaagttactgtttctagacaacccaactgctttccctgtgcagctttgtagaaggacattggcacagtgacttctgcggcggggatttattaatggattttacaatgctaacgtggtttcccttcggggaaaaaactggcaactagaatccttgtcactgataagcaaaggaaatcctgatttttttgtaaattatgtgagacaagttgtttatggatttttatatgaattacaatttactgtacatcaaatcttagtctcagaggagttaatttatgtaaagtgtttaaaaatttatacttaaaaataaaatgataaaaacgtgaactgtgtgatttttttaaaaggattgcaccttttgttatctgttatagctgtacagtatgaattattatattgtagagatataacaacttatgcctataatgtccagaagtgttaatatttttgtattaggttgaaaaaatgtgcaagcttctatcactagatggataggaccgtgcaattctaggtgggtggcgaatcagagagctcctttctcttccctctctcacgcatcaggccagtgtcctcagcattgtcaactgagaggcacagtagacaactagggctggtggaatgtaagggaagaagattgaaaaaacgggaggaagggttctctggccctctctcaaccttgcaagtcaatggggagttgttgatataattaaccccgaggtttttactgttactgttccaaagctctgtctcttgatggaggagagaccacatcagatgctggggaaataggaggaggaaaggttctgatgtagtcgtgatcctaaacacgtgtcttaagatctaggaaagacagcagaaaccgagcagtggtgggtgagccagatggagccggtcagggttactctaagcccacatgaccaaaccatcttggggggctggtttgaatgacagcctctgctctgtctcggggaagccgggggtggcagatccagctggaagtgaactgacagccgcgccctcctgcacacatgcatgcacgcgtgtgggaacgagcccagccgccatctgcacttccgtgtcggctcagctctgacaaatctctttcctgagcactaaattcagccacgaaaatatttttagaagatatttctcagttcatcgagctatagtacacactgttttcctctatgtataatggtgataaaatatagcaagtgaacatgtcgtaaatataaaggttcaagtgatgtattgaaaataattttctaactgctttgtatgtatcacatactctaaattgcacagtaggcgtgtttattaaacagatgattggctgggaaagtttcaaaatagctactgaatttacagtatcagtgctattactgtctttgtgtatttggtagagcataccgaagtaattaatcttctaatgaatgctgatgatattttattagaatgaaagcacagattagcattaatattttttattctggaaatcctttggcaagtattatgaagcccaaatttagaaaactatgagatttcaaaccacataaacatgattctgttttccattttattttttaactgttaggtatttgcagttctgttccgtggaacttctgcaggcctgtatttagcatgctgtaagtacttttgggtgaaataggctctgagtctaaattctcagacatgtttctgatgtattaccatgaaaagcttgtgccacatgacagaagtgagatcatagtcttaacctcttcttgacgtggactggtcttcactcgggcaccgataaataacagatttggagtatctcctggtgcttattttagatgatgaagtcaaatcaacccaattagtgtcctgttagtaggtataatgagcctatttctttctaaaaagacttgtgatctggacatgcttttacaagaaatagtgaccttggggaatatgtaaacaaaagacctttttctaagagttgggagggggtgggggactgtataatgaaaagaattagcttacaaaaaagaaattgatattcaaagtattttaggcaaagccagtcaaaatgctttcatgatattttgagatgtaaattttgtctgatttgtattgttcttttcatttgccttcttaactttatatgtgacctgaattttccataacttgatgactatagattgcacctaggcattccaataaaagccaacccaatgtg

SEQ ID NO: 4911 - protein, 2699 aa, Homo sapiens; identical to SEQ ID NO: 4909

SEQ ID NO: 4912 - DNA, 1950 bp, Homo sapiens
cactgtcaggttcccggagtggaatatcctgtggggaagcacgcggtgcagacaacactggaatcagccactgccattgctgtgtcctacagtggggtcctgtacattactgaaactgatgagaagaaaattaaccggataaggcaggtcacaacagatggagaaatctccttagtggccggaataccttcagagtgtgactgcaaaaatgatgccaactgtgactgttaccagagtggagatggctacgccaaggatgccaaactcagtgccccatcctccctggctgcttctccagatggtacactgtatattgcagatctagggaatatccggatccgggctgtgtcaaagaataagcctttacttaactctatgaacttctatgaagttgcgtctccaactgatcaagaactctacatcttcggagtccagcagcaagtggcgcggcaggccaaggccttcctgtcgctggggaagatggccgaggtgcaggtgagccggcgccgggccggcggcgcgcagtcctggctgtggttcgccacggtcaagtcgctgatcggcaagggcgtcatgctggccgtcagccagggccgcgtgcagaccaacgtgctcaacatcgccaacgaggactgcatcaaggtggcggccgtgctcaacaacgccttctacctggagaacctgcacttcaccatcgagggcaaggacacgcactacttcatcaagaccaccacgcccgagagcgacctgggcacgctgcggttgaccagcggccgcaaggcgctggagaacggcatcaacgtgacggtgtcgcagtccaccacggtggtgaacggcaggacgcgcaggttcgcggacgtggagatgcagttcggcgcgctggcgctgcacgtgcgctacggcatgaccctggacgaggagaaggcgcgcatcctggagcaggcgcggcagcgcgcgctcgcccgggcctgggcgcgcgagcagcagcgcgtgcgcgacggcgaggagggcgcgcgcctctggacggagggcgagaagcggcagctgctgagcgccggcaaggtgcagggctacgacgggtactacgtactctcggtggagcagtaccccgagctggccgacagcgccaacaacatccagttcctgcggcagagcgagatcggcaggaggtaacgcccgggccgcgcccgccgagccgctcacgccctgcccacattgtcctgtggcacaacccgagtgggactctccaacgcccaagagccttcctcccgggggaatgagactgctgttacgacccacacccacaccgcgaaaacaaggaccgcttttttccgaatgaccttaaaggtgatcggctttaacgaatatgtttacatatgcatagcgctgcactcagtcggactgaacgtagccagaggaaaaaaaaatcatcaaggacaaaggcctcgacctgttgcgctgggccgtctgttccttctaggcactgtatttaactaactttaaaaaagaaaaaaaaatgtgtacagtgtttccaaatagtcccgaattgtcgacctttgcttacaagaagtagtctgtctgcataggatgtgatagctatctctgttcattttacaatgtggggcaaagttactgtttctagacaacccaactgctttccctgtgcagctttgtagaaggacattggcacagtgacttctgcggcggggatttattaatggattttacaatgctaacgtggtttcccttcggggaaaaaactggcaactagaatccttgtcactgataagcaaaggaaatcctgatttttttgtaaattatgtgagacaagttgtttatggatttttatatgaattacaatttactgtacatcaaatcttagtctcagaggagttaatttatgtaaagtgtttaaaaatttatacttaaaaataaaatgataaaaacgtg

SEQ ID NO: 4913 - protein, 265 aa, Homo sapiens
MNFYEVASPTDQELYIFGVQQQVARQAKAFLSLGKMAEVQVSRRRAGGAQSWLWFATVKSLIGKGVMLAVSQGRVQTNVLNIANEDCIKVAAVLNNAFYLENLHFTIEGKDTHYFIKTTTPESDLGTLRLTSGRKALENGINVTVSQSTTVVNGRTRRFADVEMQFGALALHVRYGMTLDEEKARILEQARQRALARAWAREQQRVRDGEEGARLWTEGEKRQLLSAGKVQGYDGYYVLSVEQYPELADSANNIQFLRQSEIGRR

SEQ ID NO: 4914 - DNA, 3846 bp, Homo sapiens
cactgtcaggttcccggagtggaatatcctgtggggaagcacgcggtgcagacaacactggaatcagccactgccattgctgtgtcctacagtggggtcctgtacattactgaaactgatgagaagaaaattaaccggataaggcaggtcacaacagatggagaaatctccttagtggccggaataccttcagagtgtgactgcaaaaatgatgccaactgtgactgttaccagagtggagatggctacgccaaggatgccaaactcagtgccccatcctccctggctgcttctccagatggtacactgtatattgcagatctagggaatatccggatccgggctgtgtcaaagaataagcctttacttaactctatgaacttctatgaagttgcgtctccaactgatcaagaactctacatcttcggagtccagcagcaagtggcgcggcaggccaaggccttcctgtcgctggggaagatggccgaggtgcaggtgagccggcgccgggccggcggcgcgcagtcctggctgtggttcgccacggtcaagtcgctgatcggcaagggcgtcatgctggccgtcagccagggccgcgtgcagaccaacgtgctcaacatcgccaacgaggactgcatcaaggtggcggccgtgctcaacaacgccttctacctggagaacctgcacttcaccatcgagggcaaggacacgcactacttcatcaagaccaccacgcccgagagcgacctgggcacgctgcggttgaccagcggccgcaaggcgctggagaacggcatcaacgtgacggtgtcgcagtccaccacggtggtgaacggcaggacgcgcaggttcgcggacgtggagatgcagttcggcgcgctggcgctgcacgtgcgctacggcatgaccctggacgaggagaaggcgcgcatcctggagcaggcgcggcagcgcgcgctcgcccgggcctgggcgcgcgagcagcagcgcgtgcgcgacggcgaggagggcgcgcgcctctggacggagggcgagaagcggcagctgctgagcgccggcaaggtgcagggctacgacgggtactacgtactctcggtggagcagtaccccgagctggccgacagcgccaacaacatccagttcctgcggcagagcgagatcggcaggaggtaacgcccgggccgcgcccgccgagccgctcacgccctgcccacattgtcctgtggcacaacccgagtgggactctccaacgcccaagagccttcctcccgggggaatgagactgctgttacgacccacacccacaccgcgaaaacaaggaccgcttttttccgaatgaccttaaaggtgatcggctttaacgaatatgtttacatatgcatagcgctgcactcagtcggactgaacgtagccagaggaaaaaaaaatcatcaaggacaaaggcctcgacctgttgcgctgggccgtctgttccttctaggcactgtatttaactaactttaaaaaagaaaaaaaaatgtgtacagtgtttccaaatagtcccgaattgtcgacctttgcttacaagaagtagtctgtctgcataggatgtgatagctatctctgttcattttacaatgtggggcaaagttactgtttctagacaacccaactgctttccctgtgcagctttgtagaaggacattggcacagtgacttctgcggcggggatttattaatggattttacaatgctaacgtggtttcccttcggggaaaaaactggcaactagaatccttgtcactgataagcaaaggaaatcctgatttttttgtaaattatgtgagacaagttgtttatggatttttatatgaattacaatttactgtacatcaaatcttagtctcagaggagttaatttatgtaaagtgtttaaaaatttatacttaaaaataaaatgataaaaacgtgaactgtgtgatttttttaaaaggattgcaccttttgttatctgttatagctgtacagtatgaattattatattgtagagatataacaacttatgcctataatgtccagaagtgttaatatttttgtattaggttgaaaaaatgtgcaagcttctatcactagatggataggaccgtgcaattctaggtgggtggcgaatcagagagctcctttctcttccctctctcacgcatcaggccagtgtcctcagcattgtcaactgagaggcacagtagacaactagggctggtggaatgtaagggaagaagattgaaaaaacgggaggaagggttctctggccctctctcaaccttgcaagtcaatggggagttgttgatataattaaccccgaggtttttactgttactgttccaaagctctgtctcttgatggaggagagaccacatcagatgctggggaaataggaggaggaaaggttctgatgtagtcgtgatcctaaacacgtgtcttaagatctaggaaagacagcagaaaccgagcagtggtgggtgagccagatggagccggtcagggttactctaagcccacatgaccaaaccatcttggggggctggtttgaatgacagcctctgctctgtctcggggaagccgggggtggcagatccagctggaagtgaactgacagccgcgccctcctgcacacatgcatgcacgcgtgtgggaacgagcccagccgccatctgcacttccgtgtcggctcagctctgacaaatctctttcctgagcactaaattcagccacgaaaatatttttagaagatatttctcagttcatcgagctatagtacacactgttttcctctatgtataatggtgataaaatatagcaagtgaacatgtcgtaaatataaaggttcaagtgatgtattgaaaataattttctaactgctttgtatgtatcacatactctaaattgcacagtaggcgtgtttattaaacagatgattggctgggaaagtttcaaaatagctactgaatttacagtatcagtgctattactgtctttgtgtatttggtagagcataccgaagtaattaatcttctaatgaatgctgatgatattttattagaatgaaagcacagattagcattaatattttttattctggaaatcctttggcaagtattatgaagcccaaatttagaaaactatgagatttcaaaccacataaacatgattctgttttccattttattttttaactgttaggtatttgcagttctgttccgtggaacttctgcaggcctgtatttagcatgctgtaagtacttttgggtgaaataggctctgagtctaaattctcagacatgtttctgatgtattaccatgaaaagcttgtgccacatgacagaagtgagatcatagtcttaacctcttcttgacgtggactggtcttcactcgggcaccgataaataacagatttggagtatctcctggtgcttattttagatgatgaagtcaaatcaacccaattagtgtcctgttagtaggtataatgagcctatttctttctaaaaagacttgtgatctggacatgcttttacaagaaatagtgaccttggggaatatgtaaacaaaagacctttttctaagagttgggagggggtgggggactgtataatgaaaagaattagcttacaaaaaagaaattgatattcaaagtattttaggcaaagccagtcaaaatgctttcatgatattttgagatgtaaattttgtctgatttgtattgttcttttcatttgccttcttaactttatatgtgacctgaattttccataacttgatgactatagattgcacctaggcattccaataaaagccaacccaatgtg

SEQ ID NO: 4915 - protein, 265 aa, Homo sapiens; identical to SEQ ID NO: 4913

SEQ ID NO: 4916 - DNA, 430 bp, Homo sapiens
atgatgcatgtgaagggctggaatgaagttgttttaatacatgggaatggaaacagacactattccaaggatgacagattatcttatatgtggttttaaaatatgtctatacaagtaaataaatattacatgtacactgtagattatgtcaccaatatttctagaggtttacattttcaccttcccttttctggttcaccttggaaagtgggtgttgccgcattctgtctgggtgctggtggtacttgtttaaaatgatgctttcgtgtttaccttgaaccatggtgtagaaagaatcgatcgaggacagatttgaagtgatgctgacatcttcttctcggctagatgactcaatgtccactgtgatagccttgtccatgtccccatgcagcaccagagaaaatttcaaaaatgatggtgtcgtctgaag

SEQ ID NO: 4917 - protein, 35 aa, Homo sapiens
MLTSSSRLDDSMSTVIALSMSPCSTRENFKNDGVV

SEQ ID NO: 4918 - DNA, 572 bp, Homo sapiens; identical to SEQ ID NO: 567

SEQ ID NO: 4919 - protein, 79 aa, Homo sapiens; identical to SEQ ID NO: 568

SEQ ID NO: 4920 - DNA, 441 bp, Homo sapiens
gcacataagagcacacgcgtggggctccagcccggccacggggagaccttttctcagcaaagggcagcactgctcgctttgctggggcagccctcccaggaagatcccagaagagatggtctgaggccctgaaagcagcagatctcacctgcattggaggatgagacgccacatgaagaagaaagaagacgccacagacagcagcgcagtaccaccttccagagatgtcctaaaaacatcctgagtttctttggcctgccagaaagtcaccttcctgactcacctgtaaggctgggaactccataatccagttggaaatgcagaaatcacctgtcttctgcgtcgatcaggctgggagctgcagaccggagctgttcctattcggccatcttggaatggacccccatgtcttattctcaaataaaacattttggtcaaagc

SEQ ID NO: 4921 - protein, 40 aa, Homo sapiens
MQKSPVFCVDQAGSCRPELFLFGHLGMDPHVLFSNKTFWS

SEQ ID NO: 4922 - DNA, 533 bp, Homo sapiens
attgcaaggcagatggacacagcagcagcacataagagcacacgcgtggggctccagcccggccacggggagaccttttctcagcaaagggcagcactgctcgctttgctggggcagccctcccaggaagatcccagaagagatggtctgaggtgtgtgaacactgtgaatgtcatggacaaagctcagcgtgggaccccatgggacttcaggccctgaaagcagcagatctcacctgcattggaggatgagacgccacatgaagaagaaagaagacgccacagacagcagcgcagtaccaccttccagagatgaaaccagctgtcaggcctcccagatagtatcagaaagctgaagatttccagatcgctgcatcctaacagcaaggtgccagaaccctgattcaactacctactgcctgttgagcaactcctacataaactcctaactttattggttacagagacagattttagacttgtctcccatatcctggctggcatcaccagcaataaagcctttcttcctggcag

SEQ ID NO: 4923 - protein, 68 aa, Homo sapiens
MDTAAAHKSTRVGLQPGHGETFSQQRAALLALLGQPSQEDPRRDGLRCVNTVNVMDKAQRGTPWDFRP

SEQ ID NO: 4924 - DNA, 2153 bp, Homo sapiens
ggctcctttccttatatgtctaaccctggcctggagcactggaggatgaggtccgctgactgcagcgtccatcctggtcctccccaggcactgtggcctccctcacagcatggctgccttgggtactcggacttcacgtggaaggccagggctccgagagcaaatgccccagcaagacagaagctcagccgcctttgatgacctagaagctaggcagcatccattgtactgccttctatgggttgtgagtgagtcccaaacctgccttgactcaaggaaacggaattaggctctacgtcttgactaggtagtggcgaagttctggaagcacatgagtaggagatactgtgacggtttcatctttggaaaataccatctagcacacctgaatctgctttcagggggtgtaaggggatttccatggcaaaatttgaagccacatgtggtcactgctttgtactgaggaaacaaagtgctctgggcatccagaaagggggtacgttttttcttactgggataaatctggctgcattttagctaatcctggaaaattgatcgacaaaagcaaaggaccaagaaagctgcttatatcagtgtctcctccaccctcagcctccagtagcatccctacgttttacaattttatttatgtcactttaaataaggacattgagagggaaaaggcctcatcgacataccaactacaggccaggtggaccttcggtgcacacacaccccagcgcccacagagatccaggcctcctgtgtatgaatgtgtgccatgaatttagacctatttctcgccttccgggctctctattcctcatcctccatccaagtggccatcttgtgcaggccctgaaagcagcagatctcacctgcattggaggatgagacgccacatgaagaagaaagaagacgccacagacagcagcgcagtaccaccttccagagatgtgagtgtgaccgtctttgaccttctagcccagctgctttccctgaatgcaatgcatgagcaggccaggcaaaactagagagggaagctgcccagctaacccacagaattatgagagataaaaaatcattgtcttaagccactaagtctgttatgcagcaatatatagcattcattcaacttttgtctcatgaatactctcatttcttttataagttcttttgtggttcaaattagctcaaatcagtttctgatgcttatgaccaaatgcccctatgtgatagattttgaggggttaagaagcttgctcggatcacacagcggtaagtagcagcacttcatctttaacccacctctggcccactccctttccataggtccttgttgcctccctccctaatcccttccagtctagtttcctcactcattttagcatcttgaagatgcctgaccttttgtaacaggcacttagaagaggcaataatcaagctgtgagctggaatactgggtttctcatccaataaccaggttggcaggttggtaaccatacaagggacttttcaaactggagaattagtgtgctgagcacaaagtggtgagtattttgagagttactgaaatataattgacataacaataaaaatacaatatttaagtgcatgtatttcaagtgtacgatttgacaagtttggttatattatatacacctacgaaaccatcaccacaattaagaaaatgagcatagctatcacacacaaaagtttccttgtgccccttggtaattcctccctctctcctgcccacatctctccttttcccaggcaatccctgatctgatttctgccgctatcaattcgtttgcatttcctagaattttaaataactgaaaacatacattaagaactctttttctctggccgagtatggtggctcacgcctgtaatcccagcactttgggtggccaaggcgggcagatcacctgaggtcaggagttcgagaccaccctggccaacgtggtgaaaccctgtctctactaaacatacaaaaattagccaggcatggtaatgggcatctgtaatcccagctactcgcgaggctgaggcaggagaattgcttgaacctgggagacagaggttgcagtgggctgagatcacgccactgcactccagcatggacaacagagcgagactccgtcccc

SEQ ID NO: 4925 - protein, 114 aa, Homo sapiens
MWSLLCTEETKCSGHPERGYVFSYWDKSGCILANPGKLIDKSKGPRKLLISVSPPPSASSSIPTFYNFIYVTLNKDIEREKASSTYQLQARWTFGAHTPQRPQRSRPPVYECVP

SEQ ID NO: 4926 - DNA, 564 bp, Homo sapiens
atggacacagcagcagcacataagagcacacgcgtggggctccagcccggccacggggagaccttttctcagcaaagggcagcactgctcgctttgctggggcagccctcccaggaagatcccagaagagatggtctgaggtgtgtgaacactgtgaatgtcatggacaaagctcagcgtgggaccccatgggacttcaggccctgaaagcagcagatctcacctgcattggaggatgagacgccacatgaagaagaaagaagacgccacagacagcagcgcagtaccaccttccagagatgtgagtgtgaccgtctttgaccttctagcccagctgctttccctgaatgcaatgcatgagcaggccaggcaaaactagagagggaagctgcccagctaacccacagaattatgagagataaaaaatcattgtcttaagccactaagtctgttatgcagcaatatatagcattcattcaacttttgtctcatgaatactctcatttcttttataagttcttttgtggttcaaattagctcaaatcagtttctgatgcttatgac

SEQ ID NO: 4927 - protein, 73 aa, Homo sapiens
MSWTKLSVGPHGTSGPESSRSHLHWRMRRHMKKKEDATDSSAVPPSRDVSVTVFDLLAQLLSLNAMHEQARQN

SEQ ID NO: 4928 - DNA, 1133 bp, Homo sapiens
ggctcctttccttatatgtctaaccctggcctggagcactggaggatgaggtccgctgactgcagcgtccatcctggtcctccccaggcactgtggcctccctcacagcatggctgccttgggtactcggacttcacgtggaaggccagggctccgagagcaaatgccccagcaagacagaagctcagccgcctttgatgacctagaagctaggcagcatccattgtactgccttctatgggttgtgagtgagtcccaaacctgccttgactcaaggaaacggaattaggctctacgtcttgactaggtagtggcgaagttctggaagcacatgagtaggagatactgtgacggtttcatctttggaaaataccatctagcacacctgaatctgctttcagggggtgtaaggggatttccatggcaaaatttgaagccacatgtggtcactgctttgtactgaggaaacaaagtgctctgggcatccagaaagggggtacgttttttcttactgggataaatctggctgcattttagctaatcctggaaaattgatcgacaaaagcaaaggaccaagaaagctgcttatatcagtgtctcctccaccctcagcctccagtagcatccctacgttttacaattttatttatgtcactttaaataaggacattgagagggaaaaggcctcatcgacataccaactacaggccaggtggaccttcggtgcacacacaccccagcgcccacagagatccaggcctcctgtgtatgaatgtgtgccatgaatttagacctatttctcgccttccgggctctctattcctcatcctccatccaagtggccatcttgtgcaggccctgaaagcagcagatctcacctgcattggaggatgagacgccacatgaagaagaaagaagacgccacagacagcagcgcagtaccaccttccagagatgtgagtgtgaccgtctttgaccttctagcccagctgctttccctgaatgcaatgcatgagcaggccaggcaaaactagagagggaagctgcccagctaacccacagaattatgagagataaaaaatcattgtcttaagccactaagtctgttatgcagcaatatatagcattcattc

SEQ ID NO: 4929 - protein, 114 aa, Homo sapiens; identical to SEQ ID NO: 4925

SEQ ID NO: 4930 - DNA, 1140 bp, Homo sapiens
agaaccccagctgcaagtgagactggaaaaatggctctcagagttcccgcctctgcagtagaggaagacactccagaaggagttgagaatgggtgctgagtgcctcttcaggatgtctgtcacacctcaggaaacctgccaggaataccaaagggagtgaaaaatccaaggaatacttgtcattgaaattagggcccacctggataatccatgatgatctcatctcaagatccttaacttaatgacatctgcagagactggtttatcaaataagggactgtggctatatcgctgacctcaagaaaacctgcggacaaaatctgctaaagaagtatcagcatctatttcaaaagttagccattattttaagaagactgtgctggaagacgggtatttaacacaaacagatgcaaaagatacggggtttcaccgtgttgaccagactgattttgaacttctgggctcaatcagtccacctgcctcggcctcccaaagtgctgagattataggtgtgagcccctgcgcctggccagggatgccgttcttcactctccaattgagcagcccattatatatcaggcactataggagttcctggaggatactggtctgaagttagcatgatcttgactcaagaaacttatagtcctgataagaacttccaccagaattccagataaggcagcacaggccttgctgtttgcccatgcccatgcggtcagctctcttgggtaccgtggcatgcagatgcagacactcacccaagacaccctgtagtgctgattactggctgaagacactgaatatctgatatagtttggatgtttgacccctccaaatctcatgttgaaactagattcccagtgttggaggtggggcccggtgggaggtgtttggattgtgggattggatcccttatggccatcttggtgccatccttgtggtaatgagcaagttctttatctactagttcctgagcgatctggttgctaaaaagagtctagcagcatcatccgctccctctcctcctctcttaccatgtgatatgcacacaccggctacccttcacctactgctccagcaccacgcttcatgtacagcctgtagaactctgagccaaataaacctcttttctttata

SEQ ID NO: 4931 - protein, 33 aa, Homo sapiens
MQKIRGFTVLTRLILNFWAQSVHLPRPPKVLRL

SEQ ID NO: 4932 - DNA, 2047 bp, Homo sapiens
gatgtgcctctctctctctctctctctctctctctttctctgtctcttcctttcttttcctcccgtttttctttctttttttttggcgggggacagagtttcattcttgttgctcaggctggagttcaatggcacgatcttggctcaccgcaacctctgcctactggattcaagtgattctcctgcctcagcctcccgagtagctgggattacaggcatgtgccaccacgcccggctaattttgtatttttagtagagacggggtttctccatgttggtcagcctggtcttgaactcttgacctcaggtgatccacctgcctcagcctcccaaagtgctgggattacaggcgtgagccaccgcgccaggcccctcccttctttgtttctaatctctcttccttccttcttttctttctttctcccactgaaatgctgctattaaattgatagagtatcttataattgatggtatcttggaattggggaaatagagtgtttgtcaggctgcttgacttagcagctgagggttgaagggatggagataatttcaaatcagcgagattactggatttctttttaaaaggtgctggtgagatagaatcaccataacagagtcaagcgcagataaaaaagatcagcaaaggccagattccctcaacttattttgaatggatggagaaatggtgaatcttcggtttgtgagtatgaccagtgggtcatatgggcagaaaagcaagcggcagtctcaaaagcagagggcatttagaatccaaggttcaagctggaagagatcttggtcacctccttgttgaatgccttaattgaatggatgaggaaaatgggctcatatggcagaaataatctgtagagctaggacaggatcctaggtgtccagccccctgttctatggattttcatttggagaagtcagtcatgtacctgcctcagggcctttgcacctcttttctctttgcccagatcattcttcccctaaatagccacatggctttcttcctcatctccttcaagtttttgcttaaatttcagtttgtcagtgaggtcttctctgaccatttagaccagaatatgccatcttaaaatatgagtatggaagacaagaatatgccaccccaaaatatgcttcttgggcataaggattattttgagctgattattttgagaaactgcagacacaggagttctaatctgaaaacagatccctgtgcaggggaaatctatacctatcacggaagtctctgcttgtaagagtgtctccctctcagtatcagggcaagaaggatgcgtggaagtcactggagacttttgtcaatgaagcaggtgctgacttaattctccaaaacaaaccttacccttgtctaccctgagtttcctgttgacttccccacagcactccaaccagcaatgaaggagatctgaggtctcggcatcctcattcacacctgattgagcagcccattatatatcaggcactataggagttcctggaggatactggtctgaagttagcatgatcttgactcaagaaacttatagtcctgataagaacttccaccagaattccagataaggcagcacaggccttgctgtttgcccatgcccatgcggtcagctctcttgggtaccgtggcatgcagatgcagacactcacccaagacaccctgtagtgctgattactggctgaagacactgaatatctgatatagtttggatgtttgacccctccaaatctcatgttgaaactagattcccagtgttggaggtggggcccggtgggaggtgtttggattgtgggattggatcccttatggccatcttggtgccatccttgtggtaatgagcaagttctttatctactagttcctgagcgatctggttgctaaaaagagtctagcagcatcatccgctccctctcctcctctcttaccatgtgatatgcacacaccggctacccttcacctactgctccagcaccacgcttcatgtacagcctgtagaactctgagccaaataaacctcttttcttt

SEQ ID NO: 4933 - protein, 83 aa, Homo sapiens
MCLSLSLSLSLFLCLFLSFPPVFLSFFLAGDRVSFLLLRLEFNGTILAHRNLCLLDSSDSPASASRVAGITGMCHHARLILYF

SEQ ID NO: 4934 - DNA, 1192 bp, Homo sapiens
agaaccccagctgcaagtgagactggaaaaatggctctcagagttcccgcctctgcagtagaggaagacactccagaaggagttgagaatgggtgctgagtgcctcttcaggatgtctgtcacacctcaggaaacctgccaggaataccaaagggagtgaaaaatccaaggaatacttgtcattgaaattagggcccacctggataatccatgatgatctcatctcaagatccttaacttaatgacatctgcagagactggtttatcaaataagggactgtggctatatcgctgacctcaagaaaacctgcggacaaaatctgctaaagaagtatcagcatctatttcaaaagttagccattattttaagaagactgtgctggaagacgggtatttaacacaaacagatgcaaaagatacggggtttcaccgtgttgaccagactgattttgaacttctgggctcaatcagtccacctgcctcggcctcccaaagtgctgagattataggtgtgagcccctgcgcctggccagggatgccgttcttcactctccacactccaaccagcaatgaaggagatctgaggtctcggcatcctcattcacacctgattgagcagcccattatatatcaggcactataggagttcctggaggatactggtctgaagttagcatgatcttgactcaagaaacttatagtcctgataagaacttccaccagaattccagataaggcagcacaggccttgctgtttgcccatgcccatgcggtcagctctcttgggtaccgtggcatgcagatgcagacactcacccaagacaccctgtagtgctgattactggctgaagacactgaatatctgatatagtttggatgtttgacccctccaaatctcatgttgaaactagattcccagtgttggaggtggggcccggtgggaggtgtttggattgtgggattggatcccttatggccatcttggtgccatccttgtggtaatgagcaagttctttatctactagttcctgagcgatctggttgctaaaaagagtctagcagcatcatccgctccctctcctcctctcttaccatgtgatatgcacacaccggctacccttcacctactgctccagcaccacgcttcatgtacagcctgtagaactctgagccaaataaacctcttttcttt

SEQ ID NO: 4935 - protein, 35 aa, Homo sapiens
MPFFTLHTPTSNEGDLRSRHPHSHLIEQPIIYQAL

SEQ ID NO: 4936 - DNA, 411 bp, Homo sapiens
cctcttcaggatgtctgtcacacctcaggaaacctgccaggaataccaaagggagtgaaaaatccaaggttgggaagccctgggacattgaagttacaactggacgataaaaacagagttttttccttgtgacgtgaccactgtgatgtaaagctgtatctccttcatttcatcaagaaattcttaaaattctcccccaacgtgctttcatctttcccttcattgccaactctgaatacttgtcattgaaattagggcccacctggataatccatgatgatctcatctcaagatccttaacttaatgacatctgcagagactggtttatcaaataagggactgtggctatatcgctgacctcaagaaaacctgcggacaaaatctgctaaagaagtatcagcatctatttc

SEQ ID NO: 4937 - protein, 52 aa, Homo sapiens
CKAVSPSFHQEILKILPQRAFIFPFIANSEYLSLKLGPTWIIHDDLISRSLT

SEQ ID NO: 4938 - DNA, 427 bp, Homo sapiens
gctctcagagttcccgcctctgcagtagaggaagacactccagaaggagttgagaatgggtgctgagtgcctcttcaggatgtctgtcacacctcaggaaacctgccaggaataccaaagggagtgaaaaatccaaggttgggaagccctgggacattgaagttacaactggacgataaaaacagagttttttccttgtgacgtgaccactgtgatgtaaagctgtatctccttcatttcatcaagaaattcttaaaattctcccccaacgtgctttcatctttcccttcattgccaactctgtaagaagtaccacgccttttctttgaatctgattctcctccaagaagcaatgcttctctgaggctttcacctttgctcacatcaaagcccccacactgaataaataccatccttacatgccctt

SEQ ID NO: 4939 - protein, 44 aa, Homo sapiens
VPLQDVCHTSGNLPGIPKGVKNPRLGSPGTLKLQLDDKNRVFSL

SEQ ID NO: 4940 - DNA, 3338 bp, Homo sapiens
gacatttgccaagttgtagaggtgaccactgagagcgacgagcagccggtcaccatcaaagaggagagcaatccggtgccttacaacagctcctggcccccttttcaagacctccccctttcttcctccatgaccccagcatccagcagcagtcggccagaccgggagacccgggccagcgtcatcaagaaaacatcggatatcacccaggcccgcgtcaagagctgttaagcctctgactctccgcggtggttgttggggcttcttggctttgttttgttgtttgtttgtattttatttttttctctctgacacctattttagacaaatctaagggaaaaagccttgacaatagaacattgattgctgtgtccaactccagtactggagcttctctttaactcaggactccagcccattggtagacgtgtgtttctagagcctgctggatctcccagggctactcactcaagttcaaggaccaacaagggcagtggaggtgctgcattgcctgcggtcaaggccagcaaggtggagtggatgcctcagaacggacgagataatgtgaactagctggaattttttattcttgtgaatatgtacataggcagcactagcgacattgcagtctgcttctgcaccttatcttaaagcacttacagataggccttcttgtgatcttgctctatctcacagcacactcagcacccccttctctgcccattccccagcctctcttcctatcccatcccatcccatcccatcccatcccatcccatcccgctcttttcctacttttccttccctcaaagcttccattccacatccggaggagaagaaggaaatgaatttctctacagatgtcccattttcagactgctttaaaaaaaatccttctaatctgctatgcttgaatgccacgcggtacaaaggaaaaagtatcatggaaatattatgcaaattcccagatttgaagacaaaaatactctaattctaaccagagcaagcttttttattttttatacaggggaatattttattcaaggtaaaattctaaataaaatataattgttttttatcttttctacagcaaatttataattttaagattccttttcttgtttatcagcagttgttattacatccttgtggcacatttttttttttaattttgtaaaggtgaaaaaagcttttatgagctcatgtagcaatcagattttcctgtggattgataataaatgaatatgatatatagttaaatttttaaggggcatcactcctggctttgtctgtgtctgctttaaaagagcataatcacggaataggactgacaaaggattgtttctttttggggaccaaaatgttttcccttgttgaccacaagaaaccgtggaggttcttactgtgaggcttcagttgacttcttctcttgagtgctcgcctgagcaggggcccgtgctgagcgttttgcatgacttcccgtcttcattcatcacacttgtgctgtagaataggcattcatctccatttcatgtggaggaaatgaagactgaatgtgaagatgcctttacttggctcatagtggcactaagaggcaagggcacaagttgggcacaagttgagcccaattctctgtgctatgaagggggtcttttttcttgtaagcatatccgttatctcaaatgtctgtcttcctctgtgttgggagcattccctgtggagggggagtattttagccacgccactggtttccttctctgctgtgagcaaggttcaccccactctgtgtctttcctgttttcatccttaggcttacacgtacgacaaacgtcttgtgtttatgtcacttagaggggtgcatggataagacattttccacaacaggaaatatgtattgggctctaacaccatgtccgtcactcgtctttctaggacccgaggccttacacatagaccgtgccctcaaaacttggggtctgtcttgtggaataaaaggggtgacttcaagaacaccagtctttatcagccacttggtgtttgaaggtatagtcttggcctggagaaagccacagcaccagcctcccctgcatccccagtatcttactctgtaaaatcagaatatgaaaactttgctacccgcctactacctctggggggttgtggaggagattgctaagttaatatttgaagaggttcctttaatgaaaggacaaaaggctatttttatgcctatctccatgtgtggctgcagatataattagcggtcataaagttatccagccctgaatggaaatcaactggagcattttcctggcggatgcgttgtagttgaaatgccacacacagaggcggggctgcttctggaaggagcactttcgttgactgtctcagtttctcagtggaaggggagttatcaggaagaaacagatgctccctggctccttggcacccgacttttcagttaagacctgctcttcccccaggtcctgaatggagaagttcagttctttgagacttacatctaaaatgttttactgagtcatcctattttaaataaattaacaaaacagcaacggaaggttgccctgagtcacgtggcctggttatcaaagggtttaaggtagctcaggtctcctcccccttccttcttcccaacacagactcagggcttcttcctgcatctcggtcccgaatgccattcctgctgccctccccttgcttctgtagcgtaactagacttcccaaggcccatcaagtggaagaaaattcaggacttggaaatgcaccatttaagttccagagatgatactccattgccaataaggccatgaaaaacagaatcatgtttaaaatccttctgagaaagcctgtattgtttctaagtgatacttgccagcaacgcaggaaaacaagctagtctcaggatgcctggggttgacatggggaaggaaaacaaaggcattggggcagctcctggacccaagcctcagaccttgtcgtcacttagaggaagtgccagggacgcatgcttctggttggtatttgtgtgagctgataggctttgatgatgggcttgggtgtgtgtgtgcacgtatgcgtttaatagcaagttcaagttcagtgtaactgcctttggaacaatagtttccattctctgcagccagtacctgggtcactcccttgataatgggctcactgtacagctgtgaactgtgaattcagggacatgtatttctgcccagccttgaggttgcaagcacccagcacatccacacacctcgatgaaaggggcttctggaatgccatttgcacatctaaataaatccaccctcaaccgt

SEQ ID NO: 4941 - protein, 102 aa, Homo sapiens [sequence omitted]

SEQ ID NO: 4942 - DNA, 3359 bp, Homo sapiens
ggctggaggagcagataaactccaacacgatcccggggctcaagtggttccaacaaaccggacctccaggtcaccatcaaagaggagagcaatccggtgccttacaacagctcctggcccccttttcaagacctccccctttcttcctccatgaccccagcatccagcagcagtcggccagaccgggagacccgggccagcgtcatcaagaaaacatcggatatcacccaggcccgcgtcaagagctgttaagcctctgactctccgcggtggttgttggggcttcttggctttgttttgttgtttgtttgtattttatttttttctctctgacacctattttagacaaatctaagggaaaaagccttgacaatagaacattgattgctgtgtccaactccagtactggagcttctctttaactcaggactccagcccattggtagacgtgtgtttctagagcctgctggatctcccagggctactcactcaagttcaaggaccaacaagggcagtggaggtgctgcattgcctgcggtcaaggccagcaaggtggagtggatgcctcagaacggacgagataatgtgaactagctggaattttttattcttgtgaatatgtacataggcagcactagcgacattgcagtctgcttctgcaccttatcttaaagcacttacagataggccttcttgtgatcttgctctatctcacagcacactcagcacccccttctctgcccattccccagcctctcttcctatcccatcccatcccatcccatcccatcccatcccatcccgctcttttcctacttttccttccctcaaagcttccattccacatccggaggagaagaaggaaatgaatttctctacagatgtcccattttcagactgctttaaaaaaaatccttctaatctgctatgcttgaatgccacgcggtacaaaggaaaaagtatcatggaaatattatgcaaattcccagatttgaagacaaaaatactctaattctaaccagagcaagcttttttattttttatacaggggaatattttattcaaggtaaaattctaaataaaatataattgttttttatcttttctacagcaaatttataattttaagattccttttcttgtttatcagcagttgttattacatccttgtggcacatttttttttttaattttgtaaaggtgaaaaaagcttttatgagctcatgtagcaatcagattttcctgtggattgataataaatgaatatgatatatagttaaatttttaaggggcatcactcctggctttgtctgtgtctgctttaaaagagcataatcacggaataggactgacaaaggattgtttctttttggggaccaaaatgttttcccttgttgaccacaagaaaccgtggaggttcttactgtgaggcttcagttgacttcttctcttgagtgctcgcctgagcaggggcccgtgctgagcgttttgcatgacttcccgtcttcattcatcacacttgtgctgtagaataggcattcatctccatttcatgtggaggaaatgaagactgaatgtgaagatgcctttacttggctcatagtggcactaagaggcaagggcacaagttgggcacaagttgagcccaattctctgtgctatgaagggggtcttttttcttgtaagcatatccgttatctcaaatgtctgtcttcctctgtgttgggagcattccctgtggagggggagtattttagccacgccactggtttccttctctgctgtgagcaaggttcaccccactctgtgtctttcctgttttcatccttaggcttacacgtacgacaaacgtcttgtgtttatgtcacttagaggggtgcatggataagacattttccacaacaggaaatatgtattgggctctaacaccatgtccgtcactcgtctttctaggacccgaggccttacacatagaccgtgccctcaaaacttggggtctgtcttgtggaataaaaggggtgacttcaagaacaccagtctttatcagccacttggtgtttgaaggtatagtcttggcctggagaaagccacagcaccagcctcccctgcatccccagtatcttactctgtaaaatcagaatatgaaaactttgctacccgcctactacctctggggggttgtggaggagattgctaagttaatatttgaagaggttcctttaatgaaaggacaaaaggctatttttatgcctatctccatgtgtggctgcagatataattagcggtcataaagttatccagccctgaatggaaatcaactggagcattttcctggcggatgcgttgtagttgaaatgccacacacagaggcggggctgcttctggaaggagcactttcgttgactgtctcagtttctcagtggaaggggagttatcaggaagaaacagatgctccctggctccttggcacccgacttttcagttaagacctgctcttcccccaggtcctgaatggagaagttcagttctttgagacttacatctaaaatgttttactgagtcatcctattttaaataaattaacaaaacagcaacggaaggttgccctgagtcacgtggcctggttatcaaagggtttaaggtagctcaggtctcctcccccttccttcttcccaacacagactcagggcttcttcctgcatctcggtcccgaatgccattcctgctgccctccccttgcttctgtagcgtaactagacttcccaaggcccatcaagtggaagaaaattcaggacttggaaatgcaccatttaagttccagagatgatactccattgccaataaggccatgaaaaacagaatcatgtttaaaatccttctgagaaagcctgtattgtttctaagtgatacttgccagcaacgcaggaaaacaagctagtctcaggatgcctggggttgacatggggaaggaaaacaaaggcattggggcagctcctggacccaagcctcagaccttgtcgtcacttagaggaagtgccagggacgcatgcttctggttggtatttgtgtgagctgataggctttgatgatgggcttgggtgtgtgtgtgcacgtatgcgtttaatagcaagttcaagttcagtgtaactgcctttggaacaatagtttccattctctgcagccagtacctgggtcactcccttgataatgggctcactgtacagctgtgaactgtgaattcagggacatgtatttctgcccagccttgaggttgcaagcacccagcacatccacacacctcgatgaaaggggcttctggaatgccatttgcacatctaaataaatccaccctcaaccgt

SEQ ID NO: 4943 - protein, 102 aa, Homo sapiens [sequence omitted]

SEQ ID NO: 4944 - DNA, 2797 bp, Homo sapiens
ccttgttttgctttcgatctggactgttctcaggcaagccggggagtaacttttagttttgctcctgcgattattcaactgacgggctttcatttccatttcacataccctagcaacacttataccttgcggaattgtattggtagcgtgaaaaaagcacactgagagggcaccatgccggtggaaaggatgcgcatgcgcccgtggctggaggagcagataaactccaacacgatcccggggtcttttcctacttttccttccctcaaagcttccattccacatccggaggagaagaaggaaatgaatttctctacagatgtcccattttcagactgctttaaaaaaaatccttctaatctgctatgcttgaatgccacgcggtacaaaggaaaaagtatcatggaaatattatgcaaattcccagatttgaagacaaaaatactctaattctaaccagagcaagcttttttattttttatacaggggaatattttattcaaggtaaaattctaaataaaatataattgttttttatcttttctacagcaaatttataattttaagattccttttcttgtttatcagcagttgttattacatccttgtggcacatttttttttttaattttgtaaaggtgaaaaaagcttttatgagctcatgtagcaatcagattttcctgtggattgataataaatgaatatgatatatagttaaatttttaaggggcatcactcctggctttgtctgtgtctgctttaaaagagcataatcacggaataggactgacaaaggattgtttctttttggggaccaaaatgttttcccttgttgaccacaagaaaccgtggaggttcttactgtgaggcttcagttgacttcttctcttgagtgctcgcctgagcaggggcccgtgctgagcgttttgcatgacttcccgtcttcattcatcacacttgtgctgtagaataggcattcatctccatttcatgtggaggaaatgaagactgaatgtgaagatgcctttacttggctcatagtggcactaagaggcaagggcacaagttgggcacaagttgagcccaattctctgtgctatgaagggggtcttttttcttgtaagcatatccgttatctcaaatgtctgtcttcctctgtgttgggagcattccctgtggagggggagtattttagccacgccactggtttccttctctgctgtgagcaaggttcaccccactctgtgtctttcctgttttcatccttaggcttacacgtacgacaaacgtcttgtgtttatgtcacttagaggggtgcatggataagacattttccacaacaggaaatatgtattgggctctaacaccatgtccgtcactcgtctttctaggacccgaggccttacacatagaccgtgccctcaaaacttggggtctgtcttgtggaataaaaggggtgacttcaagaacaccagtctttatcagccacttggtgtttgaaggtatagtcttggcctggagaaagccacagcaccagcctcccctgcatccccagtatcttactctgtaaaatcagaatatgaaaactttgctacccgcctactacctctggggggttgtggaggagattgctaagttaatatttgaagaggttcctttaatgaaaggacaaaaggctatttttatgcctatctccatgtgtggctgcagatataattagcggtcataaagttatccagccctgaatggaaatcaactggagcattttcctggcggatgcgttgtagttgaaatgccacacacagaggcggggctgcttctggaaggagcactttcgttgactgtctcagtttctcagtggaaggggagttatcaggaagaaacagatgctccctggctccttggcacccgacttttcagttaagacctgctcttcccccaggtcctgaatggagaagttcagttctttgagacttacatctaaaatgttttactgagtcatcctattttaaataaattaacaaaacagcaacggaaggttgccctgagtcacgtggcctggttatcaaagggtttaaggtagctcaggtctcctcccccttccttcttcccaacacagactcagggcttcttcctgcatctcggtcccgaatgccattcctgctgccctccccttgcttctgtagcgtaactagacttcccaaggcccatcaagtggaagaaaattcaggacttggaaatgcaccatttaagttccagagatgatactccattgccaataaggccatgaaaaacagaatcatgtttaaaatccttctgagaaagcctgtattgtttctaagtgatacttgccagcaacgcaggaaaacaagctagtctcaggatgcctggggttgacatggggaaggaaaacaaaggcattggggcagctcctggacccaagcctcagaccttgtcgtcacttagaggaagtgccagggacgcatgcttctggttggtatttgtgtgagctgataggctttgatgatgggcttgggtgtgtgtgtgcacgtatgcgtttaatagcaagttcaagttcagtgtaactgcctttggaacaatagtttccattctctgcagccagtacctgggtcactcccttgataatgggctcactgtacagctgtgaactgtgaattcagggacatgtatttctgcccagccttgaggttgcaagcacccagcacatccacacacctcgatgaaaggggcttctggaatgccatttgcacatctaaataaatccaccctcaaccgt

SEQ ID NO: 4945 - protein, 91 aa, Homo sapiens
MPVERMRMRPWLEEQINSNTIPGSFPTFPSLKASIPHPEEKKEMNFSTDVPFSDCFKKNPSNLLCLNATRYKGKSIMEILCKFPDLKTKIL

SEQ ID NO: 4946 - DNA, 2856 bp, Homo sapiens
tctccttgttttgctttcgatctggactgttctcaggcaagccggggagtaacttttagttttgctcctgcgattattcaactgacgggctttcatttccatttcacataccctagcaacacttataccttgcggaattgtattggtagcgtgaaaaaagcacactgagagggcaccatgccggtggaaaggatgcgcatgcgcccgtggctggaggagcagataaactccaacacgatcccggggctcaagtggcttaacaaggaaaagaagatttttcagatcccctggatgcatgcggctcttttcctacttttccttccctcaaagcttccattccacatccggaggagaagaaggaaatgaatttctctacagatgtcccattttcagactgctttaaaaaaaatccttctaatctgctatgcttgaatgccacgcggtacaaaggaaaaagtatcatggaaatattatgcaaattcccagatttgaagacaaaaatactctaattctaaccagagcaagcttttttattttttatacaggggaatattttattcaaggtaaaattctaaataaaatataattgttttttatcttttctacagcaaatttataattttaagattccttttcttgtttatcagcagttgttattacatccttgtggcacatttttttttttaattttgtaaaggtgaaaaaagcttttatgagctcatgtagcaatcagattttcctgtggattgataataaatgaatatgatatatagttaaatttttaaggggcatcactcctggctttgtctgtgtctgctttaaaagagcataatcacggaataggactgacaaaggattgtttctttttggggaccaaaatgttttcccttgttgaccacaagaaaccgtggaggttcttactgtgaggcttcagttgacttcttctcttgagtgctcgcctgagcaggggcccgtgctgagcgttttgcatgacttcccgtcttcattcatcacacttgtgctgtagaataggcattcatctccatttcatgtggaggaaatgaagactgaatgtgaagatgcctttacttggctcatagtggcactaagaggcaagggcacaagttgggcacaagttgagcccaattctctgtgctatgaagggggtcttttttcttgtaagcatatccgttatctcaaatgtctgtcttcctctgtgttgggagcattccctgtggagggggagtattttagccacgccactggtttccttctctgctgtgagcaaggttcaccccactctgtgtctttcctgttttcatccttaggcttacacgtacgacaaacgtcttgtgtttatgtcacttagaggggtgcatggataagacattttccacaacaggaaatatgtattgggctctaacaccatgtccgtcactcgtctttctaggacccgaggccttacacatagaccgtgccctcaaaacttggggtctgtcttgtggaataaaaggggtgacttcaagaacaccagtctttatcagccacttggtgtttgaaggtatagtcttggcctggagaaagccacagcaccagcctcccctgcatccccagtatcttactctgtaaaatcagaatatgaaaactttgctacccgcctactacctctggggggttgtggaggagattgctaagttaatatttgaagaggttcctttaatgaaaggacaaaaggctatttttatgcctatctccatgtgtggctgcagatataattagcggtcataaagttatccagccctgaatggaaatcaactggagcattttcctggcggatgcgttgtagttgaaatgccacacacagaggcggggctgcttctggaaggagcactttcgttgactgtctcagtttctcagtggaaggggagttatcaggaagaaacagatgctccctggctccttggcacccgacttttcagttaagacctgctcttcccccaggtcctgaatggagaagttcagttctttgagacttacatctaaaatgttttactgagtcatcctattttaaataaattaacaaaacagcaacggaaggttgccctgagtcacgtggcctggttatcaaagggtttaaggtagctcaggtctcctcccccttccttcttcccaacacagactcagggcttcttcctgcatctcggtcccgaatgccattcctgctgccctccccttgcttctgtagcgtaactagacttcccaaggcccatcaagtggaagaaaattcaggacttggaaatgcaccatttaagttccagagatgatactccattgccaataaggccatgaaaaacagaatcatgtttaaaatccttctgagaaagcctgtattgtttctaagtgatacttgccagcaacgcaggaaaacaagctagtctcaggatgcctggggttgacatggggaaggaaaacaaaggcattggggcagctcctggacccaagcctcagaccttgtcgtcacttagaggaagtgccagggacgcatgcttctggttggtatttgtgtgagctgataggctttgatgatgggcttgggtgtgtgtgtgcacgtatgcgtttaatagcaagttcaagttcagtgtaactgcctttggaacaatagtttccattctctgcagccagtacctgggtcactcccttgataatgggctcactgtacagctgtgaactgtgaattcagggacatgtatttctgcccagccttgaggttgcaagcacccagcacatccacacacctcgatgaaaggggcttctggaatgccatttgcacatctaaataaatccaccctcaaccgt

SEQ ID NO: 4947 - protein, 62 aa, Homo sapiens
MPVERMRMRPWLEEQINSNTIPGLKWLNKEKKIFQIPWMHAALFLLFLPSKLPFHIRRRRRK

SEQ ID NO: 4948 - DNA, 4365 bp, Homo sapiens
ggatttccagccgcggctcttcgcagtttcctctccttgttttgctttcgatctggactgttctcaggcaagccggggagtaacttttagttttgctcctgcgattattcaactgacgggctttcatttccatttcacataccctagcaacacttataccttgcggaattgtattggtagcgtgaaaaaagcacactgagagggcaccatgccggtggaaaggatgcgcatgcgcccgtggctggaggagcagataaactccaacacgatcccggggctcaagtggcttaacaaggaaaagaagatttttcagatcccctggatgcatgcggctagacatgggtgggatgtggaaaaagatgcaccactctttagaaactgggcaatccatacaggaaagcatcaaccaggagtagataaacctgatcccaaaacatggaaggcgaatttcagatgcgccatgaattccttgcctgatattgaagaagtcaaggataaaagcataaagaaaggaaataatgccttcagggtctaccgaatgctgcccctatcagaacggccttctaagaaaggaaagaaaccaaagacagaaaaagaagacaaagttaagcacatcaagcaagaaccagttgagtcatctctggggcttagtaatggagtaagtgatctttctcctgagtatgcggtcctgacttcaactataaaaaatgaagtggatagtacggtgaacatcatagttgtaggacagtcccatctggacagcaacattgagaatcaagagattgtcaccaatccgccagacatttgccaagttgtagaggtgaccactgagagcgacgagcagccggtcagcatgagcgagctctaccctctgcagatctcccccgtgtcttcctatgcagaaagcgaaacgactgatagtgtgcccagcgatgaagagagtgccgaggggcggccacactggcggaagaggaatattgaaggcaaacagtacctcagcaacatggggactcgaggctcctacctgctgcccggcatggcgtccttcgtcacttccaacaaaccggacctccaggtcaccatcaaagaggagagcaatccggtgccttacaacagctcctggcccccttttcaagacctccccctttcttcctccatgaccccagcatccagcagcagtcggccagaccgggagacccgggccagcgtcatcaagaaaacatcggatatcacccaggcccgcgtcaagagctgttaagcctctgactctccgcggtggttgttggggcttcttggctttgttttgttgtttgtttgtattttatttttttctctctgacacctattttagacaaatctaagggaaaaagccttgacaatagaacattgattgctgtgtccaactccagtactggagcttctctttaactcaggactccagcccattggtagacgtgtgtttctagagcctgctggatctcccagggctactcactcaagttcaaggaccaacaagggcagtggaggtgctgcattgcctgcggtcaaggccagcaaggtggagtggatgcctcagaacggacgagataatgtgaactagctggaattttttattcttgtgaatatgtacataggcagcactagcgacattgcagtctgcttctgcaccttatcttaaagcacttacagataggccttcttgtgatcttgctctatctcacagcacactcagcacccccttctctgcccattccccagcctctcttcctatcccatcccatcccatcccatcccatcccatcccatcccgctcttttcctacttttccttccctcaaagcttccattccacatccggaggagaagaaggaaatgaatttctctacagatgtcccattttcagactgctttaaaaaaaatccttctaatctgctatgcttgaatgccacgcggtacaaaggaaaaagtatcatggaaatattatgcaaattcccagatttgaagacaaaaatactctaattctaaccagagcaagcttttttattttttatacaggggaatattttattcaaggtaaaattctaaataaaatataattgttttttatcttttctacagcaaatttataattttaagattccttttcttgtttatcagcagttgttattacatccttgtggcacatttttttttttaattttgtaaaggtgaaaaaagcttttatgagctcatgtagcaatcagattttcctgtggattgataataaatgaatatgatatatagttaaatttttaaggggcatcactcctggctttgtctgtgtctgctttaaaagagcataatcacggaataggactgacaaaggattgtttctttttggggaccaaaatgttttcccttgttgaccacaagaaaccgtggaggttcttactgtgaggcttcagttgacttcttctcttgagtgctcgcctgagcaggggcccgtgctgagcgttttgcatgacttcccgtcttcattcatcacacttgtgctgtagaataggcattcatctccatttcatgtggaggaaatgaagactgaatgtgaagatgcctttacttggctcatagtggcactaagaggcaagggcacaagttgggcacaagttgagcccaattctctgtgctatgaagggggtcttttttcttgtaagcatatccgttatctcaaatgtctgtcttcctctgtgttgggagcattccctgtggagggggagtattttagccacgccactggtttccttctctgctgtgagcaaggttcaccccactctgtgtctttcctgttttcatccttaggcttacacgtacgacaaacgtcttgtgtttatgtcacttagaggggtgcatggataagacattttccacaacaggaaatatgtattgggctctaacaccatgtccgtcactcgtctttctaggacccgaggccttacacatagaccgtgccctcaaaacttggggtctgtcttgtggaataaaaggggtgacttcaagaacaccagtctttatcagccacttggtgtttgaaggtatagtcttggcctggagaaagccacagcaccagcctcccctgcatccccagtatcttactctgtaaaatcagaatatgaaaactttgctacccgcctactacctctggggggttgtggaggagattgctaagttaatatttgaagaggttcctttaatgaaaggacaaaaggctatttttatgcctatctccatgtgtggctgcagatataattagcggtcataaagttatccagccctgaatggaaatcaactggagcattttcctggcggatgcgttgtagttgaaatgccacacacagaggcggggctgcttctggaaggagcactttcgttgactgtctcagtttctcagtggaaggggagttatcaggaagaaacagatgctccctggctccttggcacccgacttttcagttaagacctgctcttcccccaggtcctgaatggagaagttcagttctttgagacttacatctaaaatgttttactgagtcatcctattttaaataaattaacaaaacagcaacggaaggttgccctgagtcacgtggcctggttatcaaagggtttaaggtagctcaggtctcctcccccttccttcttcccaacacagactcagggcttcttcctgcatctcggtcccgaatgccattcctgctgccctccccttgcttctgtagcgtaactagacttcccaaggcccatcaagtggaagaaaattcaggacttggaaatgcaccatttaagttccagagatgatactccattgccaataaggccatgaaaaacagaatcatgtttaaaatccttctgagaaagcctgtattgtttctaagtgatacttgccagcaacgcaggaaaacaagctagtctcaggatgcctggggttgacatggggaaggaaaacaaaggcattggggcagctcctggacccaagcctcagaccttgtcgtcacttagaggaagtgccagggacgcatgcttctggttggtatttgtgtgagctgataggctttgatgatgggcttgggtgtgtgtgtgcacgtatgcgtttaatagcaagttcaagttcagtgtaactgcctttggaacaatagtttccattctctgcagccagtacctgggtcactcccttgataatgggctcactgtacagctgtgaactgtgaattcagggacatgtatttctgcccagccttgaggttgcaagcacccagcacatccacacacctcgatgaaaggggcttctggaatgccatttgcacatctaaataaatccaccctcaaccgt

SEQ ID NO: 4949 - protein, 349 aa, Homo sapiens; identical to SEQ ID NO: 570

SEQ ID NO: 4950 - DNA, 4200 bp, Homo sapiens
ggatttccagccgcggctcttcgcagtttcctctccttgttttgctttcgatctggactgttctcaggcaagccggggagtaacttttagttttgctcctgcgattattcaactgacgggctttcatttccatttcacataccctagcaacacttataccttgcggaattgtattggtagcgtgaaaaaagcacactgagagggcaccatgccggtggaaaggatgcgcatgcgcccgtggctggaggagcagataaactccaacacgatcccggggctcaagtggcttaacaaggaaaagaagatttttcagatcccctggatgcatgcggctagacatgggtgggatgtggaaaaagatgcaccactctttagaaactgggcaatccatacaggaaagcatcaaccaggagtagataaacctgatcccaaaacatggaaggcgaatttcagatgcgccatgaattccttgcctgatattgaagaagtcaaggataaaagcataaagaaaggaaataatgccttcagggtctaccgaatgctgcccctatcagaacggccttctaagaaagttgtaggacagtcccatctggacagcaacattgagaatcaagagattgtcaccaatccgccagacatttgccaagttgtagaggtgaccactgagagcgacgagcagccggtcagcatgagcgagctctaccctctgcagatctcccccgtgtcttcctatgcagaaagcgaaacgactgatagtgtgcccagcgatgaagagagtgccgaggggcggccacactggcggaagaggaatattgaaggcaaacagtacctcagcaacatggggactcgaggctcctacctgctgcccggcatggcgtccttcgtcacttccaacaaaccggacctccaggtcaccatcaaagaggagagcaatccggtgccttacaacagctcctggcccccttttcaagacctccccctttcttcctccatgaccccagcatccagcagcagtcggccagaccgggagacccgggccagcgtcatcaagaaaacatcggatatcacccaggcccgcgtcaagagctgttaagcctctgactctccgcggtggttgttggggcttcttggctttgttttgttgtttgtttgtattttatttttttctctctgacacctattttagacaaatctaagggaaaaagccttgacaatagaacattgattgctgtgtccaactccagtactggagcttctctttaactcaggactccagcccattggtagacgtgtgtttctagagcctgctggatctcccagggctactcactcaagttcaaggaccaacaagggcagtggaggtgctgcattgcctgcggtcaaggccagcaaggtggagtggatgcctcagaacggacgagataatgtgaactagctggaattttttattcttgtgaatatgtacataggcagcactagcgacattgcagtctgcttctgcaccttatcttaaagcacttacagataggccttcttgtgatcttgctctatctcacagcacactcagcacccccttctctgcccattccccagcctctcttcctatcccatcccatcccatcccatcccatcccatcccatcccgctcttttcctacttttccttccctcaaagcttccattccacatccggaggagaagaaggaaatgaatttctctacagatgtcccattttcagactgctttaaaaaaaatccttctaatctgctatgcttgaatgccacgcggtacaaaggaaaaagtatcatggaaatattatgcaaattcccagatttgaagacaaaaatactctaattctaaccagagcaagcttttttattttttatacaggggaatattttattcaaggtaaaattctaaataaaatataattgttttttatcttttctacagcaaatttataattttaagattccttttcttgtttatcagcagttgttattacatccttgtggcacatttttttttttaattttgtaaaggtgaaaaaagcttttatgagctcatgtagcaatcagattttcctgtggattgataataaatgaatatgatatatagttaaatttttaaggggcatcactcctggctttgtctgtgtctgctttaaaagagcataatcacggaataggactgacaaaggattgtttctttttggggaccaaaatgttttcccttgttgaccacaagaaaccgtggaggttcttactgtgaggcttcagttgacttcttctcttgagtgctcgcctgagcaggggcccgtgctgagcgttttgcatgacttcccgtcttcattcatcacacttgtgctgtagaataggcattcatctccatttcatgtggaggaaatgaagactgaatgtgaagatgcctttacttggctcatagtggcactaagaggcaagggcacaagttgggcacaagttgagcccaattctctgtgctatgaagggggtcttttttcttgtaagcatatccgttatctcaaatgtctgtcttcctctgtgttgggagcattccctgtggagggggagtattttagccacgccactggtttccttctctgctgtgagcaaggttcaccccactctgtgtctttcctgttttcatccttaggcttacacgtacgacaaacgtcttgtgtttatgtcacttagaggggtgcatggataagacattttccacaacaggaaatatgtattgggctctaacaccatgtccgtcactcgtctttctaggacccgaggccttacacatagaccgtgccctcaaaacttggggtctgtcttgtggaataaaaggggtgacttcaagaacaccagtctttatcagccacttggtgtttgaaggtatagtcttggcctggagaaagccacagcaccagcctcccctgcatccccagtatcttactctgtaaaatcagaatatgaaaactttgctacccgcctactacctctggggggttgtggaggagattgctaagttaatatttgaagaggttcctttaatgaaaggacaaaaggctatttttatgcctatctccatgtgtggctgcagatataattagcggtcataaagttatccagccctgaatggaaatcaactggagcattttcctggcggatgcgttgtagttgaaatgccacacacagaggcggggctgcttctggaaggagcactttcgttgactgtctcagtttctcagtggaaggggagttatcaggaagaaacagatgctccctggctccttggcacccgacttttcagttaagacctgctcttcccccaggtcctgaatggagaagttcagttctttgagacttacatctaaaatgttttactgagtcatcctattttaaataaattaacaaaacagcaacggaaggttgccctgagtcacgtggcctggttatcaaagggtttaaggtagctcaggtctcctcccccttccttcttcccaacacagactcagggcttcttcctgcatctcggtcccgaatgccattcctgctgccctccccttgcttctgtagcgtaactagacttcccaaggcccatcaagtggaagaaaattcaggacttggaaatgcaccatttaagttccagagatgatactccattgccaataaggccatgaaaaacagaatcatgtttaaaatccttctgagaaagcctgtattgtttctaagtgatacttgccagcaacgcaggaaaacaagctagtctcaggatgcctggggttgacatggggaaggaaaacaaaggcattggggcagctcctggacccaagcctcagaccttgtcgtcacttagaggaagtgccagggacgcatgcttctggttggtatttgtgtgagctgataggctttgatgatgggcttgggtgtgtgtgtgcacgtatgcgtttaatagcaagttcaagttcagtgtaactgcctttggaacaatagtttccattctctgcagccagtacctgggtcactcccttgataatgggctcactgtacagctgtgaactgtgaattcagggacatgtatttctgcccagccttgaggttgcaagcacccagcacatccacacacctcgatgaaaggggcttctggaatgccatttgcacatctaaataaatccaccctcaaccgt

SEQ ID NO: 4951 - protein, 294 aa, Homo sapiens
MPVERMRMRPWLEEQINSNTIPGLKWLNKEKKIFQIPWMHAARHGWDVEKDAPLFRNWAIHTGKHQPGVDKPDPKTWKANFRCAMNSLPDIEEVKDKSIKKGNNAFRVYRMLPLSERPSKKVVGQSHLDSNIENQEIVTNPPDICQVVEVTTESDEQPVSMSELYPLQISPVSSYAESETTDSVPSDEESAEGRPHWRKRNIEGKQYLSNMGTRGSYLLPGMASFVTSNKPDLQVTIKEESNPVPYNSSWPPFQDLPLSSSMTPASSSSRPDRETRASVIKKTSDITQARVKSC

SEQ ID NO: 4952 - DNA, 1275 bp, Homo sapiens
gacatttgccaagttgtagaggtgaccactgagagcgacgagcagccggtcaccatcaaagaggagagcaatccggtgccttacaacagctcctggcccccttttcaagacctccccctttcttcctccatgaccccagcatccagcagcagtcggccagaccgggagacccgggccagcgtcatcaagaaaacatcggatatcacccaggcccgcgtcaagagctgttaagcctctgactctccgcggtggttgttggggcttcttggctttgttttgttgtttgtttgtattttatttttttctctctgacacctattttagacaaatctaagggaaaaagccttgacaatagaacattgattgctgtgtccaactccagtactggagcttctctttaactcaggactccagcccattggtagacgtgtgtttctagagcctgctggatctcccagggctactcactcaagttcaaggaccaacaagggcagtggaggtgctgcattgcctgcggtcaaggccagcaaggtggagtggatgcctcagaacggacgagataatgtgaactagctggaattttttattcttgtgaatatgtacataggcagcactagcgacattgcagtctgcttctgcaccttatcttaaagcacttacagataggccttcttgtgatcttgctctatctcacagcacactcagcacccccttctctgcccattccccagcctctcttcctatcccatcccatcccatcccatcccatcccatcccatcccgctcttttcctacttttccttccctcaaagcttccattccacatccggaggagaagaaggaaatgaatttctctacagatgtcccattttcagactgctttaaaaaaaatccttctaatctgctatgcttgaatgccacgcggtacaaaggaaaaagtatcatggaaatattatgcaaattcccagatttgaagacaaaaatactctaattctaaccagagcaagcttttttattttttatacaggggaatattttattcaaggtaaaattctaaataaaatataattgttttttatcttttctacagcaaatttataattttaagattccttttcttgtttatcagcagttgttattacatccttgtggcacatttttttttttaattttgtaaaggtgaaaaaagcttttatgagctcatgtagcaatcagattttcctgtggattgataataaatgaatatgatatatagttaaatttttaaggggcatc

SEQ ID NO: 4953 - protein, 53 aa, Homo sapiens [sequence omitted]

SEQ ID NO: 4954 - DNA, 1296 bp, Homo sapiens
ggctggaggagcagataaactccaacacgatcccggggctcaagtggttccaacaaaccggacctccaggtcaccatcaaagaggagagcaatccggtgccttacaacagctcctggcccccttttcaagacctccccctttcttcctccatgaccccagcatccagcagcagtcggccagaccgggagacccgggccagcgtcatcaagaaaacatcggatatcacccaggcccgcgtcaagagctgttaagcctctgactctccgcggtggttgttggggcttcttggctttgttttgttgtttgtttgtattttatttttttctctctgacacctattttagacaaatctaagggaaaaagccttgacaatagaacattgattgctgtgtccaactccagtactggagcttctctttaactcaggactccagcccattggtagacgtgtgtttctagagcctgctggatctcccagggctactcactcaagttcaaggaccaacaagggcagtggaggtgctgcattgcctgcggtcaaggccagcaaggtggagtggatgcctcagaacggacgagataatgtgaactagctggaattttttattcttgtgaatatgtacataggcagcactagcgacattgcagtctgcttctgcaccttatcttaaagcacttacagataggccttcttgtgatcttgctctatctcacagcacactcagcacccccttctctgcccattccccagcctctcttcctatcccatcccatcccatcccatcccatcccatcccatcccgctcttttcctacttttccttccctcaaagcttccattccacatccggaggagaagaaggaaatgaatttctctacagatgtcccattttcagactgctttaaaaaaaatccttctaatctgctatgcttgaatgccacgcggtacaaaggaaaaagtatcatggaaatattatgcaaattcccagatttgaagacaaaaatactctaattctaaccagagcaagcttttttattttttatacaggggaatattttattcaaggtaaaattctaaataaaatataattgttttttatcttttctacagcaaatttataattttaagattccttttcttgtttatcagcagttgttattacatccttgtggcacatttttttttttaattttgtaaaggtgaaaaaagcttttatgagctcatgtagcaatcagattttcctgtggattgataataaatgaatatgatatatagttaaatttttaaggggcatc

SEQ ID NO: 4955 - protein, 53 aa, Homo sapiens [sequence omitted]

SEQ ID NO: 4956 - DNA, 734 bp, Homo sapiens
ccttgttttgctttcgatctggactgttctcaggcaagccggggagtaacttttagttttgctcctgcgattattcaactgacgggctttcatttccatttcacataccctagcaacacttataccttgcggaattgtattggtagcgtgaaaaaagcacactgagagggcaccatgccggtggaaaggatgcgcatgcgcccgtggctggaggagcagataaactccaacacgatcccggggtcttttcctacttttccttccctcaaagcttccattccacatccggaggagaagaaggaaatgaatttctctacagatgtcccattttcagactgctttaaaaaaaatccttctaatctgctatgcttgaatgccacgcggtacaaaggaaaaagtatcatggaaatattatgcaaattcccagatttgaagacaaaaatactctaattctaaccagagcaagcttttttattttttatacaggggaatattttattcaaggtaaaattctaaataaaatataattgttttttatcttttctacagcaaatttataattttaagattccttttcttgtttatcagcagttgttattacatccttgtggcacatttttttttttaattttgtaaaggtgaaaaaagcttttatgagctcatgtagcaatcagattttcctgtggattgataataaatgaatatgatatatagttaaatttttaaggggcatc

SEQ ID NO: 4957 - protein, 91 aa, Homo sapiens; identical to SEQ ID NO: 4945

SEQ ID NO: 4958 - DNA, 793 bp, Homo sapiens
tctccttgttttgctttcgatctggactgttctcaggcaagccggggagtaacttttagttttgctcctgcgattattcaactgacgggctttcatttccatttcacataccctagcaacacttataccttgcggaattgtattggtagcgtgaaaaaagcacactgagagggcaccatgccggtggaaaggatgcgcatgcgcccgtggctggaggagcagataaactccaacacgatcccggggctcaagtggcttaacaaggaaaagaagatttttcagatcccctggatgcatgcggctcttttcctacttttccttccctcaaagcttccattccacatccggaggagaagaaggaaatgaatttctctacagatgtcccattttcagactgctttaaaaaaaatccttctaatctgctatgcttgaatgccacgcggtacaaaggaaaaagtatcatggaaatattatgcaaattcccagatttgaagacaaaaatactctaattctaaccagagcaagcttttttattttttatacaggggaatattttattcaaggtaaaattctaaataaaatataattgttttttatcttttctacagcaaatttataattttaagattccttttcttgtttatcagcagttgttattacatccttgtggcacatttttttttttaattttgtaaaggtgaaaaaagcttttatgagctcatgtagcaatcagattttcctgtggattgataataaatgaatatgatatatagttaaatttttaaggggcatc

SEQ ID NO: 4959 - protein, 62 aa, Homo sapiens; identical to SEQ ID NO: 4947

SEQ ID NO: 4960 - DNA, 2137 bp, Homo sapiens
ggatttccagccgcggctcttcgcagtttcctctccttgttttgctttcgatctggactgttctcaggcaagccggggagtaacttttagttttgctcctgcgattattcaactgacgggctttcatttccatttcacataccctagcaacacttataccttgcggaattgtattggtagcgtgaaaaaagcacactgagagggcaccatgccggtggaaaggatgcgcatgcgcccgtggctggaggagcagataaactccaacacgatcccggggctcaagtggcttaacaaggaaaagaagatttttcagatcccctggatgcatgcggctagacatgggtgggatgtggaaaaagatgcaccactctttagaaactgggcaatccatacaggaaagcatcaaccaggagtagataaacctgatcccaaaacatggaaggcgaatttcagatgcgccatgaattccttgcctgatattgaagaagtcaaggataaaagcataaagaaaggaaataatgccttcagggtctaccgaatgctgcccctatcagaacggccttctaagaaagttgtaggacagtcccatctggacagcaacattgagaatcaagagattgtcaccaatccgccagacatttgccaagttgtagaggtgaccactgagagcgacgagcagccggtcagcatgagcgagctctaccctctgcagatctcccccgtgtcttcctatgcagaaagcgaaacgactgatagtgtgcccagcgatgaagagagtgccgaggggcggccacactggcggaagaggaatattgaaggcaaacagtacctcagcaacatggggactcgaggctcctacctgctgcccggcatggcgtccttcgtcacttccaacaaaccggacctccaggtcaccatcaaagaggagagcaatccggtgccttacaacagctcctggcccccttttcaagacctccccctttcttcctccatgaccccagcatccagcagcagtcggccagaccgggagacccgggccagcgtcatcaagaaaacatcggatatcacccaggcccgcgtcaagagctgttaagcctctgactctccgcggtggttgttggggcttcttggctttgttttgttgtttgtttgtattttatttttttctctctgacacctattttagacaaatctaagggaaaaagccttgacaatagaacattgattgctgtgtccaactccagtactggagcttctctttaactcaggactccagcccattggtagacgtgtgtttctagagcctgctggatctcccagggctactcactcaagttcaaggaccaacaagggcagtggaggtgctgcattgcctgcggtcaaggccagcaaggtggagtggatgcctcagaacggacgagataatgtgaactagctggaattttttattcttgtgaatatgtacataggcagcactagcgacattgcagtctgcttctgcaccttatcttaaagcacttacagataggccttcttgtgatcttgctctatctcacagcacactcagcacccccttctctgcccattccccagcctctcttcctatcccatcccatcccatcccatcccatcccatcccatcccgctcttttcctacttttccttccctcaaagcttccattccacatccggaggagaagaaggaaatgaatttctctacagatgtcccattttcagactgctttaaaaaaaatccttctaatctgctatgcttgaatgccacgcggtacaaaggaaaaagtatcatggaaatattatgcaaattcccagatttgaagacaaaaatactctaattctaaccagagcaagcttttttattttttatacaggggaatattttattcaaggtaaaattctaaataaaatataattgttttttatcttttctacagcaaatttataattttaagattccttttcttgtttatcagcagttgttattacatccttgtggcacatttttttttttaattttgtaaaggtgaaaaaagcttttatgagctcatgtagcaatcagattttcctgtggattgataataaatgaatatgatatatagttaaatttttaaggggcatc

SEQ ID NO: 4961 - protein, 294 aa, Homo sapiens; identical to SEQ ID NO: 4951

SEQ ID NO: 4962 - DNA, 2302 bp, Homo sapiens
ggatttccagccgcggctcttcgcagtttcctctccttgttttgctttcgatctggactgttctcaggcaagccggggagtaacttttagttttgctcctgcgattattcaactgacgggctttcatttccatttcacataccctagcaacacttataccttgcggaattgtattggtagcgtgaaaaaagcacactgagagggcaccatgccggtggaaaggatgcgcatgcgcccgtggctggaggagcagataaactccaacacgatcccggggctcaagtggcttaacaaggaaaagaagatttttcagatcccctggatgcatgcggctagacatgggtgggatgtggaaaaagatgcaccactctttagaaactgggcaatccatacaggaaagcatcaaccaggagtagataaacctgatcccaaaacatggaaggcgaatttcagatgcgccatgaattccttgcctgatattgaagaagtcaaggataaaagcataaagaaaggaaataatgccttcagggtctaccgaatgctgcccctatcagaacggccttctaagaaaggaaagaaaccaaagacagaaaaagaagacaaagttaagcacatcaagcaagaaccagttgagtcatctctggggcttagtaatggagtaagtgatctttctcctgagtatgcggtcctgacttcaactataaaaaatgaagtggatagtacggtgaacatcatagttgtaggacagtcccatctggacagcaacattgagaatcaagagattgtcaccaatccgccagacatttgccaagttgtagaggtgaccactgagagcgacgagcagccggtcagcatgagcgagctctaccctctgcagatctcccccgtgtcttcctatgcagaaagcgaaacgactgatagtgtgcccagcgatgaagagagtgccgaggggcggccacactggcggaagaggaatattgaaggcaaacagtacctcagcaacatggggactcgaggctcctacctgctgcccggcatggcgtccttcgtcacttccaacaaaccggacctccaggtcaccatcaaagaggagagcaatccggtgccttacaacagctcctggcccccttttcaagacctccccctttcttcctccatgaccccagcatccagcagcagtcggccagaccgggagacccgggccagcgtcatcaagaaaacatcggatatcacccaggcccgcgtcaagagctgttaagcctctgactctccgcggtggttgttggggcttcttggctttgttttgttgtttgtttgtattttatttttttctctctgacacctattttagacaaatctaagggaaaaagccttgacaatagaacattgattgctgtgtccaactccagtactggagcttctctttaactcaggactccagcccattggtagacgtgtgtttctagagcctgctggatctcccagggctactcactcaagttcaaggaccaacaagggcagtggaggtgctgcattgcctgcggtcaaggccagcaaggtggagtggatgcctcagaacggacgagataatgtgaactagctggaattttttattcttgtgaatatgtacataggcagcactagcgacattgcagtctgcttctgcaccttatcttaaagcacttacagataggccttcttgtgatcttgctctatctcacagcacactcagcacccccttctctgcccattccccagcctctcttcctatcccatcccatcccatcccatcccatcccatcccatcccgctcttttcctacttttccttccctcaaagcttccattccacatccggaggagaagaaggaaatgaatttctctacagatgtcccattttcagactgctttaaaaaaaatccttctaatctgctatgcttgaatgccacgcggtacaaaggaaaaagtatcatggaaatattatgcaaattcccagatttgaagacaaaaatactctaattctaaccagagcaagcttttttattttttatacaggggaatattttattcaaggtaaaattctaaataaaatataattgttttttatcttttctacagcaaatttataattttaagattccttttcttgtttatcagcagttgttattacatccttgtggcacatttttttttttaattttgtaaaggtgaaaaaagcttttatgagctcatgtagcaatcagattttcctgtggattgataataaatgaatatgatatatagttaaatttttaaggggcatc

SEQ ID NO: 4963 - protein, 349 aa, Homo sapiens; identical to SEQ ID NO: 570

SEQ ID NO: 4964 - DNA, 6344 bp, Homo sapiens
atgcattaaactccaggtattttcagggaggaatcatgaagccgctcctgttaaatcatatccattttattacgtctctccttgtggattacgtagaactttggaaaattaaacattagacatcttcatagaaaatcatgtcactgatttttaaagccagctcaatttaacctgccactgattccctaaccagctcttctctgactgtatcccgagggaaaatgtattgaacgcagcagaaggttaaggcagaggagttcggctagaccgggtagcagccaatcagatggggagggtccaaggatctgatgcctccaggcgagcagcgccaagctgagctggttagtctccttttattgtggatgaacaccacgtacatgccgtaaatgctccctaggctggctgcggctacaaggcagacccgggagctgagaatagaggaatacctgcccaagcaactcattctgcacagcagccgacaagacagcgattttcctgtgctggaatgtgcccatccaaagacacttggattggacttaatcttaaacctctggagttcaagaccttttaaaaagggctaaataaacaatctctacatgtaaaaggccactgactcctacttcctctgtatagagcaactgttgaactcagctgcctgtagggcgtgattctcagtcaccagactcagcttggagatcttacaatgatggcaatcaggagacactgaacggagatgctacatattcctctcttgcagcaaaaggttttagaagcgttcgaccaaacctacaagataaaagatcaccaactcagagccagataacagtgaatggaaactcaggaggtgccgtgagtcccatgagttactatcagaggccgttttccccctcggcatattctctcccagcctcactcaactccagcattgtcatgcagcacggcacatccctcgattccacagacacatatccccagcatgcgcagtctctggatggcaccaccagcagctctatccccctgtaccgatcctcagaggaagagaagagagtgacagtcatcaaagccccgcattacccagggatcgggcccgtggatgaatccggaatccccacagcaattagaacgacagtcgaccggcccaaggactggtacaagacgatgtttaagcaaattcacatggtgcacaagccggatgatgacacagacatgtataatactccttatacatacaatgcaggtctgtacaacccaccctacagtgctcagtcacaccctgctgcaaagacccaaacctacagacctctttccaaaagccactccgacaacagccccaatgcctttaaggatgcgtcctccccagtgcctcccccacatgttccacctccagtcccgccgcttcgaccaagagatcggtcttcaacagaaaagcatgactgggatcctccagacagaaaagtggacacaagaaaatttcggtctgagccaaggagtatttttgaatatgaacctggcaagtcatcaattcttcagcatgaaagaccagcctccttgtatcagtcctctatagacagaagcctggaaagacccatgagttctgcaagcatggccagtgacttcaggaagcggaggaagagcgagcctgcagtgggtccaccacggggcttgggagatcaaagtgcgagcaggactagcccaggccgagtggacctcccaggatcaagcaccactcttacaaagtctttcactagctcttctccttcttccccatcaagagcaaaaggtggggatgatagcaaaatatgtccatccctttgcagttactcagggctcaacggcaacccctccagtgagttagattactgtagcacttacagacagcacttggatgtccctcgggactcaccaagagccattagtttcaagaacggctggcaaatggcccggcaaaacgcagaaatctggagcagcacggaagaaaccgtctctcccaaaatcaaatcccggagctgtgacgatctcctaaacgacgactgcgatagcttcccggacccgaaagtcaagtcggaaagcatgggctccctgttatgtgaggaggactccaaggagagctgccccatggcgtgggggtccccctacgtcccggaggttcgcagtaacggcagatcaaggatcagacacaggtcagcccgcaacgccccggggttcctgaagatgtacaagaaaatgcaccgcatcaaccgcaaggacctgatgaactccgaggtgatctgctccgtgaagtccaggattctgcagtacgagagcgagcagcagcacaaggacctgctgcgcgcctggagccagtgctccacggaggaggtgccccgggacatggtgcccacacgcatctccgaattcgaaaagctgatccagaagtccaaatccatgccaaatttaggggatgacatgctgtctcccgtaaccctagaaccaccgcaaaatggcctatgtcccaagaggcggttttccattgagtatttgctggaggaagaaaatcaaagcggcccccccgctcggggccggcgaggctgccagtctaacgccctggtgcccattcacattgaagtcaccagcgatgagcagccccgagcacacgtggagttttccgacagcgaccaggacggggttgtgtccgaccacagtgactacattcacctagaggggtcatccttctgcagtgaaagtgactttgatcacttttccttcacatcctccgaaagcttttacggatccagccaccaccaccaccatcaccaccaccaccaccaccgccacctcatcagctcctgcaaaggcaggtgcccggcctcctacactcgatttaccacaatgttaaaacacgaaagagccagacacgaaaacaccgaggagcccagaaggcaagaaatggaccctggcctttctaaacttgcttttctagtcagtcctgtgcctttccggaggaaaaaaaattcggctcctaagaaacagactgaaaaggcaaaatgtaaagcatctgtgtttgaggctctggactctgcccttaaagacatctgtgaccaaattaaagctgaaaagaaaagggggagcttgccggacaacagcatcctgcaccgcctcatcagtgagctgctgccagatgttcccgagaggaactcatccctgagagcgctgaggaggagccccctgcaccagcctctccacccactgcctcccgatggtgctattcattgtccaccctaccagaatgactgcgggagaatgccccgcagtgcctctttccaagacgtggacacagccaacagcagctgccaccaccaagaccgtggcggtgcactccaagaccgtgagtcccctagaagttactcatccactttgactgacatggggagaagtgcaccaagggaaagaagaggaactccagaaaaagagaaattgcctgcaaaagctgtttatgattttaaggctcagacatctaaggagttgtcatttaagaaaggagatactgtctacatcctcaggaaaattgatcaaaattggtatgagggagaacaccacgggagagtgggcatcttcccgatctcatacgtagagaaactcacacctcctgagaaagcacagcctgcaagaccacctccgccagcccagcccggagaaatcggagaagctatagccaaatacaacttcaacgcagacacaaatgtggagctgtcactgagaaagggagatagagttattcttcttaaaagagttgatcaaaactggtatgaaggtaaaatcccaggaaccaacagacaaggcatcttccctgtttcctatgtggaggtcgtcaagaagaacacaaaaggtgctgaggactaccctgaccctccaataccccacagctattctagtgataggattcacagcttgagctcaaataagccacagcgtcctgtgtttactcatgaaaatattcaaggtgggggggaaccgtttcaggctctgtataactatactcccaggaatgaagatgagctggagctcagagaaagtgatgtcattgatgtcatggaaaagtgtgatgacggctggtttgtggggacctcaagaagaaccaaattctttggtactttccccggaaactacgtcaagaggctgtgaattgcgctccctccttctgtagaggccgcctgccagccatgcacctgcgtcaacgcgcctgaaacaccccgcgggcctcccgttgtcatgccttacggtttccaatgcgccgtcaccatctccacctgccaccaaaccaccagcagagtagccgccgctgctgtgagcctggggacgacatggcaggctggtccccctccgtgaaagtgtggattcctacttcctgctctaagctttgacacgtcaaaatgtgggatcagaaagaaaaaaatcatgatatttaaaaatggtcaaatatttgaggcaaaaaaaaaaaaaaaaagtgtctccaggaggctgtccagcctcgtggctccatttcaacatctccccccaggcgatgttctcccccaagacgaccagaaaattgtttattggggaatgctgtggtttgcattttcatattcttcgcttggcagtgtgtattcttttcacaagtttgcctagtgtcttggtttacacaatatgacaactgtaactgtactttagctattgtttgcctgcacatacatgttgtaatatgcacagtgattacaacctttaaagcaagaggaggcgagttaatttggatgagtgtgattttgctgattgaatgtgagttttcaaataggagtctttttctgcaatttgtttgcattttttagaagtgcaaacagtaagtaaataaaagccttcggtaataatcatgacaatacaagaggctgagctaggctacaggggaaaactattgtgttgtaaagttgcatcgctattttatattaaaatgtaatgatcagcatcatgaacaatgagctcttagtgttttatttatctgaaaaaatgtaagtaaaagcagtgttagtgagaggtgcaaagaattattctaacagacacctgaaagtatctgtaagcaatactagtaggtaagatttcactgtgtgtacacatacacatttgagattgtatgagaacatataatccatatgatatgttgtacattttatggaaatgtaatagaatctcacacattattttatagaaatagagtacagaagcatcacaagtattaaagttggttttagcaaggattaggattactacaattatttttactataataattatttttcttctatggaactcagaatcctggctacatttgaggacaggaatatgttgagcctgattttcctggtgtgtgtaaaatatttcctaggaataaattaggcactttttagaagcaatgttaaatcattcaggttttattttctgccctgaagcagaaatttaaaaaatgatattgggacctggaaggtttaatatggttcacagtgcctgaattacacctgctccgaaaactagctttgtatttcttatgactttgcataagaactgttcatctttggatcttgagcaccttacagataaaactttttatggcatctctttcatggacagtgatattgatcttttcacaatgtacgtagcctctagaattttgtacatatgtttgctctttttttgtacagactagttgttgagaaaacaggggcgtttcctaatttggtctttatcctgcgacaacactttcagcagactagcctctccttatctcacagatcacaagcacccctagatagtgtgattctgtcagatagcatttatgcaaaaatctatgaagttaaaagatcgtagaagccaaatgaaatgtacatatctactgactgatgacaagggaatttcattaggaagaaggtaaagaaacatcgttgagtagcctaccttgatttctgtcaagttcataaccagcttcatattttaaaggcttcaggtttgaaattaagtcaactgcatgcagctttgctgataaatgaataattctctttgatgccatttatgagaaaagacttcaatatctgttgcctgtcatatttaagaaaaattactgtttctactctctgtatctgattttaaaagaaaaaactattcatacctggcttccaggtaattgactttgaattcttacaagcaaaggtcattgtgtttttcttgaatagacatctaataaattttgcttggaagtatacttcagtttttcttcttgacatttatctttataaaaattgtgtattttattccaacttgttaaactaagagaaaatgca

SEQ ID NO: 4965 - protein, 1100 aa, Homo sapiens; identical to SEQ ID NO: 574

SEQ ID NO: 4966 - DNA, 6264 bp, Homo sapiens
atgcattaaactccaggtattttcagggaggaatcatgaagccgctcctgttaaatcatatccattttattacgtctctccttgtggattacgtagaactttggaaaattaaacattagacatcttcatagaaaatcatgtcactgatttttaaagccagctcaatttaacctgccactgattccctaaccagctcttctctgactgtatcccgagggaaaatgtattgaacgcagcagaaggttaaggcagaggagttcggctagaccgggtagcagccaatcagatggggagggtccaaggatctgatgcctccaggcgagcagcgccaagctgagctggttagtctccttttattgtggatgaacaccacgtacatgccgtaaatgctccctaggctggctgcggctacaaggcagacccgggagctgagaatagaggaatacctgcccaagcaactcattctgcacagcagccgacaagacagcgattttcctgtgctggaatgtgcccatccaaagacacttggattggacttaatcttaaacctctggagttcaagaccttttaaaaagggctaaataaacaatctctacatgtaaaaggccactgactcctacttcctctgtatagagcaactgttgaactcagctgcctgtagggcgtgattctcagtcaccagactcagcttggagatcttacaatgatggcaatcaggagacactgaacggagatgctacatattcctctcttgcagcaaaaggttttagaagcgttcgaccaaacctacaagataaaagatcaccaactcagagccagataacagtgaatggaaactcaggaggtgccgtgagtcccatgagttactatcagaggccgttttccccctcggcatattctctcccagcctcactcaactccagcattgtcatgcagcacggcacatccctcgattccacagacacatatccccagcatgcgcagtctctggatggcaccaccagcagctctatccccctgtaccgatcctcagaggaagagaagagagtgacagtcatcaaagccccgcattacccagggatcgggcccgtggatgaatccggaatccccacagcaattagaacgacagtcgaccggcccaaggactggtacaagacgatgtttaagcaaattcacatggtgcacaagccggatgatgacacagacatgtataatactccttatacatacaatgcaggtctgtacaacccaccctacagtgctcagtcacaccctgctgcaaagacccaaacctacagacctctttccaaaagccactccgacaacagccccaatgcctttaaggatgcgtcctccccagtgcctcccccacatgttccacctccagtcccgccgcttcgaccaagagatcggtcttcaacagaaaagcatgactgggatcctccagacagaaaagtggacacaagaaaatttcggtctgagccaaggagtatttttgaatatgaacctggcaagtcatcaattcttcagcatgaaagaccagcctccttgtatcagtcctctatagacagaagcctggaaagacccatgagttctgcaagcatggccagtgacttcaggaagcggaggaagagcgagcctgcagtgggtccaccacggggcttgggagatcaaagtgcgagcaggactagcccaggccgagtggacctcccaggatcaagcaccactcttacaaagtctttcactagctcttctccttcttccccatcaagagcaaaaggtggggatgatagcaaaatatgtccatccctttgcagttactcagggctcaacggcaacccctccagtgagttagattactgtagcacttacagacagcacttggatgtccctcgggactcaccaagagccattagtttcaagaacggctggcaaatggcccggcaaaacgcagaaatctggagcagcacggaagaaaccgtctctcccaaaatcaaatcccggagctgtgacgatctcctaaacgacgactgcgatagcttcccggacccgaaagtcaagtcggaaagcatgggctccctgttatgtgaggaggactccaaggagagctgccccatggcgtgggggtccccctacgtcccggaggttcgcagtaacggcagatcaaggatcagacacaggtcagcccgcaacgccccggggttcctgaagatgtacaagaaaatgcaccgcatcaaccgcaaggacctgatgaactccgaggtgatctgctccgtgaagtccaggattctgcagtacgagagcgagcagcagcacaaggacctgctgcgcgcctggagccagtgctccacggaggaggtgccccgggacatggtgcccacacgcatctccgaattcgaaaagctgatccagaagtccaaatccatgccaaatttaggggatgacatgctgtctcccgtaaccctagaaccaccgcaaaatggcctatgtcccaagaggcggttttccattgagtatttgctggaggaagaaaatcaaagcggcccccccgctcggggccggcgaggctgccagtctaacgccctggtgcccattcacattgaagtcaccagcgatgagcagccccgagcacacgtggagttttccgacagcgaccaggacggggttgtgtccgaccacagtgactacattcacctagaggggtcatccttctgcagtgaaagtgactttgatcacttttccttcacatcctccgaaagcttttacggatccagccaccaccaccaccatcaccaccaccaccaccaccgccacctcatcagctcctgcaaaggcaggtgcccggcctcctacactcgatttaccacaatgttaaaacacgaaagagccagacacgaaaacaccgaggagcccagaaggcaagaaatggaccctggcctttctaaacttgcttttctagtcagtcctgtgcctttccggaggaaaaaaaattcggctcctaagaaacagactgaaaaggcaaaatgtaaagcatctgtgtttgaggctctggactctgcccttaaagacatctgtgaccaaattaaagctgaaaagaaaagggggagcttgccggacaacagcatcctgcaccgcctcatcagtgagctgctgccagatgttcccgagaggaactcatccctgagagcgctgaggaggagccccctgcaccagcctctccacccactgcctcccgatggtgctattcattgtccaccctaccagaatgactgcgggagaatgccccgcagtgcctctttccaagacgtggacacagccaacagcagctgccaccaccaagaccgtggcggtgcactccaagaccgtgagtcccctagaagttactcatccactttgactgacatggggagaagtgcaccaagggaaagaagaggaactccagaaaaagagaaattgcctgcaaaagctgtttatgattttaaggctcagacatctaaggagttgtcatttaagaaaggagatactgtctacatcctcaggaaaattgatcaaaattggtatgagggagaacaccacgggagagtgggcatcttcccgatctcatacgtagagaaactcacacctcctgagaaagcacagcctgcaagaccacctccgccagcccagcccggagaaatcggagaagctatagccaaatacaacttcaacgcagacacaaatgtggagctgtcactgagaaagggagatagagttattcttcttaaaagagttgatcaaaactggtatgaaggtaaaatcccaggaaccaacagacaaggcatcttccctgtttcctatgtggaggtcgtcaagaagaacacaaaaggtgctgaggactaccctgaccctccaataccccacagctattctagtgataggattcacagcttgagctcaaataagccacagcgtcctgtgtttactcatgaaaatattcaaggtgggggggaaccgtttcaggctctgtataactatactcccaggaatgaagatgagctggagctcagagaaagtgatgtcattgatgtcatggaaaagtgtgatgacggctggtttgtggggacctcaagaagaaccaaattctttggtactttccccggaaactacgtcaagaggctgtgaattgcgctccctccttctgtagaggccgcctgccagccatgcacctgcgtcaacgcgcctgaaacaccccgcgggcctcccgttgtcatgccttacggtttccaatgcgccgtcaccatctccacctgccaccaaaccaccagcagagtagccgccgctgctgtgagcctggggacgacatggcaggctggtccccctccgtgaaagtgtggattcctacttcctgctctaagctttgacacgtcaaaatgtgggatcagaaagaaaaaaatcatgatatttaaaaatggtcaaatatttgaggcaaaaaaaaaaaaaaaaagtgtctccaggaggctgtccagcctcgtggctccatttcaacatctccccccaggcgatgttctcccccaagacgaccagaaaattgtttattggggaatgctgtggtttgcattttcatattcttcgcttggcagtgtgtattcttttcacaagtttgcctagtgtcttggtttacacaatatgacaactgtaactgtactttagctattgtttgcctgcacatacatgttgtaatatgcacagtgattacaacctttaaagcaagaggaggcgagttaatttggatgagtgtgattttgctgattgaatgtgagttttcaaataggagtctttttctgcaatttgtttgcattttttagaagtgcaaacagtaagtaaataaaagccttcggtaataatcatgacaatacaagaggctgagctaggctacaggggaaaactattgtgttgtaaagttgcatcgctattttatattaaaatgtaatgatcagcatcatgaacaatgagctcttagtgttttatttatctgaaaaaatgtaagtaaaagcagtgttagtgagaggtgcaaagaattattctaacagacacctgaaagtatctgtaagcaatactagtaggtaagatttcactgtgtgtacacatacacatttgagattgtatgagaacatataatccatatgatatgttgtacattttatggaaatgtaatagaatctcacacattattttatagaaatagagtacagaagcatcacaagtattaaagttggttttagcaaggattaggattactacaattatttttactataataattatttttcttctatggaactcagaatcctggctacatttgaggacaggaatatgttgagcctgattttcctggtgtgtgtaaaatatttcctaggaataaattaggcactttttagaagcaatgttaaatcattcaggttttattttctgccctgaagcagaaatttaaaaaatgatattgggacctggaaggtttaatatggttcacagtgcctgaattacacctgctccgaaaactagctttgtatttcttatgactttgcataagaactgttcatctttggatcttgagcaccttacagataaaactttttatggcatctctttcatggacagtgatattgatcttttcacaatgtacgtagcctctagaattttgtacatatgtttgctctttttttgtacagactagttgttgagaaaacaggggcgtttcctaatttggtctttatcctgcgacaacactttcagcagactagcctctccttatctcacagatcacaagcacccctagatagtgtgattctgtcagatagcatttatgcaaaaatctatgaagttaaaagatcgtagaagccaaatgaaatgtacatatctactgactgatgacaagggaatttcattaggaagaaggtaaagaaacatcgttgagtagcctaccttgatttctgtcaagttcataaccagcttcatattttaaaggcttcaggtttgaaattaagtcaactgcatgcagctttgctgataaatgaataattctctttgatgccatttatgagaaaagacttcaatatctgttgcctgtcatatttaagaaaaattactgtttctactctctgtatctgattttaaaagaaaaaactattcatacctggcttccaggtaattgactttgaattcttacaagcaaaggtcattgtgtttttcttgaatagacatctaataaattttgcttggaagtat

SEQ ID NO: 4967 - protein, 1100 aa, Homo sapiens; identical to SEQ ID NO: 574

SEQ ID NO: 4968 - DNA, 1248 bp, Homo sapiens
atgcattaaactccaggtattttcagggaggaatcatgaagccgctcctgttaaatcatatccattttattacgtctctccttgtggattacgtagaactttggaaaattaaacattagacatcttcatagaaaatcatgtcactgatttttaaagccagctcaatttaacctgccactgattccctaaccagctcttctctgactgtatcccgagggaaaatgtattgaacgcagcagaaggttaaggcagaggagttcggctagaccgggtagcagccaatcagatggggagggtccaaggatctgatgcctccaggcgagcagcgccaagctgagctggttagtctccttttattgtggatgaacaccacgtacatgccgtaaatgctccctaggctggctgcggctacaaggcagacccgggagctgagaatagaggaatacctgcccaagcaactcattctgcacagcagccgacaagacagcgattttcctgtgctggaatgtgcccatccaaagacacttggattggacttaatcttaaacctctggagttcaagaccttttaaaaagggctaaataaacaatctctacatgtaaaaggccactgactcctacttcctctgtatagagcaactgttgaactcagctgcctgtaggtgcatttcctgtccatttcagaagctaattatgaaatggccacacaactggatgtttctgtttataaaatagtgttccttggaggggcttgcaacatctaaatatcttatgtcagaataaaagccactgagatccaaagaagtggactaaacttgacaatatctgaaagtcttctgctggaccaggaacccctacagtggacagtgtgcttcctgcttttccacgcagttcgacaggaaaaccatcccaaagtgaacaaaaatggaagcctgcgaagttcatcatgcaagacattgatgccactcacgtctttgtgatagcagaattggttaacgtcctccaggagcgagcgggtgaattaatggaccaaaatgctttttcccttacccagaaatgaaaatactcaatatggaccattcaggaattataagcagcaaatgtgaaagacttgccactcgatatcttaggtgactgattagacgtagagggttgttttagttgttttaggagcatgccacgggaaagaccaaaggatcatttgttcagaaaaaaacctggaactgattttgttataccatagaattaa

SEQ ID NO: 4969 - protein, 64 aa, Homo sapiens
MLPRLAAATRQTRELRIEEYLPKQLILHSSRQDSDFPVLECAHPKTLGLDLILNLWSSRPFKKG

SEQ ID NO: 4970 - DNA, 1897 bp, Homo sapiens
tgcattaaactccaggtattttcagggaggaatcatgaagccgctcctgttaaatcatatccattttattacgtctctccttgtggattacgtagaactttggaaaattaaacattagacatcttcatagaaaatcatgtcactgatttttaaagccagctcaatttaacctgccactgattccctaaccagctcttctctgactgtatcccgagggaaaatgtattgaacgcagcagaaggttaaggcagaggagttcggctagaccgggtagcagccaatcagatggggagggtccaaggatctgatgcctccaggcgagcagcgccaagctgagctggttagtctccttttattgtggatgaacaccacgtacatgccgtaaatgctccctaggctggctgcggctacaaggcagacccgggagctgagaatagaggaatacctgcccaagcaactcattctgcacagcagccgacaagacagcgattttcctgtgctggaatgtgcccatccaaagacacttggattggacttaatcttaaacctctggagttcaagaccttttaaaaagggctaaataaacaatctctacatgtaaaaggccactgactcctacttcctctgtatagagcaactgttgaactcagctgcctgtaggtaagattttttattctggaattatttaattgttttctggtatgttcataactaatgtctttaaaataacttacttatagtgaaaataataaggggagttgtgaacaattttcaggtaaacacggtgttccagaatacagcaggagcatctgggcatttttgtggctgtaagttttaaactttgcttaaagctctcataatagtgacctgcagtacacgcttgactatgactaagccatggatcagaggtctaattaagcctgattgccagagcaatgagaggatgtttcagacatcatatttttgttgtttagactgctttatttttaactttccaggggcattaaaaaaaaaaaaagaggaaaaagatgcaaccatccacctgagtaaagataatatatataagtaattgttctttaagggcaatgagcgagccgtattgtataatgttctcctttcatcactgtttcgttcattgctcgtgtggaattagagtggttgatttgggggaatctgggggttttgtttttgttattgttgttttgtatgttcctagcacattttaggggacagtgttgaggattccttactaagctgactgtcttttgctgggtacatctgctggcaggtttctctaacgtgacaatgtgatacttcgggtcagtttctgtggctcccctctccccctcgttacgcttgcacttgacattttgcgaagtactttgatctgtggactttaacttcaaacacagcatttactttgattgtggctatttactatgctcagtaaaaagtctccttttttttccttttggtttaatgctttcatagcatttcctttaaacaatttattggagctttagttttcctcactgatctgtcttagatttcacttctagagggacccccaattgtaagaaaagtgttctctggtaaagttctccccaacacagacttcaggacagttcatggcccctgtctggcagatgtgtaagagcaagcagcaaatgagagtgcacagagccccgcgctggctgccctgctgcctcagaatctccgtgtgccttggggcccaactggtgctttttaaaaacatggatgctgaaatctttggagttcagaaatacttttttttcagaaaagtttattggtatcacagagcacatatcaaaggaaagcatgcattttaaccacataaggatcgtctgagtaacaaaaacgggaagaaataacaaag

SEQ ID NO: 4971 - protein, 64 aa, Homo sapiens; identical to SEQ ID NO: 4969

SEQ ID NO: 4972 - DNA, 3203 bp, Homo sapiens
atgcgcggcctgccgggggcggcctcttgcagttcccgccctgacgcagcgcgagattagagctcctgctagtccccagctgaccctgggcctcaaaggcaagccctgacctcagtcacacggggtggcggtgatatggtttggctctgtgtgcttcactctgcctcactcgccttccgcctgctggacgctgccctgttccccgcaggcggccgccgtggagggcaggcaccgcgctccctggctgctcccggggccttccaagcacagccacggccatggggccgaaacccagacctcgaggggcctgcgggcagagctcgacaagcccagctgctacactgaagggaaaaacctgaggaagcccctgaccttcttgaataacctggatattgcagaatcatgcctggcacacggcactggcagagacgcagaagggaaagtgtccagcgatgagagataccggccagggggcaaatcttcagcttgcagcactcactttgcagatccagttggaattatttgtgttgacgctctctgctctctccgctctcccctggaaatgacgaggaactgagtacagtggacaatggcttccgtgtccctagctccccccgagccatgagctgctacatcaaaagtctgcagtgggctgcccttcccataatatttcaatttaagcaccgacttgctgctgcggagtcatatctcattcatgctgcagcctttgcaggagtcagggatcattatggagcaagcactgagaaaaaacagattacagcttggcaccgagcagccaggttgcaccccagatgcttcagggacatggtgcctgctctggagaatggggcagcttccacactgcccaggagccagggcttctgacccaggagcgaaagtctgtctcttccatttctgggagctggcagtatttgcacgactttctgggcctcaggcatcccattgcccaccaggaattaccttcctccaggatcatggtgaagatgacatgagatgctaatgcttggcctgcggttgctatttttagttctccactttcctggaaagcatgcagttgaagttcatgacggtattctctcaacgtgtgactcaaagacagaggccgtttcccatccaccggttctcacactgccccattctgcagcttcaccatccacgcgctaagaaggcaggccccaaagtctcagcacccagccgctggggtcctcgctcttatggacagaaaactcaagaatgaatatgtttccccatcttgtgcccttttgcctggaaactatacagagcaggggtccctgctggcattccttctctgtactagtacggcttcggaaagtactggttctctgaggagcgctcagttgcatctggaaggtgcagtgtgcacagcgatgccccttgacaccaaggtgtgagcatttgagctgtgctggaaggttctccatggaatagtgcccaccctggagggtcctgtgccgcgcacttgaggaggctgtggtggtgaggagagactctggagcaacccacactcccgataagtcagataagagtgcctcctctaggtaagtttatgttgcaaatttaaagagaggaaccaagaaacagcaaggacactgagccaggactgagagtttgggtcttaggtggctttgggtcattacgccctctcaagtggattgctctaagccctgtttatttgttaatgtgaatagttggatggaattgcctttgttctaaaatcttttattctgcctaaagtctctgggtcagcaagcacatgccacatggcttctctctctgcatgggaatgcacacctgagtagggaggctggccagcccgtgctgccctggtggggtgagtgttagctggctagggttgctggaacagaggggattcaaccacaggaatttattctctcacaccatggaggcccaaagccccagatcatggtgctgtagggccaggctccctctgagggcactagggaggacctgtgcccatcctctccagctcctggtggttccttggctcgtggcagcacagcttgtaccttcacgtggcactctccctttatgtgtgtggatgtgtccaattttccttttctgttggggccccagccgtagtggcttagaggctcacctactctaacaggacctcgtctgaactcatgacatctgcaagactgtgtatccaaataagagcacattctgagatgctgggggttaggacttaagcacagaagatttgtggggaggtacacagttcaatccatctggaaggtggatagccatggcagggtggaaagacgtgtgtgggtataggccggaggtggcctcactggagaaacctgtgcacggccccacaaggcagcagctgagcgtggaaggggctggagctgccccgtggtagggaaggggccgtgtggccagcagcagcatctgcctttgtcatcactgggtgggaccacgagggcaatgctactcttcccctcacaccttctacaggcaagttggccaggtgtcaatgcagccaggtgacacggccgcctggagggcaggagcagacagccccatggaggctctaggagatagacagggaggccgcagctgtccaggagctgaagtgagcagcagagggcgccgggggagatgcgccctagcaccaggctctgagtgccccagcgagcttccttgccttgactttcctcactgggaacccgggcctggagtccatatgaagcctcagcccaggggagggtctacctgtccaggaggctcccaccatccagctcgccctggatggtgccctcagaggtgcctgggcatggggtcacctcggagagtctggaggggcctccggacagtgcggccacgggctgtcctctgcttctcagtgcccaagacagggaaccagagcacagcactgaacacgttttagtgctcttttagttcatgtgctgcttgctgaatttccctgaattcagagaagagcctgacgcagaggaagcatctgagatcttctgtatgttttctcgtctgtgcaaagtgttttcaactctttcaaaggtcggcattcactgaatttcagctccccttggcttgatctctcatacaaaggttctcaaattccctgaaaatatgcaatgattttctcactcaataaacgacttttctgtcaccatgag

SEQ ID NO: 4973 - protein, 101 aa, Homo sapiens
MLQPLQESGIIMEQALRKNRLQLGTEQPGCTPDASGTWCLLWRMGQLPHCPGARASDPGAKVCLFHFWELAVFARLSGPQASHCPPGITFLQDHGEDDMRC

SEQ ID NO: 4974 - DNA, 574 bp, Homo sapiens
aaggaactttagaagttttccagcgtgttcccctcagacccacagcctcccgagcctcagccatcaccatgtaaatgctaatgaatgacaagcgccacagaggactttcatcttaccatttgaagaggaagttggctctggacatggaacaaggatggtttctgccttgctttgacacaactaatggaggccactgaaataatctttcccactaggaaggctgtcacaaggaaagaaagaatgaaggtccgcaaccaacaccaagctctgagaagttgacttggatgatgttctacccagctctcatctaaaggagtagagtccccaagccagaggaagctgtcagagagcttctcagctgtgaagattctatgaggtcccaaaggttaatgatgccagttacagaagcttgacagagcaaaaggggaaggatgtgtcacttggctgtgtggctggctgatcttagggaatgagaaagcaaatgtgatggaggtgaccaaggggtgacaatgcttcaccaccatcatgaagagcatacaggggactgggggtcagagggaagtgaggataggga

SEQ ID NO: 4975 - protein, 40 aa, Homo sapiens
MLMNDKRHRGLSSYHLKRKLALDMEQGWFLPCFDTTNGGH

SEQ ID NO: 4976 - DNA, 670 bp, Homo sapiens
gaggggctcttgctgggcctgcggaggagagcaggtgcattttcaagagaggagatacccataaaaaattcaggaaaaagagtttcactcttgtcttccaggctagagtgcaatggggcaactgcaacctccacctcccaggctttcgtacattttgctatgagttgtcttgcggttttcaatgtggttttctatatggtccattgatcttcttggagtgtcttctctggatacaactacataccctgatatatcagcgaggactgtccagtctgctcataggaagttgtgtgactccaaagcctggacctcacagttcattcatcaatctctgccatacttgtggactttcatcccaccatgatattcatgtcatagtattcggcagtgctcaagagtatcccaagaaataactgtgtttttattctgtgtagcttggaaccgccttttctatattgtggtccaaaatgtttctccgtctataaaattgagaaaataatatgtctcatctcatttgttccccttttgtccccaaggatcatagtcctaatatacctgtagttcaatatctgaagaggattctttttcatatattttttacaattttctagttttaaatttgggcatgttggatttttcagggtgtgcctaacaagatttttgctaaaac

SEQ ID NO: 4977 - protein, 60 aa, Homo sapiens
MWFSIWSIDLLGVSSLDTTTYPDISARTVQSAHRKLCDSKAWTSQFIHQSLPYLWTFIPP

SEQ ID NO: 4978 - DNA, 7969 bp, Homo sapiens
gagagctggctgagccgcggcgcgggactgctcacctccaagcgctcgcgcggggatcgcggctcctgctcactttgcggcccgctgtcctcctgcccgccccgagggcccccggccggagcgcagagggagggggccgcgctcgccagcaccccgccgccttcccccgcctgggggaagaatgtgccaccagctgttctccgcttgcgagcgctgcgcccagtagtgaggaacttggaggaagaagagacaaaggctgccgtcgggacgggcgagttagggacttgggtttgggcgaacaaaaggtgagaaggacaagaagggaccgggcgatggcagcaggggagccccgcgggcgcgcgtcctcgggagtggcgccgtgacacgcatggtttccccggacccgcggcggcgctgacttccgcgagtcggagcggcactcggcgagtccgggactgcgctggaacaatggataacttcttcaccgagggaacacgggtctggctgagagaaaatggccagcattttccaagtactgtaaattcctgtgcagaaggcatcgtcgtcttccggacagactatggtcaggtattcacttacaagcagagcacaattacccaccagaaggtgactgctatgcaccccacgaacgaggagggcgtggatgacatggcgtccttgacagagctccatggcggctccatcatgtataacttattccagcggtataagagaaatcaaatatatacctacatcggctccatcctggcctccgtgaacccctaccagcccatcgccgggctgtacgagcctgccaccatggagcagtacagccggcgccacctgggcgagctgcccccgcacatcttcgccatcgccaacgagtgctaccgctgcctgtggaagcgccacgacaaccagtgcatcctcatcagtggtgaaagtggggcaggtaaaaccgaaagcactaaattgatcctcaagtttctgtcagtcatcagtcaacagtctttggaattgtccttaaaggagaagacatcctgtgttgaacgagctattcttgaaagcagccccatcatggaagctttcggcaatgcgaagaccgtgtacaacaacaactctagtcgctttgggaagtttgttcagctgaacatctgtcagaaaggaaatattcagggcgggagaattgtagattatttatcttcccagaaccgagtagtaaggcaaaatcccggggaaaggaattatcacatattttatgcactgctggcagggctggaacatgaagaaagagaagaattttatttatctacgccagaaaactaccactacttgaatcagtctggatgtgtagaagacaagacaatcagtgaccaggaatcctttagggaagttattacggcaatggacgtgatgcagttcagcaaggaggaagttcgggaagtgtcgaggctgcttgctggtatactgcatcttgggaacatagaatttatcactgctggtggggcacaggtttccttcaaaacagctttgggcagatctgcggagttacttgggctggacccaacacagctcacagatgctttgacccagagatcaatgttcctcaggggagaagagatcctcacgcctctcaatgttcaacaggcagtagacagcagggactccctggccatggctctgtatgcgtgctgctttgagtgggtaatcaagaagatcaacagcaggatcaaaggcaatgaggacttcaagtctattggcatcctcgacatctttggatttgaaaactttgaggttaatcactttgaacagttcaatataaactatgcaaacgagaaacttcaggagtacttcaacaagcatattttttctttagaacaactagaatatagccgggaaggattagtgtgggaagatattgactggatagacaatggagaatgcctggacttgattgagaagaaacttggcctcctagcccttatcaatgaagaaagccattttcctcaagccacagacagcaccttattggagaagctacacagtcagcatgcgaataaccacttttatgtgaagcccagagttgcagttaacaattttggagtgaagcactatgctggagaggtgcaatatgatgtccgaggtatcttggagaagaacagagatacatttcgagatgaccttctcaatttgctaagagaaagccgatttgactttatctacgatctttttgaacatgtttcaagccgcaacaaccaggataccttgaaatgtggaagcaaacatcggcggcctacagtcagctcacagttcaaggactcactgcattccttaatggcaacgctaagctcctctaatcctttctttgttcgctgtatcaagccaaacatgcagaagatgccagaccagtttgaccaggcggttgtgctgaaccagctgcggtactcagggatgctggagactgtgagaatccgcaaagctgggtatgcggtccgaagaccctttcaggacttttacaaaaggtataaagtgctgatgaggaatctggctctgcctgaggacgtccgagggaagtgcacgagcctgctgcagctctatgatgcctccaacagcgagtggcagctggggaagaccaaggtctttcttcgagaatccttggaacagaaactggagaagcggagggaagaggaagtgagccacgcggccatggtgattcgggcccatgtcttgggcttcttagcacgaaaacaatacagaaaggtcctttattgtgtggtgataatacagaagaattacagagcattccttctgaggaggagatttttgcacctgaaaaaggcagccatagttttccagaagcaactcagaggtcagattgctcggagagtttacagacaattgctggcagagagaaagagagagagagcgaagagaagccgagctccgcgcccagcaggaagaagaaacgaggaagcagcaagaactcgaagccttgcagaagagccagaaggaagctgaactgacccgtgaactggagaaacagaaggaaaataagcaggtggaagagatcctccgtctggagaaagaaatcgaggacctgcagcgcatgaaggagcagcaggagctgtcgctgaccgaggcttccctgcagaagctgcaggagcggcgggaccaggagctccgcaggctggaggaggaagcgtgcagggcggcccaggagttcctcgagtccctcaatttcgacgagatcgacgagtgtgtccggaatatcgagcggtccctgtcggtgggaagcgaattttccagcgagctggctgagagcgcatgcgaggagaagcccaacttcaacttcagccagccctacccagaggaggaggtcgatgagggcttcgaagccgacgacgacgccttcaaggactcccccaaccccagcgagcacggccactcagaccagcgaacaagtggcatccggaccagcgatgactcttcagaggaggacccatacatgaacgacacggtggtgcccaccagccccagtgcggacagcacggtgctgctcgccccatcagtgcaggactccgggagcctacacaactcctccagcggcgagtccacctactgcatgccccagaacgctggggacttgccctccccagacggcgactacgactacgaccaggatgactatgaggacggtgccatcacttccggcagcagcgtgaccttctccaactcctacggcagccagtggtcccccgactaccgctgctctgtggggacctacaacagctcgggtgcctaccggttcagctctgagggggcgcagtcctcgtttgaagatagtgaagaggactttgattccaggtttgatacagatgatgagctttcataccggcgtgactctgtgtacagctgtgtcactctgccgtatttccacagctttctgtacatgaaaggtggcctgatgaactcttggaaacgccgctggtgcgtcctcaaggatgaaaccttcttgtggttccgctccaagcaggaggccctcaagcaaggctggctccacaaaaaaggggggggctcctccacgctgtccaggagaaattggaagaagcgctggtttgtcctccgccagtccaagctgatgtactttgaaaacgacagcgaggagaagctcaagggcaccgtagaagtgcgaacggcaaaagagatcatagataacaccaccaaggagaatgggatcgacatcattatggccgataggactttccacctgattgcagagtccccagaagatgccagccagtggttcagcgtgctgagtcaggtccacgcgtccacggaccaggagatccaggagatgcatgatgagcaggcaaacccacagaatgctgtgggcaccttggatgtggggctgattgattctgtgtgtgcctctgacagccctgatagacccaactcgtttgtgatcatcacggccaaccgggtgctgcactgcaacgccgacacgccggaggagatgcaccactggataaccctgctgcagaggtccaaaggggacaccagagtggagggccaggaattcatcgtgagaggatggttgcacaaagaggtgaagaacagtccaaagatgtcttcactgaaactgaagaaacggtggtttgtactcacccacaattccctggattactacaagagttcagagaagaacgcgctcaaactggggaccctggtcctcaacagcctctgctctgtcgtccccccagatgagaagatattcaaagagacaggctactggaacgtcaccgtgtacgggcgcaagcactgttaccggctctacaccaagctgctcaacgaggccacccggtggtccagtgccattcaaaacgtgactgacaccaaggccccgatcgacacccccacccagcagctgattcaagatatcaaggagaactgcctgaactcggatgtggtggaacagatttacaagcggaacccgatccttcgatacacccatcaccccttgcactccccgctcctgccccttccgtatggggacataaatctcaacttgctcaaagacaaaggctataccacccttcaggatgaggccatcaagatattcaattccctgcagcaactggagtccatgtctgacccaattccaataatccagggcatcctacagacagggcatgacctgcgacctctgcgggacgagctgtactgccagcttatcaaacagaccaacaaagtgccccaccccggcagtgtgggcaacctgtacagctggcagatcctgacatgcctgagctgcaccttcctgccgagtcgagggattctcaagtatctcaagttccatctgaaaaggatacgggaacagtttccaggaagcgagatggaaaaatacgctctcttcacttacgaatctcttaagaaaaccaaatgccgagagtttgtgccttcccgagatgaaatagaagctctgatccacaggcaggaaatgacatccacggtctattgccatggcggcggctcctgcaagatcaccatcaactcccacaccaccgctggggaggtggtggagaagctgatccgaggcctggccatggaggacagcaggaacatgtttgctttgtttgaatacaacggccacgtcgacaaagccattgaaagtcgaaccgtcgtagctgatgtcttagccaagtttgaaaagctggctgccacatccgaggttggggacctgccatggaaattctacttcaaactttactgcttcctggacacagacaacgtgccaaaagacagtgtggagtttgcatttatgtttgaacaggcccacgaagcggttatccatggccaccatccagccccggaagaaaacctccaggttcttgctgccctgcgactccagtatctgcagggggattatactctgcacgctgccatcccacctctcgaagaggtttattccctgcagagactcaaggcccgcatcagccagtcaaccaaaaccttcaccccttgtgaacggctggagaagaggcggacgagcttcctagaggggaccctgaggcggagcttccggacaggatccgtggtccggcagaaggtcgaggaggagcagatgctggacatgtggattaaggaagaagtctcctctgctcgagccagtatcattgacaagtggaggaaatttcagggaatgaaccaggaacaggccatggccaagtacatggccttgatcaaggagtggcctggctatggctcgacgctgtttgatgtggagtgcaaggaaggtggcttccctcaggaactctggttgggtgtcagcgcggacgccgtctccgtctacaagcgtggagagggaagaccactggaagtcttccagtatgaacacatcctctcttttggggcacccctggcgaatacgtataagatcgtggtcgatgagagggagctgctctttgaaaccagtgaggtggtggatgtggccaagctcatgaaagcctacatcagcatgatcgtgaagaagcgctacagcacgacacgctccgccagcagccagggcagctccaggtgaaggcgggacagagcccacctgtctttgctacctgaacgcaccaccctctggcctaggctggctccagtgtgccatgcccagccaaaacaaacacagagctgcccaggctttctggaagcttctggtctgagggaggtgtctccgaggatccttttgcctgccgccttcattgatcctgtattaagctgtcaactttaacagtctgcacagtttccaaagctttactactcttagaggacacatgccttaaaaaaggaggggaggaaccacgctgccaccaaagcagccggaagtgccttaacttgtggaaccaacactaatcgaccgtaactgtgctactgaagggaactgcctttcccccttctgggggagacttaacagagcgtggaaggggggcattctctgtcaatgatgcactaacctcccaacctgatttccccgaatctgagggaaggtgagggagtgggaagggggatggagagctcgaggggacagtgtgtttgagctggagtgctgcgggcagcctttctcatggaatgacatgaatcaacttttttctttgtttcatcttttaagtgtacgtgcttgcctgttcgtgcatgtgttcataaactcaacactttaatcatggtttcatgagcattaaaaagcaaagggaaaaaggatgtgtaatggtgtacacagtctgtatattttaataatgcagagctatagtctcaattgttactttataaggtggttttattaacaaacccaaatcctggattttcctgtctttgctgtattttgaaaaacacgtgttgactccattgttttacatgtagcaaagtctgccatctgtgtctgctgtattataaacagataagcagcctacaagataactgtatttataaaccactcttcaacagctggctccagtgctggttttagaacaagaatgaagtcattttggagtctttcatgtctaaaagatttaagttaaaaacaaagtgttacttggaaggttagcttctatcattctggatagattacagatataataaccatgttgactatgggggagagacgctgcattccagaaacgtcttaacacttgagtgaatcttcaaaggaccctgacattaaatgctgaggctttaatacacacatattttatcccaagtttataatggtggtctgaacaaggcacctgtaaataaatcagcatttatgaccagaagaaaaataatctggtcttggactttttatttttatatggaaaagttttaaggacttgggccaactaagtctacccacacgaaaaaagaaatttgccttgtccctttgtgtacaaccatgcaaaactgtttgttggctcacagaagttctgacaataaaagatactagctaaca

SEQ ID NO: 4979 - protein, 1156 aa, Homo sapiens
MKEQQELSLTEASLQKLQERRDQELRRLEEEACRAAQEFLESLNFDEIDECVRNIERSLSVGSEFSSELAESACEEKPNFNFSQPYPEEEVDEGFEADDDAFKDSPNPSEHGHSDQRTSGIRTSDDSSEEDPYMNDTVVPTSPSADSTVLLAPSVQDSGSLHNSSSGESTYCMPQNAGDLPSPDGDYDYDQDDYEDGAITSGSSVTFSNSYGSQWSPDYRCSVGTYNSSGAYRFSSEGAQSSFEDSEEDFDSRFDTDDELSYRRDSVYSCVTLPYFHSFLYMKGGLMNSWKRRWCVLKDETFLWFRSKQEALKQGWLHKKGGGSSTLSRRNWKKRWFVLRQSKLMYFENDSEEKLKGTVEVRTAKEIIDNTTKENGIDIIMADRTFHLIAESPEDASQWFSVLSQVHASTDQEIQEMHDEQANPQNAVGTLDVGLIDSVCASDSPDRPNSFVIITANRVLHCNADTPEEMHHWITLLQRSKGDTRVEGQEFIVRGWLHKEVKNSPKMSSLKLKKRWFVLTHNSLDYYKSSEKNALKLGTLVLNSLCSVVPPDEKIFKETGYWNVTVYGRKHCYRLYTKLLNEATRWSSAIQNVTDTKAPIDTPTQQLIQDIKENCLNSDVVEQIYKRNPILRYTHHPLHSPLLPLPYGDINLNLLKDKGYTTLQDEAIKIFNSLQQLESMSDPIPIIQGILQTGHDLRPLRDELYCQLIKQTNKVPHPGSVGNLYSWQILTCLSCTFLPSRGILKYLKFHLKRIREQFPGSEMEKYALFTYESLKKTKCREFVPSRDEIEALIHRQEMTSTVYCHGGGSCKITINSHTTAGEVVEKLIRGLAMEDSRNMFALFEYNGHVDKAIESRTVVADVLAKFEKLAATSEVGDLPWKFYFKLYCFLDTDNVPKDSVEFAFMFEQAHEAVIHGHHPAPEENLQVLAALRLQYLQGDYTLHAAIPPLEEVYSLQRLKARISQSTKTFTPCERLEKRRTSFLEGTLRRSFRTGSVVRQKVEEEQMLDMWIKEEVSSARASIIDKWRKFQGMNQEQAMAKYMALIKEWPGYGSTLFDVECKEGGFPQELWLGVSADAVSVYKRGEGRPLEVFQYEHILSFGAPLANTYKIVVDERELLFETSEVVDVAKLMKAYISMIVKKRYSTTRSASSQGSSR

SEQ ID NO: 4980 - DNA, 541 bp, Homo sapiens
actggcttctctccttcagctccaggctagatgccagaccagtttgaccaggcggttgtgctgaaccagctgcggtactcagggatgctggagactgtgagaatccgcaaagctgggtatgcggtccgaagaccctttcaggacttttacaaaaggtataaagtgctgatgaggaatctggctctgcctgaggacgtccgagggaagtgcacgagcctgctgcagctctatgatgcctccaacagcgagtggcagctggggaagaccaaggtctttcttcgagaatccttggaacagaaactggagaagcggagggaagaggaagtgagccacgcggccatggtgattcgggcccatgtcttgggcttcttagcacgaaaacaatacagaaaggtcctttattgtgtggtgataatacagaagaattacagagcattccttctgaggaggagatttttgcacctgaaaaaggcagccatagttttccagaagcaactcagaggtcagattgctcggagagtttacagacaattgctggcag

SEQ ID NO: 4981 - protein, 169 aa, Homo sapiens
MPDQFDQAVVLNQLRYSGMLETVRIRKAGYAVRRPFQDFYKRYKVLMRNLALPEDVRGKCTSLLQLYDASNSEWQLGKTKVFLRESLEQKLEKRREEEVSHAAMVIRAHVLGFLARKQYRKVLYCVVIIQKNYRAFLLRRRFLHLKKAAIVFQKQLRGQIARRVYRQLL

SEQ ID NO: 4982 - DNA, 946 bp, Homo sapiens
gctcagcaccagcaaagagtgctgttcttgttctctgggtggattttccaagatcacaactaaactgcttgattttgtcctgggactttttttaaaaaaaaattattgattggcttttaaaatcaagaatctttgggccctgaaatgtaattacacatttgttgatgcgtgcatgatggttagtttgcccctgcagtcaaaagtgtcttcagcagttcctatcacgtcagcctcgccaggctggacttcctttgagtagaatcaggaatgaattaagcagcacagcccgagacgcaccacataaaaggctgggaacaccagccagccgaagaaagcccatttttgtgtctgtcagcttagatgcccttgcccggactgctaaagatgcagctatttacagtggacagaaactgaaggggtgaaagaaaacccaagatgccagaccagtttgaccaggcggttgtgctgaaccagctgcggtactcagggatgctggagactgtgagaatccgcaaagctgggtatgcggtccgaagaccctttcaggacttttacaaaaggtataaagtgctgatgaggaatctggctctgcctgaggacgtccgagggaagtgcacgagcctgctgcagctctatgatgcctccaacagcgagtggcagctggggaagaccaaggtctttcttcgagaatccttggaacagaaactggagaagcggagggaagaggaagtgagccacgcggccatggtgattcgggcccatgtcttgggcttcttagcacgaaaacaatacagaaaggtcctttattgtgtggtgataatacagaagaattacagagcattccttctgaggaggagatttttgcacctgaaaaaggcagccatagttttccagaagcaactcagaggtcagattgctcggagagtttacagacaattgctggcag

SEQ ID NO: 4983 - protein, 169 aa, Homo sapiens; identical to SEQ ID NO: 4981

SEQ ID NO: 4984 - DNA, 2892 bp, Homo sapiens
aatctgtgatttaggagtgagttctttccatgcttctcctctcctcttttcccttcctagcaagaggagaaaaaaagcaagtaatttaatgtaatctgatttttttttttttttttttttttacttcatggctttttgacattggaagagaaatgagccatctttctagaggagctttagtgtcatgtgtgcttttcttattgattgggaataacttaaaaagactcctcagaactccgaatgggatatttaatttgttagaacacgagtctgcaccactatctgttgacggtgaaatgaatttactaagtggataatttgctgagcattagctgaccctgacgtggcggaacgaaggtctctggagatggttcatggtggaaatctgggcttgatgggtcggtaatgagacttcagcgatgacatctttaccaaggctgaggcttaacactcgggaccaagcgattcaactgggaacacgggtctggctgagagaaaatggccagcattttccaagtactgtaaattcctgtgcagaaggcatcgtcgtcttccggacagactatggtcaggtattcacttacaagcagagcacaattacccaccagaaggtgactgctatgcaccccacgaacgaggagggcgtggatgacatggcgtccttgacagagctccatggcggctccatcatgtataacttattccagcggtataagagaaatcaaatatatacctacatcggctccatcctggcctccgtgaacccctaccagcccatcgccgggctgtacgagcctgccaccatggagcagtacagccggcgccacctgggcgagctgcccccgcacatcttcgccatcgccaacgagtgctaccgctgcctgtggaagcgccacgacaaccagtgcatcctcatcagtggtgaaagtggggcaggtaaaaccgaaagcactaaattgatcctcaagtttctgtcagtcatcagtcaacagtctttggaattgtccttaaaggagaagacatcctgtgttgaacgagctattcttgaaagcagccccatcatggaagctttcggcaatgcgaagaccgtgtacaacaacaactctagtcgctttgggaagtttgttcagctgaacatctgtcagaaaggaaatattcagggcgggagaattgtagattatttatcttcccagaaccgagtagtaaggcaaaatcccggggaaaggaattatcacatattttatgcactgctggcagggctggaacatgaagaaagagaagaattttatttatctacgccagaaaactaccactacttgaatcagtctggatgtgtagaagacaagacaatcagtgaccaggaatcctttagggaagttattacggcaatggacgtgatgcagttcagcaaggaggaagttcgggaagtgtcgaggctgcttgctggtatactgcatcttgggaacatagaatttatcactgctggtggggcacaggtttccttcaaaacagctttgggcagatctgcggagttacttgggctggacccaacacagctcacagatgctttgacccagagatcaatgttcctcaggggagaagagatcctcacgcctctcaatgttcaacaggcagtagacagcagggactccctggccatggctctgtatgcgtgctgctttgagtgggtaatcaagaagatcaacagcaggatcaaaggcaatgaggacttcaagtctattggcatcctcgacatctttggatttgaaaactttgaggttaatcactttgaacagttcaatataaactatgcaaacgagaaacttcaggagtacttcaacaagcatattttttctttagaacaactagaatatagccgggaaggattagtgtgggaagatattgactggatagacaatggagaatgcctggacttgattgagaagaaacttggcctcctagcccttatcaatgaagaaagccattttcctcaagccacagacagcaccttattggagaagctacacagtcagcatgcgaataaccacttttatgtgaagcccagagttgcagttaacaattttggagtgaagcactatgctggagaggtgcaatatgatgtccgaggtatcttggagaagaacagagatacatttcgagatgaccttctcaatttgctaagagaaagccgatttgactttatctacgatctttttgaacatgtttcaagccgcaacaaccaggataccttgaaatgtggaagcaaacatcggcggcctacagtcagctcacagttcaaggactcactgcattccttaatggcaacgctaagctcctctaatcctttctttgttcgctgtatcaagccaaacatgcagaagatgccagaccagtttgaccaggcggttgtgctgaaccagctgcggtactcagggatgctggagactgtgagaatccgcaaagctgggtatgcggtccgaagaccctttcaggacttttacaaaaggtataaagtgctgatgaggaatctggctctgcctgaggacgtccgagggaagtgcacgagcctgctgcagctctatgatgcctccaacagcgagtggcagctggggaagaccaaggtctttcttcgagaatccttggaacagaaactggagaagcggagggaagaggaagtgagccacgcggccatggtgattcgggcccatgtcttgggcttcttagcacgaaaacaatacagaaaggtcctttattgtgtggtgataatacagaagaattacagagcattccttctgaggaggagatttttgcacctgaaaaaggcagccatagttttccagaagcaactcagaggtcagattgctcggagagtttacagacaattgctggcag

SEQ ID NO: 4985 - protein, 823 aa, Homo sapiens
MTSLPRLRLNTRDQAIQLGTRVWLRENGQHFPSTVNSCAEGIVVFRTDYGQVFTYKQSTITHQKVTAMHPTNEEGVDDMASLTELHGGSIMYNLFQRYKRNQIYTYIGSILASVNPYQPIAGLYEPATMEQYSRRHLGELPPHIFAIANECYRCLWKRHDNQCILISGESGAGKTESTKLILKFLSVISQQSLELSLKEKTSCVERAILESSPIMEAFGNAKTVYNNNSSRFGKFVQLNICQKGNIQGGRIVDYLSSQNRVVRQNPGERNYHIFYALLAGLEHEEREEFYLSTPENYHYLNQSGCVEDKTISDQESFREVITAMDVMQFSKEEVREVSRLLAGILHLGNIEFITAGGAQVSFKTALGRSAELLGLDPTQLTDALTQRSMFLRGEEILTPLNVQQAVDSRDSLAMALYACCFEWVIKKINSRIKGNEDFKSIGILDIFGFENFEVNHFEQFNINYANEKLQEYFNKHIFSLEQLEYSREGLVWEDIDWIDNGECLDLIEKKLGLLALINEESHFPQATDSTLLEKLHSQHANNHFYVKPRVAVNNFGVKHYAGEVQYDVRGILEKNRDTFRDDLLNLLRESRFDFIYDLFEHVSSRNNQDTLKCGSKHRRPTVSSQFKDSLHSLMATLSSSNPFFVRCIKPNMQKMPDQFDQAVVLNQLRYSGMLETVRIRKAGYAVRRPFQDFYKRYKVLMRNLALPEDVRGKCTSLLQLYDASNSEWQLGKTKVFLRESLEQKLEKRREEEVSHAAMVIRAHVLGFLARKQYRKVLYCVVIIQKNYRAFLLRRRFLHLKKAAIVFQKQLRGQIARRVYRQLL

SEQ ID NO: 4986 - DNA, 2908 bp, Homo sapiens
gagagctggctgagccgcggcgcgggactgctcacctccaagcgctcgcgcggggatcgcggctcctgctcactttgcggcccgctgtcctcctgcccgccccgagggcccccggccggagcgcagagggagggggccgcgctcgccagcaccccgccgccttcccccgcctgggggaagaatgtgccaccagctgttctccgcttgcgagcgctgcgcccagtagtgaggaacttggaggaagaagagacaaaggctgccgtcgggacgggcgagttagggacttgggtttgggcgaacaaaaggtgagaaggacaagaagggaccgggcgatggcagcaggggagccccgcgggcgcgcgtcctcgggagtggcgccgtgacacgcatggtttccccggacccgcggcggcgctgacttccgcgagtcggagcggcactcggcgagtccgggactgcgctggaacaatggataacttcttcaccgagggaacacgggtctggctgagagaaaatggccagcattttccaagtactgtaaattcctgtgcagaaggcatcgtcgtcttccggacagactatggtcaggtattcacttacaagcagagcacaattacccaccagaaggtgactgctatgcaccccacgaacgaggagggcgtggatgacatggcgtccttgacagagctccatggcggctccatcatgtataacttattccagcggtataagagaaatcaaatatatacctacatcggctccatcctggcctccgtgaacccctaccagcccatcgccgggctgtacgagcctgccaccatggagcagtacagccggcgccacctgggcgagctgcccccgcacatcttcgccatcgccaacgagtgctaccgctgcctgtggaagcgccacgacaaccagtgcatcctcatcagtggtgaaagtggggcaggtaaaaccgaaagcactaaattgatcctcaagtttctgtcagtcatcagtcaacagtctttggaattgtccttaaaggagaagacatcctgtgttgaacgagctattcttgaaagcagccccatcatggaagctttcggcaatgcgaagaccgtgtacaacaacaactctagtcgctttgggaagtttgttcagctgaacatctgtcagaaaggaaatattcagggcgggagaattgtagattatttatcttcccagaaccgagtagtaaggcaaaatcccggggaaaggaattatcacatattttatgcactgctggcagggctggaacatgaagaaagagaagaattttatttatctacgccagaaaactaccactacttgaatcagtctggatgtgtagaagacaagacaatcagtgaccaggaatcctttagggaagttattacggcaatggacgtgatgcagttcagcaaggaggaagttcgggaagtgtcgaggctgcttgctggtatactgcatcttgggaacatagaatttatcactgctggtggggcacaggtttccttcaaaacagctttgggcagatctgcggagttacttgggctggacccaacacagctcacagatgctttgacccagagatcaatgttcctcaggggagaagagatcctcacgcctctcaatgttcaacaggcagtagacagcagggactccctggccatggctctgtatgcgtgctgctttgagtgggtaatcaagaagatcaacagcaggatcaaaggcaatgaggacttcaagtctattggcatcctcgacatctttggatttgaaaactttgaggttaatcactttgaacagttcaatataaactatgcaaacgagaaacttcaggagtacttcaacaagcatattttttctttagaacaactagaatatagccgggaaggattagtgtgggaagatattgactggatagacaatggagaatgcctggacttgattgagaagaaacttggcctcctagcccttatcaatgaagaaagccattttcctcaagccacagacagcaccttattggagaagctacacagtcagcatgcgaataaccacttttatgtgaagcccagagttgcagttaacaattttggagtgaagcactatgctggagaggtgcaatatgatgtccgaggtatcttggagaagaacagagatacatttcgagatgaccttctcaatttgctaagagaaagccgatttgactttatctacgatctttttgaacatgtttcaagccgcaacaaccaggataccttgaaatgtggaagcaaacatcggcggcctacagtcagctcacagttcaaggactcactgcattccttaatggcaacgctaagctcctctaatcctttctttgttcgctgtatcaagccaaacatgcagaagatgccagaccagtttgaccaggcggttgtgctgaaccagctgcggtactcagggatgctggagactgtgagaatccgcaaagctgggtatgcggtccgaagaccctttcaggacttttacaaaaggtataaagtgctgatgaggaatctggctctgcctgaggacgtccgagggaagtgcacgagcctgctgcagctctatgatgcctccaacagcgagtggcagctggggaagaccaaggtctttcttcgagaatccttggaacagaaactggagaagcggagggaagaggaagtgagccacgcggccatggtgattcgggcccatgtcttgggcttcttagcacgaaaacaatacagaaaggtcctttattgtgtggtgataatacagaagaattacagagcattccttctgaggaggagatttttgcacctgaaaaaggcagccatagttttccagaagcaactcagaggtcagattgctcggagagtttacagacaattgctggcag

SEQ ID NO: 4987 - protein, 812 aa, Homo sapiens
MDNFFTEGTRVWLRENGQHFPSTVNSCAEGIVVFRTDYGQVFTYKQSTITHQKVTAMHPTNEEGVDDMASLTELHGGSIMYNLFQRYKRNQIYTYIGSILASVNPYQPIAGLYEPATMEQYSRRHLGELPPHIFAIANECYRCLWKRHDNQCILISGESGAGKTESTKLILKFLSVISQQSLELSLKEKTSCVERAILESSPIMEAFGNAKTVYNNNSSRFGKFVQLNICQKGNIQGGRIVDYLSSQNRVVRQNPGERNYHIFYALLAGLEHEEREEFYLSTPENYHYLNQSGCVEDKTISDQESFREVITAMDVMQFSKEEVREVSRLLAGILHLGNIEFITAGGAQVSFKTALGRSAELLGLDPTQLTDALTQRSMFLRGEEILTPLNVQQAVDSRDSLAMALYACCFEWVIKKINSRIKGNEDFKSIGILDIFGFENFEVNHFEQFNINYANEKLQEYFNKHIFSLEQLEYSREGLVWEDIDWIDNGECLDLIEKKLGLLALINEESHFPQATDSTLLEKLHSQHANNHFYVKPRVAVNNFGVKHYAGEVQYDVRGILEKNRDTFRDDLLNLLRESRFDFIYDLFEHVSSRNNQDTLKCGSKHRRPTVSSQFKDSLHSLMATLSSSNPFFVRCIKPNMQKMPDQFDQAVVLNQLRYSGMLETVRIRKAGYAVRRPFQDFYKRYKVLMRNLALPEDVRGKCTSLLQLYDASNSEWQLGKTKVFLRESLEQKLEKRREEEVSHAAMVIRAHVLGFLARKQYRKVLYCVVIIQKNYRAFLLRRRFLHLKKAAIVFQKQLRGQIARRVYRQLL

SEQ ID NO: 4988 - DNA, 575 bp, Homo sapiens
aagaaagcccatttttgtgtctgtcagcttagatgcccttgcccggactgctaaagatgcagctatttacagtggacagaaactgaaggggtgaaagaaaacccaagatgccagaccagtttgaccaggcggttgtgctgaaccagctgcggtactcagggatgctggagactgtgagaatccgcaaagctgggtataaagtgctgatgaggaatctggctctgcctgaggacgtccgagggaagtgcacgagcctgctgcagctctatgatgcctccaacagcgagtggcagctggggaagaccaaggtctttcttcgagaatccttggaacagaaactggagaagcggagggaagaggaagtgagccacgcggccatggtgattcgggcccatgtcttgggcttcttagcacgaaaacaatacagaaaggtcctttattgtgtggtgataatacagaagaattacagagcattccttctgaggaggagatttttgcacctgaaaaaggcagccatagttttccagaagcaactcagaggtcagattgctcggagagtttacagacaattgctg

SEQ ID NO: 4989 - protein, 155 aa, Homo sapiens
MPDQFDQAVVLNQLRYSGMLETVRIRKAGYKVLMRNLALPEDVRGKCTSLLQLYDASNSEWQLGKTKVFLRESLEQKLEKRREEEVSHAAMVIRAHVLGFLARKQYRKVLYCVVIIQKNYRAFLLRRRFLHLKKAAIVFQKQLRGQIARRVYRQL

SEQ ID NO: 4990 - DNA, 938 bp, Homo sapiens
gctcagcaccagcaaagagtgctgttcttgttctctgggtggattttccaagatcacaactaaactgcttgattttgtcctgggactttttttaaaaaaaaattattgattggcttttaaaatcaagaatctttgggccctgaaatgtaattacacatttgttgatgcgtgcatgatggttagtttgcccctgcagtcaaaagtgtcttcagcagttcctatcacgtcagcctcgccaggctggacttcctttgagtagaatcaggaatgaattaagcagcacagcccgagacgcaccacataaaaggctgggaacaccagccagccgaagaaagcccatttttgtgtctgtcagcttagatgcccttgcccggactgctaaagatgcagctatttacagtggacagaaactgaaggggtgaaagaaaacccaagatgccagaccagtttgaccaggcggttgtgctgaaccagctgcggtactcagggatgctggagactgtgagaatccgcaaagctgggtatgcggtccgaagaccctttcaggacttttacaaaaggtataaagtgctgatgaggaatctggctctgcctgaggacgtccgagggaagtgcacgagcctgctgcagctctatgatgcctccaacagcgagtggcagctggggaagaccaaggtctttcttcgagaatccttggaacagaaactggagaagcggagggaagaggaagtgagccacgcggccatggtgattcgggcccatgtcttgggcttcttagcacgaaaacaatacagaaaggtcctttattgtgtggtgataatacagaagaattacagagcattccttctgaggaggagatttttgcacctgaaaaaggcagccatagttttccagaagcaactcagaggtcagattgctcggagagtttacagacaatt

SEQ ID NO: 4991 - protein, 166 aa, Homo sapiens
MPDQFDQAVVLNQLRYSGMLETVRIRKAGYAVRRPFQDFYKRYKVLMRNLALPEDVRGKCTSLLQLYDASNSEWQLGKTKVFLRESLEQKLEKRREEEVSHAAMVIRAHVLGFLARKQYRKVLYCVVIIQKNYRAFLLRRRFLHLKKAAIVFQKQLRGQIARRVYR

SEQ ID NO: 4992 - DNA, 768 bp, Homo sapiens
ttctttctaatgccaggcaatcaaggctgcacttgctacccttctgcaggaagcttcccagccagcacagtttctctctgccctgcctcttaatccccacccctgctcccaggcctgggacactgctaaccacccctccttcctgacacctctctgaccacccctcctcctcttgactggttcctctggaggtaggcatggcctcgggttctgcccccagtttctcactcgctgggctccaaaagaaacactggcttctctccttcagctccaggctagatgccagaccagtttgaccaggcggttgtgctgaaccagctgcggtactcagggatgctggagactgtgagaatccgcaaagctgggtatgcggtccgaagaccctttcaggacttttacaaaaggtataaagtgctgatgaggaatctggctctgcctgaggacgtccgagggaagtgcacgagcctgctgcagctctatgatgcctccaacagcgagtggcagctggggaagaccaaggtctttcttcgagaatccttggaacagaaactggagaagcggagggaagaggaagtgagccacgcggccatggtgattcgggcccatgtcttgggcttcttagcacgaaaacaatacagaaaggtcctttattgtgtggtgataatacagaagaattacagagcattccttctgaggaggagatttttgcacctgaaaaaggcagccatagttttccagaagcaactcagaggtcagattgctcggaga

SEQ ID NO: 4993 - protein, 162 aa, Homo sapiens
MPDQFDQAVVLNQLRYSGMLETVRIRKAGYAVRRPFQDFYKRYKVLMRNLALPEDVRGKCTSLLQLYDASNSEWQLGKTKVFLRESLEQKLEKRREEEVSHAAMVIRAHVLGFLARKQYRKVLYCVVIIQKNYRAFLLRRRFLHLKKAAIVFQKQLRGQIAR

SEQ ID NO: 4994 - DNA, 295 bp, Homo sapiens
tggaagctcaaagccgcactggaaacacagtctttcaggatgtctgaaaggggcaagtctgtttgtgtgggatatacagggagtccacggagcctcccctgcaagcatcagtacagaagtcgatgataatctggatgcaagcccaggagtgtggagtccactgactcagaagacctgcatctaaggaattggctgttcttatccttaagaatgatgactgtgtttccaattccagtagaccctttgatgcgttctgaataaatattccttttggaattgaacttctagagccctt

SEQ ID NO: 4995 - protein, 60 aa, Homo sapiens
GSSKPHWKHSLSGCLKGASLFVWDIQGVHGASPASISTEVDDNLDASPGVWSPLTQKTCI

SEQ ID NO: 4996 - DNA, 414 bp, Homo sapiens
tgagaggagggtgcagaccagatttttaaattgagaatgcaacagtgaaggatttcaagcttggagtgagaggggagactacgagcctgcagtgataaggcaaagctgaagatttcagagccaaggccacaccctacagttgccatggaatggggtggcacagtgggctttggaggtaaagtctgcagttgagaagttcaagggtaatatacagggagtccacggagcctcccctgcaagcatcagtacagaagtcgatgataatctggatgcaagcccaggagtgtggagtccactgactcagaagacctgcatctaaggaattggctgttcttatccttaagaatgatgactgtgtttccaattccagtagaccctttgatgcgttctgaataaatattccttttggaattg

SEQ ID NO: 4997 - protein, 69 aa, Homo sapiens
RFQSQGHTLQLPWNGVAQWALEVKSAVEKFKGNIQGVHGASPASISTEVDDNLDASPGVWSPLTQKTCI

SEQ ID NO: 4998 - DNA, 683 bp, Homo sapiens
taccactgaactgtttaatattctagaatttatgttacacagtaaaagatagacaactctgtctgcagttctgggactgggatatgcctgtgcatacacgcatctgctctgttttggtttcacttcactttagttatttgatttggtgtctgcaaaaccctgtgtgcacatttttatgatccttgggacaatttactgccaaccttgcttgaactctaaaatatgcctccagtttcggaaaaccacaaattatttaccaaggaggcaaggaaatggaggtcactgggctcatttcttacataattttcaacttcctttctgaggcctgacatctcccggcagtcacagtgatgtcttccttagatggattcaataatggggaagaacagatgaaaagtggtgaaagttgctaactgctgtgttcctctgcttgcttttcatgctgtgtgccaggaatcaaagctggaggagcggaagatatacagggagtccacggagcctcccctgcaagcatcagtacagaagtcgatgataatctggatgcaagcccaggagtgtggagtccactgactcagaagacctgcatctaaggaattggctgttcttatccttaagaatgatgactgtgtttccaattccagtagaccctttgatgcgttctgaataaatattccttttggaat

SEQ ID NO: 4999 - protein, 30 aa, Homo sapiens
MLCARNQSWRSGRYTGSPRSLPCKHQYRSR

SEQ ID NO: 5000 - DNA, 582 bp, Homo sapiens
aaataacactagcattttgacatatttggagctgctactgggccagctctgtttccaggcctgcctttcaatcttttccttgcttctggcatgagttaccatctcttttaagaaattggttatgcatttgaaaatacacgtagctatacatactttaaacatatcatttagcaaggatgctccttatcggaccgttgctgggaacagagaacacgacagttccaggttcctgccaattatagaggcagtcctatttcaaaatgccattaagcatccttctgagctgcggaaagtcataggaccagtcttcagccgtgcccattacagtagcagtgacagcacaccactttgctcatgatacggatcagggttaattttcaagttttggatggttctccctctttgagttaccatttgtttctgcttataacctactgatcatgcctttagtactaagtaaatattgaaaagggaaagccttaggtggcttgcgaaggctctgatgtaaatatgtgttgctgagacggggaagtgaaggtgttggattatgcatgactttcacatgtgttcttataccacatt

SEQ ID NO: 5001 - protein, 78 aa, Homo sapiens
MHLKIHVAIHTLNISFSKDAPYRTVAGNREHDSSRFLPIIEAVLFQNAIKHPSELRKVIGPVFSRAHYSSSDSTPLCS

SEQ ID NO: 5002 - DNA, 466 bp, Homo sapiens
cctttcaatcttttccttgcttctggcatgagttaccatctcttttaagaaattggttatgcatttgaaaatacacgtagctatacatactttaaacatatcatttagcaaggatgctccttatcggaccgttgctgggaacagagaacacgacagttccagactgtttccaagattggatgaagagattcaattgacaatgctgtgaagagagggatttggagcttgttgggggaggtagtgttgacttccttgtgcaatctaggattgagtgggggatgcagttggaaggcaagagaagtaagactcctccatcttcctggtccagagaaattatgctggatccccctacccttaatgagaaaggaggtgtttgtgtttccagcatctatgagatctgattgctaatgtagctacctttaaagaattctgctatttacaataaaagtgagatctccctcctcca

SEQ ID NO: 5003 - protein, 49 aa, Homo sapiens
MHLKIHVAIHTLNISFSKDAPYRTVAGNREHDSSRLFPRLDEEIQLTML

SEQ ID NO: 5004 - DNA, 552 bp, Homo sapiens; identical to SEQ ID NO: 579

SEQ ID NO: 5005 - protein, 183 aa, Homo sapiens; identical to SEQ ID NO: 580

SEQ ID NO: 5006 - DNA, 444 bp, Homo sapiens; identical to SEQ ID NO: 581

SEQ ID NO: 5007 - protein, 147 aa, Homo sapiens; identical to SEQ ID NO: 582

SEQ ID NO: 5008 - DNA, 552 bp, Homo sapiens; identical to SEQ ID NO: 583

SEQ ID NO: 5009 - protein, 183 aa, Homo sapiens; identical to SEQ ID NO: 584

SEQ ID NO: 5010 - DNA, 552 bp, Homo sapiens
atgccccgaggtctgaagggcagcaagaaggatggaatccctgaggacctagacgggaacttggaagcacccagggatcaggaaggtgagctcaggagtgaggatgtcatggacctcacagaaggtgacagtgaggcctcagcctcagctcctcctgcagccaaaagacggaaaacacatacgaaaggcaagaaggagagcaagcccaccgtggatgcggaggaggctcagaggatgacaaccctgctgtctgccatgtctgaggagcagctgtcccgctacgaagtgtgtcgccggtcagcgttcccgagagcacgcgttgcgggtctgatgcgggctatcactggcagttcggtgtcggagaacgcggccattgccatggctggaatagccaagctttttgttggagaggtggtggaagaggccctggacgtgtgtgagatgtggggagagacgctcccgctgcagcccaagcatttaagggaggccgttcgcaggttaaagcccaagggcctcttccccaacagcaactgcaaaagaatcatgttctag

SEQ ID NO: 5011 - protein, 183 aa, Homo sapiens
MPRGLKGSKKDGIPEDLDGNLEAPRDQEGELRSEDVMDLTEGDSEASASAPPAAKRRKTHTKGKKESKPTVDAEEAQRMTTLLSAMSEEQLSRYEVCRRSAFPRARVAGLMRAITGSSVSENAAIAMAGIAKLFVGEVVEEALDVCEMWGETLPLQPKHLREAVRRLKPKGLFPNSNCKRIMF

SEQ ID NO: 5012 - DNA, 597 bp, Homo sapiens; identical to SEQ ID NO: 587

SEQ ID NO: 5013 - protein, 198 aa, Homo sapiens; identical to SEQ ID NO: 588

SEQ ID NO: 5014 - DNA, 597 bp, Homo sapiens; identical to SEQ ID NO: 589

SEQ ID NO: 5015 - protein, 198 aa, Homo sapiens [sequence omitted]

SEQ ID NO: 5016 - DNA, 597 bp, Homo sapiens; identical to SEQ ID NO: 591

SEQ ID NO: 5017 - protein, 198 aa, Homo sapiens [sequence omitted]

SEQ ID NO: 5018 - DNA, 597 bp, Homo sapiens; identical to SEQ ID NO: 593

SEQ ID NO: 5019 - protein, 198 aa, Homo sapiens; identical to SEQ ID NO: 594

SEQ ID NO: 5020 - DNA, 597 bp, Homo sapiens; identical to SEQ ID NO: 595

SEQ ID NO: 5021 - protein, 198 aa, Homo sapiens; identical to SEQ ID NO: 596

SEQ ID NO: 5022 - DNA, 597 bp, Homo sapiens; identical to SEQ ID NO: 597

SEQ ID NO: 5023 - protein, 198 aa, Homo sapiens [sequence omitted]

SEQ ID NO: 5024 - DNA, 597 bp, Homo sapiens; identical to SEQ ID NO: 597

SEQ ID NO: 5025 - protein, 198 aa, Homo sapiens [sequence omitted]

SEQ ID NO: 5026 - DNA, 597 bp, Homo sapiens; identical to SEQ ID NO: 597

SEQ ID NO: 5027 - protein, 198 aa, Homo sapiens [sequence omitted]

SEQ ID NO: 5028 - DNA, 597 bp, Homo sapiens; identical to SEQ ID NO: 589

SEQ ID NO: 5029 - protein, 198 aa, Homo sapiens [sequence omitted]

SEQ ID NO: 5030 - DNA, 597 bp, Homo sapiens; identical to SEQ ID NO: 597

SEQ ID NO: 5031 - protein, 198 aa, Homo sapiens [sequence omitted]

SEQ ID NO: 5032 - DNA, 597 bp, Homo sapiens; identical to SEQ ID NO: 589

SEQ ID NO: 5033 - protein, 198 aa, Homo sapiens [sequence omitted]

SEQ ID NO: 5034 - DNA, 597 bp, Homo sapiens; identical to SEQ ID NO: 597

SEQ ID NO: 5035 - protein, 198 aa, Homo sapiens [sequence omitted]

SEQ ID NO: 5036 - DNA, 597 bp, Homo sapiens; identical to SEQ ID NO: 589

SEQ ID NO: 5037 - protein, 198 aa, Homo sapiens [sequence omitted]

SEQ ID NO: 5038 - DNA, 597 bp, Homo sapiens; identical to SEQ ID NO: 613

SEQ ID NO: 5039 - protein, 198 aa, Homo sapiens; identical to SEQ ID NO: 594

SEQ ID NO: 5040 - DNA, 597 bp, Homo sapiens; identical to SEQ ID NO: 613

SEQ ID NO: 5041 - protein, 198 aa, Homo sapiens; identical to SEQ ID NO: 594

SEQ ID NO: 5042 - DNA, 597 bp, Homo sapiens; identical to SEQ ID NO: 589

SEQ ID NO: 5043 - protein, 198 aa, Homo sapiens [sequence omitted]

SEQ ID NO: 5044 - DNA, 597 bp, Homo sapiens; identical to SEQ ID NO: 589

SEQ ID NO: 5045 - protein, 198 aa, Homo sapiens [sequence omitted]

SEQ ID NO: 5046 - DNA, 597 bp, Homo sapiens; identical to SEQ ID NO: 621

SEQ ID NO: 5047 - protein, 198 aa, Homo sapiens [sequence omitted]

SEQ ID NO: 5048 - DNA, 597 bp, Homo sapiens; identical to SEQ ID NO: 589

SEQ ID NO: 5049 - protein, 198 aa, Homo sapiens [sequence omitted]

SEQ ID NO: 5050 - DNA, 597 bp, Homo sapiens; identical to SEQ ID NO: 625

SEQ ID NO: 5051 - protein, 198 aa, Homo sapiens [sequence omitted]

SEQ ID NO: 5052 - DNA, 747 bp, Homo sapiens
atggggctgggttggaaggggctaagtgtatggcagcatcttctgcatagatcccaacacacagactctctgaatcctgcccacagcctcaccaccattgctgtctggtaccagcactgcttccagttcaccaggttcagcccagtgacaaggcagaggccacagccctacaccatggctcgcattaggcagactgaccacaaagccaccgcctggcaggcccccaggaagcccctggccaccaaagtcaccggcaagagggtcctggctacacgagggatcaagaagcctcaccgccacaggcttggcaccctggcgctgcacaaaaccaggaggtaccagaagtccacacagctgcttctgcacaagctgaccttccagcgcctggagcacgagattgcccaggccatcaacccagacctgcgcttccaatgtgcggccactggcgatttcagggaaacagcgaggcctacctggtccccctctttaaagacatcaacctatgtgttatccatgccaggcgtgtcacagttatgcccagagacatgcagctggcctgccaactcggcagagagggtgctggggagcccacgctcctgggaaacgctgcactctagacggcttcgtttccatttggttgtgtttttcaacgtctttgtgttaatcatagttctgatattagcagttctcttcatttttggttttatgtccctcatggggtccaaaagcagccctgcacatgattag

SEQ ID NO: 5053 - protein, 248 aa, Homo sapiens [sequence omitted]

SEQ ID NO: 5054 - DNA, 597 bp, Homo sapiens; identical to SEQ ID NO: 629

SEQ ID NO: 5055 - protein, 198 aa, Homo sapiens; identical to SEQ ID NO: 630

SEQ ID NO: 5056 - DNA, 594 bp, Homo sapiens; identical to SEQ ID NO: 631

SEQ ID NO: 5057 - protein, 197 aa, Homo sapiens; identical to SEQ ID NO: 632

SEQ ID NO: 5058 - DNA, 411 bp, Homo sapiens; identical to SEQ ID NO: 634

SEQ ID NO: 5059 - protein, 136 aa, Homo sapiens; identical to SEQ ID NO: 635

SEQ ID NO: 5060 - DNA, 483 bp, Homo sapiens
atgctacagctgatttctcacagaagtaacatcttctccaatgtcagcgggctagacaaccatagctgcctgcagctggccaggctcagcccaaggacaggggagaggccgcggccctgcaccacagtggacatcaagcagaacacctgcaaagccaccacctcggaggcccccaggaagcccctggccaccaaagctgccagcaagagggcgccgcctacaggagggatcaagaagccccacggctacaggtctggcaccctggcactctgcaaaatcagaaagtaccagaagtccactcagctgctcctgcgcaagctgcacttccagcgcctggtgcgcgagatcacccaggccatcagcccggacctgcgcttccagagcgcaaccactagcgccctgcaggagcccagcaaggcctacctggtgcgcctctttgaagacaccaacctgtgtgccatccatgccaggcacgtgacatga

SEQ ID NO: 5061 - protein, 160 aa, Homo sapiens
MLQLISHRSNIFSNVSGLDNHSCLQLARLSPRTGERPRPCTTVDIKQNTCKATTSEAPRKPLATKAASKRAPPTGGIKKPHGYRSGTLALCKIRKYQKSTQLLLRKLHFQRLVREITQAISPDLRFQSATTSALQEPSKAYLVRLFEDTNLCAIHARHVT

SEQ ID NO: 5062 - DNA, 555 bp, Homo sapiens
cccgtgatgagttgttgtcctgtccaagcctggctccccaaccttgtaccctgagctgctgagattggctctggctaatcacgaccctgagctggaataattgggcaaaacaagaatgataataggcatgtctcaaggttgctgtgtggaccagctaaagccctatgtaagaaagcacttcacatacagaagaggcctagtccaaagacgtttacatcctggaagagaacttgctggcttttcacctcagcatgtatgggccaaactaatataacaagaagtcttgagaggagtcagcggccaagctccatgtcttgcagccaaacaatgctgtgggatggaaggtgggatgtcatgtgtctggtttacagcactcacgtatcagttggcagttaacggaagtgctactgattggtgatatgcctactcccccttcaccttcgatcatgattgtaaacttcgtgaggacatcaccaaaggctgacattggcaacatgcttcctgtacaatctgcagaacaacgatggaacaaaataaacaccttttctttataaa

SEQ ID NO: 5063 - protein, 52 aa, Homo sapiens
MIIGMSQGCCVDQLKPYVRKHFTYRRGLVQRRLHPGRELAGFSPQHVWAKLI

SEQ ID NO: 5064 - DNA, 11705 bp, Homo sapiens
gcgggagcctcggccaagccgcgagcaggtgtgaatgagcccagggaaggacacacggccactgctggagggatcctccattcctgtgtcatttgcatgggtcctgctgtgaaatgaacctggcagggacttgttagacacttccttccttccctcattgagcactccagtgccattgttccacagttgttctaattgggtcctagcttcctcctgccaaggcaaacagcatagtctcgagtaggtgtccctaggctcatctgccagcctgaacatgaacacaggcaaagctgatgatggccagggaccccaggggacgtggggccctgtggggtctggcccccaggagcaagacctctgatgatgctggtgtctgggagtgagcaccatgcccatcacccaggacaatgccgtgctgcacctgcccctcctctaccagtggctgcagaacagcctgcaggaaggtggggatgggccggagcagcggctctgccaggcggccatccagaagctgcaggagtacatccagctgaactttgctgtggatgagagtacggtcccacctgatcacagcccccccgaaatggagatctgtactgtgtacctcaccaaggagctgggggacacagagactgtgggcctgagttttgggaacatccctgttttcggggactatggtgaaaagcgcagggggggcaagaagaggaaaacccaccagggtcctgtgctggatgtgggctgcatctgggtgacagagctgaggaagaacagcccagcagggaagagtgggaaggtccgactgcgggatgagatcctctcactgaatgggcagctgatggttggagttgatgtcagtggggccagttacctggctgagcagtgctggaatggcggctttatctacctgatcatgctgcgtcgctttaagcacaaagcccactccacttataatggcaacagtagcaacagctctgaaccaggagaaacacctaccttggagctgggtgaccgaactgcgaaaaaggggaaacgaaccagaaagtttggggtcatctccaggcctcctgccaacaaggcccctgaagaatccaagggcagcgctggctgtgaggtgtccagtgaccccagcactgagctggagaacggccctgaccctgaacttggaaacggccatgtctttcagctagaaaatggcccagattctctcaaggaggtggctggaccccatctagagaggtcagaagtggacagagggacagagcatagaattccaaagacagatgctcctctgaccacaagcaatgacaaacgccgcttctcaaaaggtgggaagacggacttccaatcgagtgactgcctggcacgggaggaagttggccgaatatggaagatggagctgctcaaagaatcggatgggctgggaattcaggttagtggaggccgaggatcaaagcgctcacctcacgctatcgttgtcactcaagtgaaggaaggaggtgccgctcacagggatggcaggctgtccttaggagatgagctgctggtaatcaatggtcatttactggtcgggctctcccacgaggaagcagtggccattcttcgctccgccacgggaatggtgcagcttgtggtggccagcaaggaaaactccgcagaggacctcctcaggttaacatctaagagcttgccagatctgaccagctcggtagaagatgtgtcctcctggactgataacgaagaccaggaggcagacggggaagaggacgaaggaaccagctcttctgtccagagagcaatgcctgggacagatgaaccccaagatgtgtgcggtgctgaggaatccaaggggaacttggaaagtcccaaacagggcagcaataaaatcaagctcaagagtcgcctttcagggggtgtacaccgccttgagtcagttgaagaatataacgagctgatggtgcggaatggggacccccggatccggatgttggaggtctcccgagatggccggaaacactccctcccgcagctgctggactcttccagtgcctcacaggaataccacattgtgaagaagtctacccgctccttaagcacgactcaggtggaatctccttggaggctcattcggccatccgtcatctcgatcattgggttgtacaaagaaaaaggcaagggccttggctttagtattgctggaggtcgagactgcattcgtggacagatggggatttttgtcaagaccatcttcccaaatggatcagctgcagaggacggaagacttaaagaaggggatgaaatcctagatgtaaatggaataccaataaagggcttgacatttcaagaagccattcatacctttaagcaaatccggagtggattatttgttttaacggtacgcacaaagttggtgagccccagcctcacaccctgctcgacacccacacacatgagcagatccgcctccccgaacttcaataccagtgggggagcctcagcgggaggttccgatgaaggcagttcttcatccctgggtcggaagacccctgggcccaaggacaggatcgtcatggaagtaacactcaacaaagagccaagagttggattaggcattggtgcctgctgcttggctctggaaaacagtcctcctggcatctacattcacagccttgctccaggatcagtggccaagatggagagcaacctgagccgcggggatcaaatcctggaagtgaactccgtcaacgtccgccatgctgctttaagcaaagtccacgccatcttgagtaaatgccctccaggacccgttcgccttgtcatcggccggcaccctaatccaaaggtttccgagcaggaaatggatgaagtcatagcacgcagcacttatcaggagagcaaagaggccaattcctctcctggcttaggtacccccttgaagagtccctctcttgcaaaaaaggactcccttatttctgaatctgaactctcccagtactttgcccacgatgtccctggccccttgtcagacttcatggtggccggttctgaggacgaggatcacccgggaagtggctgcagcacgtcggaggagggcagcctgcctcccagcacctccactcacaaggagcctggaaaacccagagccaacagcctcgtgactcttgggagccatcgggcttctgggctcttccacaagcaggtgacagttgccagacaagccagtctccccggaagcccacaggccctccgaaaccctctcctccgccagaggaaggtaggctgctacgatgccaacgatgccagtgatgaggaagagtttgacagagaaggggactgcatttcactcccaggggccctcccgggtcccatcaggcctctgtcagaggatgacccgaggcgtgtctcaatttcctcttccaagggcatggacgtccacaaccaagaggaacgaccccggaaaacactggtgagcaaggccatctcggcacctcttcttggtagctcagtggacttagaggagagtatcccagagggcatggtggatgctgcgtcctatgcagccaacctcacggactctgcagaggcccccaaggggagccctggaagctggtggaagaaggaactgtcaggatcaagtagcgcacccaaattggaatacacagtccgtacagacacccagagtccgacgaacactgggagccccagttccccccagcagaaaagtgaaggcctgggctccaggcacagaccagtggccagggtaagcccccactgcaagagatccgaggctgaggccaagcccagtggctcacagacagtgaacctgactggcagagccaatgatccatgcgatctggactcgagagtccaggccacttctgtcaaagtgactgtcgctggctttcagccaggtggagctgtggagaaggaatctctgggaaagctgaccactggagatgcttgtgtctctaccagctgtgaactagccagtgctctgtcccatctggatgccagccacctcacagagaacctgcccaaagctgcatcagagctggggcaacaacccatgactgaactggacagctcctcagacctcatctcttccccagggaagaagggggccgctcatcctgaccccagcaagacctctgtagacacagggcaagtcagtcggccagagaatcccagccagcctgcatcgcccagggtcaccaagtgcaaggccaggtctccagtcaggctcccccatgagggcagcccctccccgggggagaaagcagcggctccccctgactacagcaagactcgatcagcatcggaaaccagcacaccccacaataccaggagggtggctgccctcaggggagcgggacctggagcagagggaatgacaccagctggtgctgtcctgccaggagaccccctcacatcccaggagcagagacagggagctccaggtaaccacagtaaggctctggaaatgacaggaatccatgcacctgaaagctcccaggagccttccctgctggagggagcagattctgtgtcctcaagggcaccgcaggccagcctctccatgctgccatccactgacaacaccaaagaagcatgtggccatgtctcggggcactgctgcccaggggggagtagagagagccctgtgacggacattgacagcttcatcaaggagctggatgcttctgcagcaaggtctccgtcttcccagacgggggacagtggctctcaggagggcagtgctcagggccacccaccagccggggctggaggtgggagctcctgccgtgccgaaccagtcccggggggccagacctcctccccgaggagggcctgggctgctggtgcccccgcctacccacaatgggcctcccagccttcggttttagattcaattaatcccgacaaacattttactgtgaacaaaaactttctgagcaactactctagaaattttagcagttttcatgaagacagcacctccctatcaggcctgggtgacagcacggagccgtctctgtcatccatgtatggcgatgctgaggattcttcttctgaccctgagtcactcactgaagccccacgagcttctgccagggacggctggtcccctcctcgttcccgtgtgtctttgcacaaggaagatccttcggagtcagaagaggaacagattgagatttgttccacacgtggctgccccaatccaccctcgagtcctgctcatcttcccacccaggctgccatctgtcctgcctcagccaaagttctgtcattaaaatacagcactccgagagagtcggtggccagtccccgtgagaaggccgcctgcttgccaggctcatacacttcaggcccagactcttcccagccatcatcactcttggagatgagctctcaggagcatgaaactcatgcggacataagcacttcacagaaccacaggccctcgtgtgcagaagaaaccacagaagtcaccagcgctagctcagccatggaaaacagtccgctgtctaaagtagccaggcattttcacagtccgcccatcattctcagctcccccaacatggtaaatggcttggaacatgacctgctagatgacgaaaccctgaatcaatacgaaacaagcattaatgcagctgccagtctgtcctccttcagtgtggatgtccctaagaatggagaatctgttttggaaaacctccacatctctgaaagtcaagacctggatgacttgctacagaaaccaaaaatgatcgctaggaggcccatcatggcctggtttaaagaaataaataaacataaccaaggcacacatttgaggagcaaaaccgagaaggaacaacctctaatgcctgccagaagtcccgactccaagattcagatggtgagttcaagccaaaaaaagggcgttactgtgcctcatagccctcctcagccgaaaacaaacctggaaaataaggacctgtctaagaagagtccggcagaaatgcttctgactaatggtcagaaggcaaagtgtggtccgaagctgaagaggctcagcctcaagggcaaggccaaagtcaactctgaggcccctgctgcgaatgctgtgaaggctggggggacggaccacaggaaacccttgatctcaccccagacctcccacaaaacactttctaaggcagtgtcacagcggctccatgtagccgaccacgaggaccctgacagaaacaccacagctgcccccaggtccccccagtgtgtgctggaaagcaagccacctcttgccacctctgggccactgaaaccctcagtgtctgacacgagcatcaggacatttgtctcgcccctgacctctcccaagcctgttcctgagcaaggcatgtggagcaggttccacatggctgtcctctctgaacccgacagaggttgcccaaccacccctaaatctcctaagtgtagagcagagggcagggcgccccgtgctgactccgggccggtgagtccggcagcgtctaggaacggcatgtccgtggcagggaacagacagagtgagccgcgcctggccagccatgtggcagcagacacagcccaacccaggccgactggcgaaaaaggaggcaacataatggccagcgatcgcctcgaaagaacaaaccagctgaaaatcgtggagatttctgctgaagcagtgtcagagactgtatgtggtaacaagccagctgaaagcgacagacggggagggtgcttggcccagggcaactgtcaggagaagagtgaaatcaggctctatcgccaggtcgcagaatcatccacaagtcatccatcctcactcccatctcatgcctcccaggcagagcaggaaatgtcacgatcattcagcatggcaaaactggcgtcctcctcctcctcccttcaaacagccattagaaaggcagaatactcccagggaaaatcaagcctgatgtcagactcccgaggggtgcccagaaacagcattccagggggcccctcgggggaggaccatctctacttcaccccaaggccagcgaccaggacctactccatgccagcccagttctcaagccattttggacgggagggtcaccccccacacagcctgggtcgctctcgggacagccaggtccctgtgacaagcagtgttgtccccgaggcaaaggcatccagaggtggtcttcccagcctggctaatggacagggcatatatagtgtaaagccgctgctggacacatcgaggaatcttccagccacagatgaaggggatatcatttcagtccaggagacgagctgcctagtcacagacaaaatcaaagtcaccagacgacactactgctatgagcagaactggccccatgaatctacctcatttttctctgtgaagcagcggatcaagtcttttgagaacctggccaatgctgaccggcctgtagccaagtccggggcttccccatttttgtcggtgagctccaagcctcccattgggaggcggtcttccggcagcattgtttccgggagcctgggccacccaggtgacgcagcagcaaggttgttgagacgcagcttgagttcctgcagcgaaaaccaaagcgaagccggcaccctcctgccccagatggccaagtctccctcaatcatgacactgaccatctctcggcagaacccaccagagaccagtagcaagggctctgattcggaactaaagaaatcacttggtcctttgggaattcccaccccaacgatgaccctggcttctcctgttaagaggaacaagtcctcggtacgccacacgcagccctcgcccgtgtcccgctccaagctccaggagctgagagccttgagcatgcctgaccttgacaagctctgcagcgaggattactcagcagggccgagcgccgtgctcttcaaaactgagctggagatcacccccaggaggtcacctggccctcctgctggaggcgtttcgtgtcccgagaagggcgggaacagggcctgtccaggaggaagtggccctaaaaccagtgctgctgagacacccagttcagccagtgatacgggtgaagctgcccaggatctgccttttagaagaagctggtcagttaatttggatcaacttctagtctcagcgggggaccagcaaagattacagtctgttttatcgtcagtgggatcgaaatctaccatcctaactctcattcaggaagcgaaagcacaatcagagaatgaagaagatgtttgcttcatagtcttgaatagaaaagaaggctcaggtctgggattcagtgtggcaggagggacagatgtggagccaaaatcaatcacggtccacagggtgttttctcagggggcggcttctcaggaagggactatgaaccgaggggatttccttctgtcagtcaacggcgcctcactggctggcttagcccacgggaatgtcctgaaggttctgcaccaggcacagctgcacaaagatgccctcgtggtcatcaagaaagggatggatcagcccaggccctctgcccggcaggagcctcccacagccaatgggaagggtttgctgtccagaaagaccatccccctggagcctggcattgggagaagtgtggctgtacacgatgctctgtgtgttgaagtgctgaagacctcggctgggctgggactgagtctggatgggggaaaatcatcggtgacgggagatgggcccttggtcattaaaagagtgtacaaaggtggtgcggctgaacaagctggaataatagaagctggagatgaaattcttgctattaatgggaaacctctggttgggctcatgcactttgatgcctggaatattatgaagtctgtcccagaaggacctgtgcagttattaattagaaagcataggaattcttcatgaattttaacaagaatcattttctcagttctcttctttctttagcaaatcagagtgacttctttaaaccacaggttgttgaaatggccaacactggtacagacacggactataaaaatctccaagcttgtgcttacacatgaagcctgacttaactgtatgtgcaacagcaatgaaattaactccagaagccttccacctgcgtcacccaggccgggagggttccttcgttccagtgcctgtcccctacctttatgttatgtttactgatggggatacaagatgtgacacacccttctttatttgaaacaaacaaacatttagctagacctttgcttccttcttgccagctctcccaacatacccaatcctggtgatcagggaactaaaagtctgagggggacacaaatgtcacacctaagaggacaatcaatcattttgtatgattttgtaagtaaatgacagaatgcttttaggcacattcaatggaaggaggagatgtaggtctgtatatgttaccctgaaaagagaataagacttacttaaaaaaatgaattatgacctgttaggctgagctcaggaattgtccaaaaaggaaaaagcaaaataattaattgagagtattttttagtgagtgtaatgtataatgtacgtatgcaaagttcaactcaataggttattgatcaccatgaagtattgatcattttctatctcaaaagtgtaagccataaggctgttttacagaatagcacttctgataagctgtattaaatagccatgagcttcactgcttagagggagcagaaaggtcaacatctaaaagcaccttacaactagtttttgaacctgtcttgataagtgcttgaattcaagactggtcagtccaagagcagacaaaaatatcacaagtcagtcagtcactgggtttccatttctgaattttatgcactccaaccatgaatttaaactaaatttttagaaatcaagtatctttctaagtgtccttggatttatagacaatgtatgtacaatccaaatagaggagcttaatggaatccttttaggagactggttggtttttttccctctttcccaacatgtttaagaaatgtaacattctaagtattggatctcttttcttgacctagtataatgacaactgcagtgacttaagtttttgctgttttcgttttcccgctttgcaatttcctccttttgccaaaaatgttttcctacagaagactgtcgtgactcacgctacttgggaaactcactctggccactcctcctctggtggcatgagctgcttcccagtagctattccgattggatattccgttcgtcgtcacatagctggcttttctctcctcatgatgtaccttattttcttaggtaaataattccaaactctcatcgggtcataaagaggaggagaaacagggtgagtcaaggtaaaggagcagaaatgtagttacaagccaggtcgtcttcagtggcacaaaccaacccgttgagccctgacaacatgagtggagagtgcatttgccatacctgtgtgcatgacactaagattttatgttggagatacttctttaaataacctacagcttgggtctatggctgtgacccccagattcatggaggggctttagccatcagctttgtacatcatcatttttctgaatgaccaatcccactaaacatctttgaagtcggcctagagaggtccttcagatgagagagaaatagctggcttgtctgagtccagatttctcatcaactggcaatacaaaggaaaatatggtacaggagttagttagaaaggtcttattgattttacttctacttttcactacagttacaggtagaatactgtaggaagtcagtgcaaggtgcatgcttgattgatagatattgattgattgtttttcagtctctggggtcagttttgtggtttctgctttcttgcctaaatcaaagactatttcaagtcaacaacactgaaaactgcttttcgcctccactcttacagctgtgcctaataataattaattaataaacgcacagccctatgtgaacagacaggaatttcttgtgcaatgtggagcaaatggaatggtctccttccgcaagtctttttaatcctcatatctggagtacaagggtagacctctggcttaccacatacactatgctaaagtcatcagccactgctactacatcttgccagaaggtttccctcgccaacaaacagttgaaatttaagggaagaagcaaaagctaaactgtctttgaccctaagatagatagaaagctatttatttgtcttcagtgttcaaggcatgactagtatttctaattagcctaataaattcccacactttctgaagtgaacactaatggtattgtcctactaaaactgtcattgtttctttttttttaactggtcagtcattcacaataagctatgagggtaaataaatatgtgttataacaagtaaaccgtagttgcaagaatataccatgaagattaaagtaggctgggtttcatttccatcttcccacacatctcattgaatttgatggttgacttaattggcaccataactttgtatgatattatacattaacctttatttatgtaaagtaaaatgccttatatattaaagagtaagtgcaataatatgaaatagcctgtacattttaaaaatgttgtcaccaagttatataaatccacatctctgtaaacaaccttttttaagtaattttaaaaaaaataaacactctgcttactacttga

SEQ ID NO: 5065 - protein, 2839 aa, Homo sapiens; identical to SEQ ID NO: 637

SEQ ID NO: 5066 - DNA, 11765 bp, Homo sapiens
aatcggcgtctttcccagaccaccatgagggccggcgttcctgctcagctgtgaatgctgctgttgttatggctgctgcttggcttaggtgtgaatgagcccagggaaggacacacggccactgctggagggatcctccattcctgtgtcatttgcatgggtcctgctgtgaaatgaacctggcagggacttgttagacacttccttccttccctcattgagcactccagtgccattgttccacagttgttctaattgggtcctagcttcctcctgccaaggcaaacagcatagtctcgagtaggtgtccctaggctcatctgccagcctgaacatgaacacaggcaaagctgatgatggccagggaccccaggggacgtggggccctgtggggtctggcccccaggagcaagacctctgatgatgctggtgtctgggagtgagcaccatgcccatcacccaggacaatgccgtgctgcacctgcccctcctctaccagtggctgcagaacagcctgcaggaaggtggggatgggccggagcagcggctctgccaggcggccatccagaagctgcaggagtacatccagctgaactttgctgtggatgagagtacggtcccacctgatcacagcccccccgaaatggagatctgtactgtgtacctcaccaaggagctgggggacacagagactgtgggcctgagttttgggaacatccctgttttcggggactatggtgaaaagcgcagggggggcaagaagaggaaaacccaccagggtcctgtgctggatgtgggctgcatctgggtgacagagctgaggaagaacagcccagcagggaagagtgggaaggtccgactgcgggatgagatcctctcactgaatgggcagctgatggttggagttgatgtcagtggggccagttacctggctgagcagtgctggaatggcggctttatctacctgatcatgctgcgtcgctttaagcacaaagcccactccacttataatggcaacagtagcaacagctctgaaccaggagaaacacctaccttggagctgggtgaccgaactgcgaaaaaggggaaacgaaccagaaagtttggggtcatctccaggcctcctgccaacaaggcccctgaagaatccaagggcagcgctggctgtgaggtgtccagtgaccccagcactgagctggagaacggccctgaccctgaacttggaaacggccatgtctttcagctagaaaatggcccagattctctcaaggaggtggctggaccccatctagagaggtcagaagtggacagagggacagagcatagaattccaaagacagatgctcctctgaccacaagcaatgacaaacgccgcttctcaaaaggtgggaagacggacttccaatcgagtgactgcctggcacgggaggaagttggccgaatatggaagatggagctgctcaaagaatcggatgggctgggaattcaggttagtggaggccgaggatcaaagcgctcacctcacgctatcgttgtcactcaagtgaaggaaggaggtgccgctcacagggatggcaggctgtccttaggagatgagctgctggtaatcaatggtcatttactggtcgggctctcccacgaggaagcagtggccattcttcgctccgccacgggaatggtgcagcttgtggtggccagcaaggaaaactccgcagaggacctcctcaggttaacatctaagagcttgccagatctgaccagctcggtagaagatgtgtcctcctggactgataacgaagaccaggaggcagacggggaagaggacgaaggaaccagctcttctgtccagagagcaatgcctgggacagatgaaccccaagatgtgtgcggtgctgaggaatccaaggggaacttggaaagtcccaaacagggcagcaataaaatcaagctcaagagtcgcctttcagggggtgtacaccgccttgagtcagttgaagaatataacgagctgatggtgcggaatggggacccccggatccggatgttggaggtctcccgagatggccggaaacactccctcccgcagctgctggactcttccagtgcctcacaggaataccacattgtgaagaagtctacccgctccttaagcacgactcaggtggaatctccttggaggctcattcggccatccgtcatctcgatcattgggttgtacaaagaaaaaggcaagggccttggctttagtattgctggaggtcgagactgcattcgtggacagatggggatttttgtcaagaccatcttcccaaatggatcagctgcagaggacggaagacttaaagaaggggatgaaatcctagatgtaaatggaataccaataaagggcttgacatttcaagaagccattcatacctttaagcaaatccggagtggattatttgttttaacggtacgcacaaagttggtgagccccagcctcacaccctgctcgacacccacacacatgagcagatccgcctccccgaacttcaataccagtgggggagcctcagcgggaggttccgatgaaggcagttcttcatccctgggtcggaagacccctgggcccaaggacaggatcgtcatggaagtaacactcaacaaagagccaagagttggattaggcattggtgcctgctgcttggctctggaaaacagtcctcctggcatctacattcacagccttgctccaggatcagtggccaagatggagagcaacctgagccgcggggatcaaatcctggaagtgaactccgtcaacgtccgccatgctgctttaagcaaagtccacgccatcttgagtaaatgccctccaggacccgttcgccttgtcatcggccggcaccctaatccaaaggtttccgagcaggaaatggatgaagtcatagcacgcagcacttatcaggagagcaaagaggccaattcctctcctggcttaggtacccccttgaagagtccctctcttgcaaaaaaggactcccttatttctgaatctgaactctcccagtactttgcccacgatgtccctggccccttgtcagacttcatggtggccggttctgaggacgaggatcacccgggaagtggctgcagcacgtcggaggagggcagcctgcctcccagcacctccactcacaaggagcctggaaaacccagagccaacagcctcgtgactcttgggagccatcgggcttctgggctcttccacaagcaggtgacagttgccagacaagccagtctccccggaagcccacaggccctccgaaaccctctcctccgccagaggaaggtaggctgctacgatgccaacgatgccagtgatgaggaagagtttgacagagaaggggactgcatttcactcccaggggccctcccgggtcccatcaggcctctgtcagaggatgacccgaggcgtgtctcaatttcctcttccaagggcatggacgtccacaaccaagaggaacgaccccggaaaacactggtgagcaaggccatctcggcacctcttcttggtagctcagtggacttagaggagagtatcccagagggcatggtggatgctgcgtcctatgcagccaacctcacggactctgcagaggcccccaaggggagccctggaagctggtggaagaaggaactgtcaggatcaagtagcgcacccaaattggaatacacagtccgtacagacacccagagtccgacgaacactgggagccccagttccccccagcagaaaagtgaaggcctgggctccaggcacagaccagtggccagggtaagcccccactgcaagagatccgaggctgaggccaagcccagtggctcacagacagtgaacctgactggcagagccaatgatccatgcgatctggactcgagagtccaggccacttctgtcaaagtgactgtcgctggctttcagccaggtggagctgtggagaaggaatctctgggaaagctgaccactggagatgcttgtgtctctaccagctgtgaactagccagtgctctgtcccatctggatgccagccacctcacagagaacctgcccaaagctgcatcagagctggggcaacaacccatgactgaactggacagctcctcagacctcatctcttccccagggaagaagggggccgctcatcctgaccccagcaagacctctgtagacacagggcaagtcagtcggccagagaatcccagccagcctgcatcgcccagggtcaccaagtgcaaggccaggtctccagtcaggctcccccatgagggcagcccctccccgggggagaaagcagcggctccccctgactacagcaagactcgatcagcatcggaaaccagcacaccccacaataccaggagggtggctgccctcaggggagcgggacctggagcagagggaatgacaccagctggtgctgtcctgccaggagaccccctcacatcccaggagcagagacagggagctccaggtaaccacagtaaggctctggaaatgacaggaatccatgcacctgaaagctcccaggagccttccctgctggagggagcagattctgtgtcctcaagggcaccgcaggccagcctctccatgctgccatccactgacaacaccaaagaagcatgtggccatgtctcggggcactgctgcccaggggggagtagagagagccctgtgacggacattgacagcttcatcaaggagctggatgcttctgcagcaaggtctccgtcttcccagacgggggacagtggctctcaggagggcagtgctcagggccacccaccagccggggctggaggtgggagctcctgccgtgccgaaccagtcccggggggccagacctcctccccgaggagggcctgggctgctggtgcccccgcctacccacaatgggcctcccagccttcggttttagattcaattaatcccgacaaacattttactgtgaacaaaaactttctgagcaactactctagaaattttagcagttttcatgaagacagcacctccctatcaggcctgggtgacagcacggagccgtctctgtcatccatgtatggcgatgctgaggattcttcttctgaccctgagtcactcactgaagccccacgagcttctgccagggacggctggtcccctcctcgttcccgtgtgtctttgcacaaggaagatccttcggagtcagaagaggaacagattgagatttgttccacacgtggctgccccaatccaccctcgagtcctgctcatcttcccacccaggctgccatctgtcctgcctcagccaaagttctgtcattaaaatacagcactccgagagagtcggtggccagtccccgtgagaaggccgcctgcttgccaggctcatacacttcaggcccagactcttcccagccatcatcactcttggagatgagctctcaggagcatgaaactcatgcggacataagcacttcacagaaccacaggccctcgtgtgcagaagaaaccacagaagtcaccagcgctagctcagccatggaaaacagtccgctgtctaaagtagccaggcattttcacagtccgcccatcattctcagctcccccaacatggtaaatggcttggaacatgacctgctagatgacgaaaccctgaatcaatacgaaacaagcattaatgcagctgccagtctgtcctccttcagtgtggatgtccctaagaatggagaatctgttttggaaaacctccacatctctgaaagtcaagacctggatgacttgctacagaaaccaaaaatgatcgctaggaggcccatcatggcctggtttaaagaaataaataaacataaccaaggcacacatttgaggagcaaaaccgagaaggaacaacctctaatgcctgccagaagtcccgactccaagattcagatggtgagttcaagccaaaaaaagggcgttactgtgcctcatagccctcctcagccgaaaacaaacctggaaaataaggacctgtctaagaagagtccggcagaaatgcttctgactaatggtcagaaggcaaagtgtggtccgaagctgaagaggctcagcctcaagggcaaggccaaagtcaactctgaggcccctgctgcgaatgctgtgaaggctggggggacggaccacaggaaacccttgatctcaccccagacctcccacaaaacactttctaaggcagtgtcacagcggctccatgtagccgaccacgaggaccctgacagaaacaccacagctgcccccaggtccccccagtgtgtgctggaaagcaagccacctcttgccacctctgggccactgaaaccctcagtgtctgacacgagcatcaggacatttgtctcgcccctgacctctcccaagcctgttcctgagcaaggcatgtggagcaggttccacatggctgtcctctctgaacccgacagaggttgcccaaccacccctaaatctcctaagtgtagagcagagggcagggcgccccgtgctgactccgggccggtgagtccggcagcgtctaggaacggcatgtccgtggcagggaacagacagagtgagccgcgcctggccagccatgtggcagcagacacagcccaacccaggccgactggcgaaaaaggaggcaacataatggccagcgatcgcctcgaaagaacaaaccagctgaaaatcgtggagatttctgctgaagcagtgtcagagactgtatgtggtaacaagccagctgaaagcgacagacggggagggtgcttggcccagggcaactgtcaggagaagagtgaaatcaggctctatcgccaggtcgcagaatcatccacaagtcatccatcctcactcccatctcatgcctcccaggcagagcaggaaatgtcacgatcattcagcatggcaaaactggcgtcctcctcctcctcccttcaaacagccattagaaaggcagaatactcccagggaaaatcaagcctgatgtcagactcccgaggggtgcccagaaacagcattccagggggcccctcgggggaggaccatctctacttcaccccaaggccagcgaccaggacctactccatgccagcccagttctcaagccattttggacgggagggtcaccccccacacagcctgggtcgctctcgggacagccaggtccctgtgacaagcagtgttgtccccgaggcaaaggcatccagaggtggtcttcccagcctggctaatggacagggcatatatagtgtaaagccgctgctggacacatcgaggaatcttccagccacagatgaaggggatatcatttcagtccaggagacgagctgcctagtcacagacaaaatcaaagtcaccagacgacactactgctatgagcagaactggccccatgaatctacctcatttttctctgtgaagcagcggatcaagtcttttgagaacctggccaatgctgaccggcctgtagccaagtccggggcttccccatttttgtcggtgagctccaagcctcccattgggaggcggtcttccggcagcattgtttccgggagcctgggccacccaggtgacgcagcagcaaggttgttgagacgcagcttgagttcctgcagcgaaaaccaaagcgaagccggcaccctcctgccccagatggccaagtctccctcaatcatgacactgaccatctctcggcagaacccaccagagaccagtagcaagggctctgattcggaactaaagaaatcacttggtcctttgggaattcccaccccaacgatgaccctggcttctcctgttaagaggaacaagtcctcggtacgccacacgcagccctcgcccgtgtcccgctccaagctccaggagctgagagccttgagcatgcctgaccttgacaagctctgcagcgaggattactcagcagggccgagcgccgtgctcttcaaaactgagctggagatcacccccaggaggtcacctggccctcctgctggaggcgtttcgtgtcccgagaagggcgggaacagggcctgtccaggaggaagtggccctaaaaccagtgctgctgagacacccagttcagccagtgatacgggtgaagctgcccaggatctgccttttagaagaagctggtcagttaatttggatcaacttctagtctcagcgggggaccagcaaagattacagtctgttttatcgtcagtgggatcgaaatctaccatcctaactctcattcaggaagcgaaagcacaatcagagaatgaagaagatgtttgcttcatagtcttgaatagaaaagaaggctcaggtctgggattcagtgtggcaggagggacagatgtggagccaaaatcaatcacggtccacagggtgttttctcagggggcggcttctcaggaagggactatgaaccgaggggatttccttctgtcagtcaacggcgcctcactggctggcttagcccacgggaatgtcctgaaggttctgcaccaggcacagctgcacaaagatgccctcgtggtcatcaagaaagggatggatcagcccaggccctctgcccggcaggagcctcccacagccaatgggaagggtttgctgtccagaaagaccatccccctggagcctggcattgggagaagtgtggctgtacacgatgctctgtgtgttgaagtgctgaagacctcggctgggctgggactgagtctggatgggggaaaatcatcggtgacgggagatgggcccttggtcattaaaagagtgtacaaaggtggtgcggctgaacaagctggaataatagaagctggagatgaaattcttgctattaatgggaaacctctggttgggctcatgcactttgatgcctggaatattatgaagtctgtcccagaaggacctgtgcagttattaattagaaagcataggaattcttcatgaattttaacaagaatcattttctcagttctcttctttctttagcaaatcagagtgacttctttaaaccacaggttgttgaaatggccaacactggtacagacacggactataaaaatctccaagcttgtgcttacacatgaagcctgacttaactgtatgtgcaacagcaatgaaattaactccagaagccttccacctgcgtcacccaggccgggagggttccttcgttccagtgcctgtcccctacctttatgttatgtttactgatggggatacaagatgtgacacacccttctttatttgaaacaaacaaacatttagctagacctttgcttccttcttgccagctctcccaacatacccaatcctggtgatcagggaactaaaagtctgagggggacacaaatgtcacacctaagaggacaatcaatcattttgtatgattttgtaagtaaatgacagaatgcttttaggcacattcaatggaaggaggagatgtaggtctgtatatgttaccctgaaaagagaataagacttacttaaaaaaatgaattatgacctgttaggctgagctcaggaattgtccaaaaaggaaaaagcaaaataattaattgagagtattttttagtgagtgtaatgtataatgtacgtatgcaaagttcaactcaataggttattgatcaccatgaagtattgatcattttctatctcaaaagtgtaagccataaggctgttttacagaatagcacttctgataagctgtattaaatagccatgagcttcactgcttagagggagcagaaaggtcaacatctaaaagcaccttacaactagtttttgaacctgtcttgataagtgcttgaattcaagactggtcagtccaagagcagacaaaaatatcacaagtcagtcagtcactgggtttccatttctgaattttatgcactccaaccatgaatttaaactaaatttttagaaatcaagtatctttctaagtgtccttggatttatagacaatgtatgtacaatccaaatagaggagcttaatggaatccttttaggagactggttggtttttttccctctttcccaacatgtttaagaaatgtaacattctaagtattggatctcttttcttgacctagtataatgacaactgcagtgacttaagtttttgctgttttcgttttcccgctttgcaatttcctccttttgccaaaaatgttttcctacagaagactgtcgtgactcacgctacttgggaaactcactctggccactcctcctctggtggcatgagctgcttcccagtagctattccgattggatattccgttcgtcgtcacatagctggcttttctctcctcatgatgtaccttattttcttaggtaaataattccaaactctcatcgggtcataaagaggaggagaaacagggtgagtcaaggtaaaggagcagaaatgtagttacaagccaggtcgtcttcagtggcacaaaccaacccgttgagccctgacaacatgagtggagagtgcatttgccatacctgtgtgcatgacactaagattttatgttggagatacttctttaaataacctacagcttgggtctatggctgtgacccccagattcatggaggggctttagccatcagctttgtacatcatcatttttctgaatgaccaatcccactaaacatctttgaagtcggcctagagaggtccttcagatgagagagaaatagctggcttgtctgagtccagatttctcatcaactggcaatacaaaggaaaatatggtacaggagttagttagaaaggtcttattgattttacttctacttttcactacagttacaggtagaatactgtaggaagtcagtgcaaggtgcatgcttgattgatagatattgattgattgtttttcagtctctggggtcagttttgtggtttctgctttcttgcctaaatcaaagactatttcaagtcaacaacactgaaaactgcttttcgcctccactcttacagctgtgcctaataataattaattaataaacgcacagccctatgtgaacagacaggaatttcttgtgcaatgtggagcaaatggaatggtctccttccgcaagtctttttaatcctcatatctggagtacaagggtagacctctggcttaccacatacactatgctaaagtcatcagccactgctactacatcttgccagaaggtttccctcgccaacaaacagttgaaatttaagggaagaagcaaaagctaaactgtctttgaccctaagatagatagaaagctatttatttgtcttcagtgttcaaggcatgactagtatttctaattagcctaataaattcccacactttctgaagtgaacactaatggtattgtcctactaaaactgtcattgtttctttttttttaactggtcagtcattcacaataagctatgagggtaaataaatatgtgttataacaagtaaaccgtagttgcaagaatataccatgaagattaaagtaggctgggtttcatttccatcttcccacacatctcattgaatttgatggttgacttaattggcaccataactttgtatgatattatacattaacctttatttatgtaaagtaaaatgccttatatattaaagagtaagtgcaataatatgaaatagcctgtacattttaaaaatgttgtcaccaagttatataaatccacatctctgtaaacaaccttttttaagtaattttaaaaaaaataaacactctgcttactacttga

SEQ ID NO: 5067 - protein, 2839 aa, Homo sapiens; identical to SEQ ID NO: 637

SEQ ID NO: 5068 - DNA, 11812 bp, Homo sapiens
agaagtgtggcgtcttggtccaggatgcaggtccctgattcgggttggacgtggtcatcaaacccagaaattgaaggatcttgggcctgccttgatgttcatttctctcatctataaaattgaaggctggaggaggtgtgaatgagcccagggaaggacacacggccactgctggagggatcctccattcctgtgtcatttgcatgggtcctgctgtgaaatgaacctggcagggacttgttagacacttccttccttccctcattgagcactccagtgccattgttccacagttgttctaattgggtcctagcttcctcctgccaaggcaaacagcatagtctcgagtaggtgtccctaggctcatctgccagcctgaacatgaacacaggcaaagctgatgatggccagggaccccaggggacgtggggccctgtggggtctggcccccaggagcaagacctctgatgatgctggtgtctgggagtgagcaccatgcccatcacccaggacaatgccgtgctgcacctgcccctcctctaccagtggctgcagaacagcctgcaggaaggtggggatgggccggagcagcggctctgccaggcggccatccagaagctgcaggagtacatccagctgaactttgctgtggatgagagtacggtcccacctgatcacagcccccccgaaatggagatctgtactgtgtacctcaccaaggagctgggggacacagagactgtgggcctgagttttgggaacatccctgttttcggggactatggtgaaaagcgcagggggggcaagaagaggaaaacccaccagggtcctgtgctggatgtgggctgcatctgggtgacagagctgaggaagaacagcccagcagggaagagtgggaaggtccgactgcgggatgagatcctctcactgaatgggcagctgatggttggagttgatgtcagtggggccagttacctggctgagcagtgctggaatggcggctttatctacctgatcatgctgcgtcgctttaagcacaaagcccactccacttataatggcaacagtagcaacagctctgaaccaggagaaacacctaccttggagctgggtgaccgaactgcgaaaaaggggaaacgaaccagaaagtttggggtcatctccaggcctcctgccaacaaggcccctgaagaatccaagggcagcgctggctgtgaggtgtccagtgaccccagcactgagctggagaacggccctgaccctgaacttggaaacggccatgtctttcagctagaaaatggcccagattctctcaaggaggtggctggaccccatctagagaggtcagaagtggacagagggacagagcatagaattccaaagacagatgctcctctgaccacaagcaatgacaaacgccgcttctcaaaaggtgggaagacggacttccaatcgagtgactgcctggcacgggaggaagttggccgaatatggaagatggagctgctcaaagaatcggatgggctgggaattcaggttagtggaggccgaggatcaaagcgctcacctcacgctatcgttgtcactcaagtgaaggaaggaggtgccgctcacagggatggcaggctgtccttaggagatgagctgctggtaatcaatggtcatttactggtcgggctctcccacgaggaagcagtggccattcttcgctccgccacgggaatggtgcagcttgtggtggccagcaaggaaaactccgcagaggacctcctcaggttaacatctaagagcttgccagatctgaccagctcggtagaagatgtgtcctcctggactgataacgaagaccaggaggcagacggggaagaggacgaaggaaccagctcttctgtccagagagcaatgcctgggacagatgaaccccaagatgtgtgcggtgctgaggaatccaaggggaacttggaaagtcccaaacagggcagcaataaaatcaagctcaagagtcgcctttcagggggtgtacaccgccttgagtcagttgaagaatataacgagctgatggtgcggaatggggacccccggatccggatgttggaggtctcccgagatggccggaaacactccctcccgcagctgctggactcttccagtgcctcacaggaataccacattgtgaagaagtctacccgctccttaagcacgactcaggtggaatctccttggaggctcattcggccatccgtcatctcgatcattgggttgtacaaagaaaaaggcaagggccttggctttagtattgctggaggtcgagactgcattcgtggacagatggggatttttgtcaagaccatcttcccaaatggatcagctgcagaggacggaagacttaaagaaggggatgaaatcctagatgtaaatggaataccaataaagggcttgacatttcaagaagccattcatacctttaagcaaatccggagtggattatttgttttaacggtacgcacaaagttggtgagccccagcctcacaccctgctcgacacccacacacatgagcagatccgcctccccgaacttcaataccagtgggggagcctcagcgggaggttccgatgaaggcagttcttcatccctgggtcggaagacccctgggcccaaggacaggatcgtcatggaagtaacactcaacaaagagccaagagttggattaggcattggtgcctgctgcttggctctggaaaacagtcctcctggcatctacattcacagccttgctccaggatcagtggccaagatggagagcaacctgagccgcggggatcaaatcctggaagtgaactccgtcaacgtccgccatgctgctttaagcaaagtccacgccatcttgagtaaatgccctccaggacccgttcgccttgtcatcggccggcaccctaatccaaaggtttccgagcaggaaatggatgaagtcatagcacgcagcacttatcaggagagcaaagaggccaattcctctcctggcttaggtacccccttgaagagtccctctcttgcaaaaaaggactcccttatttctgaatctgaactctcccagtactttgcccacgatgtccctggccccttgtcagacttcatggtggccggttctgaggacgaggatcacccgggaagtggctgcagcacgtcggaggagggcagcctgcctcccagcacctccactcacaaggagcctggaaaacccagagccaacagcctcgtgactcttgggagccatcgggcttctgggctcttccacaagcaggtgacagttgccagacaagccagtctccccggaagcccacaggccctccgaaaccctctcctccgccagaggaaggtaggctgctacgatgccaacgatgccagtgatgaggaagagtttgacagagaaggggactgcatttcactcccaggggccctcccgggtcccatcaggcctctgtcagaggatgacccgaggcgtgtctcaatttcctcttccaagggcatggacgtccacaaccaagaggaacgaccccggaaaacactggtgagcaaggccatctcggcacctcttcttggtagctcagtggacttagaggagagtatcccagagggcatggtggatgctgcgtcctatgcagccaacctcacggactctgcagaggcccccaaggggagccctggaagctggtggaagaaggaactgtcaggatcaagtagcgcacccaaattggaatacacagtccgtacagacacccagagtccgacgaacactgggagccccagttccccccagcagaaaagtgaaggcctgggctccaggcacagaccagtggccagggtaagcccccactgcaagagatccgaggctgaggccaagcccagtggctcacagacagtgaacctgactggcagagccaatgatccatgcgatctggactcgagagtccaggccacttctgtcaaagtgactgtcgctggctttcagccaggtggagctgtggagaaggaatctctgggaaagctgaccactggagatgcttgtgtctctaccagctgtgaactagccagtgctctgtcccatctggatgccagccacctcacagagaacctgcccaaagctgcatcagagctggggcaacaacccatgactgaactggacagctcctcagacctcatctcttccccagggaagaagggggccgctcatcctgaccccagcaagacctctgtagacacagggcaagtcagtcggccagagaatcccagccagcctgcatcgcccagggtcaccaagtgcaaggccaggtctccagtcaggctcccccatgagggcagcccctccccgggggagaaagcagcggctccccctgactacagcaagactcgatcagcatcggaaaccagcacaccccacaataccaggagggtggctgccctcaggggagcgggacctggagcagagggaatgacaccagctggtgctgtcctgccaggagaccccctcacatcccaggagcagagacagggagctccaggtaaccacagtaaggctctggaaatgacaggaatccatgcacctgaaagctcccaggagccttccctgctggagggagcagattctgtgtcctcaagggcaccgcaggccagcctctccatgctgccatccactgacaacaccaaagaagcatgtggccatgtctcggggcactgctgcccaggggggagtagagagagccctgtgacggacattgacagcttcatcaaggagctggatgcttctgcagcaaggtctccgtcttcccagacgggggacagtggctctcaggagggcagtgctcagggccacccaccagccggggctggaggtgggagctcctgccgtgccgaaccagtcccggggggccagacctcctccccgaggagggcctgggctgctggtgcccccgcctacccacaatgggcctcccagccttcggttttagattcaattaatcccgacaaacattttactgtgaacaaaaactttctgagcaactactctagaaattttagcagttttcatgaagacagcacctccctatcaggcctgggtgacagcacggagccgtctctgtcatccatgtatggcgatgctgaggattcttcttctgaccctgagtcactcactgaagccccacgagcttctgccagggacggctggtcccctcctcgttcccgtgtgtctttgcacaaggaagatccttcggagtcagaagaggaacagattgagatttgttccacacgtggctgccccaatccaccctcgagtcctgctcatcttcccacccaggctgccatctgtcctgcctcagccaaagttctgtcattaaaatacagcactccgagagagtcggtggccagtccccgtgagaaggccgcctgcttgccaggctcatacacttcaggcccagactcttcccagccatcatcactcttggagatgagctctcaggagcatgaaactcatgcggacataagcacttcacagaaccacaggccctcgtgtgcagaagaaaccacagaagtcaccagcgctagctcagccatggaaaacagtccgctgtctaaagtagccaggcattttcacagtccgcccatcattctcagctcccccaacatggtaaatggcttggaacatgacctgctagatgacgaaaccctgaatcaatacgaaacaagcattaatgcagctgccagtctgtcctccttcagtgtggatgtccctaagaatggagaatctgttttggaaaacctccacatctctgaaagtcaagacctggatgacttgctacagaaaccaaaaatgatcgctaggaggcccatcatggcctggtttaaagaaataaataaacataaccaaggcacacatttgaggagcaaaaccgagaaggaacaacctctaatgcctgccagaagtcccgactccaagattcagatggtgagttcaagccaaaaaaagggcgttactgtgcctcatagccctcctcagccgaaaacaaacctggaaaataaggacctgtctaagaagagtccggcagaaatgcttctgactaatggtcagaaggcaaagtgtggtccgaagctgaagaggctcagcctcaagggcaaggccaaagtcaactctgaggcccctgctgcgaatgctgtgaaggctggggggacggaccacaggaaacccttgatctcaccccagacctcccacaaaacactttctaaggcagtgtcacagcggctccatgtagccgaccacgaggaccctgacagaaacaccacagctgcccccaggtccccccagtgtgtgctggaaagcaagccacctcttgccacctctgggccactgaaaccctcagtgtctgacacgagcatcaggacatttgtctcgcccctgacctctcccaagcctgttcctgagcaaggcatgtggagcaggttccacatggctgtcctctctgaacccgacagaggttgcccaaccacccctaaatctcctaagtgtagagcagagggcagggcgccccgtgctgactccgggccggtgagtccggcagcgtctaggaacggcatgtccgtggcagggaacagacagagtgagccgcgcctggccagccatgtggcagcagacacagcccaacccaggccgactggcgaaaaaggaggcaacataatggccagcgatcgcctcgaaagaacaaaccagctgaaaatcgtggagatttctgctgaagcagtgtcagagactgtatgtggtaacaagccagctgaaagcgacagacggggagggtgcttggcccagggcaactgtcaggagaagagtgaaatcaggctctatcgccaggtcgcagaatcatccacaagtcatccatcctcactcccatctcatgcctcccaggcagagcaggaaatgtcacgatcattcagcatggcaaaactggcgtcctcctcctcctcccttcaaacagccattagaaaggcagaatactcccagggaaaatcaagcctgatgtcagactcccgaggggtgcccagaaacagcattccagggggcccctcgggggaggaccatctctacttcaccccaaggccagcgaccaggacctactccatgccagcccagttctcaagccattttggacgggagggtcaccccccacacagcctgggtcgctctcgggacagccaggtccctgtgacaagcagtgttgtccccgaggcaaaggcatccagaggtggtcttcccagcctggctaatggacagggcatatatagtgtaaagccgctgctggacacatcgaggaatcttccagccacagatgaaggggatatcatttcagtccaggagacgagctgcctagtcacagacaaaatcaaagtcaccagacgacactactgctatgagcagaactggccccatgaatctacctcatttttctctgtgaagcagcggatcaagtcttttgagaacctggccaatgctgaccggcctgtagccaagtccggggcttccccatttttgtcggtgagctccaagcctcccattgggaggcggtcttccggcagcattgtttccgggagcctgggccacccaggtgacgcagcagcaaggttgttgagacgcagcttgagttcctgcagcgaaaaccaaagcgaagccggcaccctcctgccccagatggccaagtctccctcaatcatgacactgaccatctctcggcagaacccaccagagaccagtagcaagggctctgattcggaactaaagaaatcacttggtcctttgggaattcccaccccaacgatgaccctggcttctcctgttaagaggaacaagtcctcggtacgccacacgcagccctcgcccgtgtcccgctccaagctccaggagctgagagccttgagcatgcctgaccttgacaagctctgcagcgaggattactcagcagggccgagcgccgtgctcttcaaaactgagctggagatcacccccaggaggtcacctggccctcctgctggaggcgtttcgtgtcccgagaagggcgggaacagggcctgtccaggaggaagtggccctaaaaccagtgctgctgagacacccagttcagccagtgatacgggtgaagctgcccaggatctgccttttagaagaagctggtcagttaatttggatcaacttctagtctcagcgggggaccagcaaagattacagtctgttttatcgtcagtgggatcgaaatctaccatcctaactctcattcaggaagcgaaagcacaatcagagaatgaagaagatgtttgcttcatagtcttgaatagaaaagaaggctcaggtctgggattcagtgtggcaggagggacagatgtggagccaaaatcaatcacggtccacagggtgttttctcagggggcggcttctcaggaagggactatgaaccgaggggatttccttctgtcagtcaacggcgcctcactggctggcttagcccacgggaatgtcctgaaggttctgcaccaggcacagctgcacaaagatgccctcgtggtcatcaagaaagggatggatcagcccaggccctctgcccggcaggagcctcccacagccaatgggaagggtttgctgtccagaaagaccatccccctggagcctggcattgggagaagtgtggctgtacacgatgctctgtgtgttgaagtgctgaagacctcggctgggctgggactgagtctggatgggggaaaatcatcggtgacgggagatgggcccttggtcattaaaagagtgtacaaaggtggtgcggctgaacaagctggaataatagaagctggagatgaaattcttgctattaatgggaaacctctggttgggctcatgcactttgatgcctggaatattatgaagtctgtcccagaaggacctgtgcagttattaattagaaagcataggaattcttcatgaattttaacaagaatcattttctcagttctcttctttctttagcaaatcagagtgacttctttaaaccacaggttgttgaaatggccaacactggtacagacacggactataaaaatctccaagcttgtgcttacacatgaagcctgacttaactgtatgtgcaacagcaatgaaattaactccagaagccttccacctgcgtcacccaggccgggagggttccttcgttccagtgcctgtcccctacctttatgttatgtttactgatggggatacaagatgtgacacacccttctttatttgaaacaaacaaacatttagctagacctttgcttccttcttgccagctctcccaacatacccaatcctggtgatcagggaactaaaagtctgagggggacacaaatgtcacacctaagaggacaatcaatcattttgtatgattttgtaagtaaatgacagaatgcttttaggcacattcaatggaaggaggagatgtaggtctgtatatgttaccctgaaaagagaataagacttacttaaaaaaatgaattatgacctgttaggctgagctcaggaattgtccaaaaaggaaaaagcaaaataattaattgagagtattttttagtgagtgtaatgtataatgtacgtatgcaaagttcaactcaataggttattgatcaccatgaagtattgatcattttctatctcaaaagtgtaagccataaggctgttttacagaatagcacttctgataagctgtattaaatagccatgagcttcactgcttagagggagcagaaaggtcaacatctaaaagcaccttacaactagtttttgaacctgtcttgataagtgcttgaattcaagactggtcagtccaagagcagacaaaaatatcacaagtcagtcagtcactgggtttccatttctgaattttatgcactccaaccatgaatttaaactaaatttttagaaatcaagtatctttctaagtgtccttggatttatagacaatgtatgtacaatccaaatagaggagcttaatggaatccttttaggagactggttggtttttttccctctttcccaacatgtttaagaaatgtaacattctaagtattggatctcttttcttgacctagtataatgacaactgcagtgacttaagtttttgctgttttcgttttcccgctttgcaatttcctccttttgccaaaaatgttttcctacagaagactgtcgtgactcacgctacttgggaaactcactctggccactcctcctctggtggcatgagctgcttcccagtagctattccgattggatattccgttcgtcgtcacatagctggcttttctctcctcatgatgtaccttattttcttaggtaaataattccaaactctcatcgggtcataaagaggaggagaaacagggtgagtcaaggtaaaggagcagaaatgtagttacaagccaggtcgtcttcagtggcacaaaccaacccgttgagccctgacaacatgagtggagagtgcatttgccatacctgtgtgcatgacactaagattttatgttggagatacttctttaaataacctacagcttgggtctatggctgtgacccccagattcatggaggggctttagccatcagctttgtacatcatcatttttctgaatgaccaatcccactaaacatctttgaagtcggcctagagaggtccttcagatgagagagaaatagctggcttgtctgagtccagatttctcatcaactggcaatacaaaggaaaatatggtacaggagttagttagaaaggtcttattgattttacttctacttttcactacagttacaggtagaatactgtaggaagtcagtgcaaggtgcatgcttgattgatagatattgattgattgtttttcagtctctggggtcagttttgtggtttctgctttcttgcctaaatcaaagactatttcaagtcaacaacactgaaaactgcttttcgcctccactcttacagctgtgcctaataataattaattaataaacgcacagccctatgtgaacagacaggaatttcttgtgcaatgtggagcaaatggaatggtctccttccgcaagtctttttaatcctcatatctggagtacaagggtagacctctggcttaccacatacactatgctaaagtcatcagccactgctactacatcttgccagaaggtttccctcgccaacaaacagttgaaatttaagggaagaagcaaaagctaaactgtctttgaccctaagatagatagaaagctatttatttgtcttcagtgttcaaggcatgactagtatttctaattagcctaataaattcccacactttctgaagtgaacactaatggtattgtcctactaaaactgtcattgtttctttttttttaactggtcagtcattcacaataagctatgagggtaaataaatatgtgttataacaagtaaaccgtagttgcaagaatataccatgaagattaaagtaggctgggtttcatttccatcttcccacacatctcattgaatttgatggttgacttaattggcaccataactttgtatgatattatacattaacctttatttatgtaaagtaaaatgccttatatattaaagagtaagtgcaataatatgaaatagcctgtacattttaaaaatgttgtcaccaagttatataaatccacatctctgtaaacaaccttttttaagtaattttaaaaaaaataaacactctgcttactacttga

SEQ ID NO: 5069 - protein, 2839 aa, Homo sapiens; identical to SEQ ID NO: 637

SEQ ID NO: 5070 - DNA, 7183 bp, Homo sapiens
ctcaggaggtgaagccgggaggagagagagagaatctgctcctcagctccacagagcatggggagctggcaggaagttggagcacgcatggcgcagcttgtatttttgttgatagttaataacccaggactttaaagacctgaatggagaagggaagtgaagcacaaccaactttggagtctgtcccattccagaggctgctgaagcacagcagagcacgctcacctgaccagctcataaagcagttacctggctgagcagtgctggaatggcggctttatctacctgatcatgctgcgtcgctttaagcacaaagcccactccacttataatggcaacagtagcaacagctctgaaccaggagaaacacctaccttggagctgggtgaccgaactgcgaaaaaggggaaacgaaccagaaagtttggggtcatctccaggcctcctgccaacaaggcccctgaagaatccaagggcagcgctggctgtgaggtgtccagtgaccccagcactgagctggagaacggccctgaccctgaacttggaaacggccatgtctttcagctagaaaatggcccagattctctcaaggaggtggctggaccccatctagagaggtcagaagtggacagagggacagagcatagaattccaaagacagatgctcctctgaccacaagcaatgacaaacgccgcttctcaaaaggtgggaagacggacttccaatcgagtgactgcctggcacgggaggaagttggccgaatatggaagatggagctgctcaaagaatcggatgggctgggaattcaggttagtggaggccgaggatcaaagcgctcacctcacgctatcgttgtcactcaagtgaaggaaggaggtgccgctcacaggaaaactccgcagaggacctcctcaggttaacatctaagagcttgccagatctgaccagctcggtagaagatgtgtcctcctggactgataacgaagaccaggaggcagacggggaagaggacgaaggaaccagctcttctgtccagagagcaatgcctgggacagatgaaccccaagatgtgtgcggtgctgaggaatccaaggggaacttggaaagtcccaaacagggcagcaataaaatcaagctcaagagtcgcctttcagggggtgtacaccgccttgagtcagttgaagaatataacgagctgatggtgcggaatggggacccccggatccggatgttggaggtctcccgagatggccggaaacactccctcccgcagctgctggactcttccagtgcctcacaggtccgaccagggctgtggatcttttcaaagaccataagggcttacatgttaagaagaactgcccatccatacaggccaggagtgtctggggctagagaagtgggatagagagagacagcaggcaaagtgaggtctacccagagaggctacaaagaagtcagcctaatacttgaaaatagtggggggaaaatccctcattggatctcaaaatgttcatctccttcctactgtgtgttttggaacctagaggtgctttcaattgccaggagacgatggcgtctcatagtctgtggtgaaccagcactgctcgattaataggagcagcctgtatcagtgtaacaactgtgggtgggtatgggcacatgtatgagagagggagtgtgcgtgtgtgcctgtacatgcatccatggctcacctggagtcctacctgttacacagtaatgactcaagcagccaaggtcatggggggctgtagaggggggctgcactagctgctcaagttgatgttacagaacctgctcccgtctgagatccggactccacagccctgcatgagggccgctcctccatctcagcatcctcaacctggtagaaaccggtcaggtggtctcctaaccaaggctaaggcaggctcagtccctgagaaacctgtggggtattctttgagtcctggcaccactaaccaaggggctcaagaggaaccgttagcagcttgtccccagccctatgatgaagcagagatagaggacgggcgtggcagcaacgacctccacacatgcttggaaagctgtagagggtagagttctaaaggacctgggtcagggcatctgaggcaggcccttacttttggtaacctctgtaaagctttaaaggtgctcgaatcagtcaattatgtgtcaggataaagtatttctgttgcttccgatgccctttatctgaccaggagaataacaagtgcccatgtttcagggacaattgctcatcagcccattttgggttgaattcacccaaaggcaacttgaggggcattggggcattgagtaaaagcagagaaaaaactggcatgggaccagtcaaacttgtccaggcccaggactgcgacctgctcagaatggtcctgttggacccacagagtcaggggagatcagaacattggaagatggcctgtcagtcgttctattgtcaggctgtgtgaaagatgagagagggtttacagccatcatggccacagatcgagcgttgaggtaatttcttaactgacctgctgaggaaacccgacagcatttgtagcccagaaacatccatttttaaccacacttcagggatcgggaagcccaggccagggtagaaagtttgaaaggagagtttttccctctcttttcaagaaaactgtcctttcttttgtctcctctttttattttctgccctttttctcccaggattcatctttcttttttctttgtctctctccctccactataaagtattaacctgcgatagtatttataggaaacttttttaagtcactgaaccagagagaaatgtctagtactgaagacatctaagattttcaaagtctgagtgtatttttctgccagataccacaatagaacaaatgagagtaatctctgaccttgccgtgtgctgacttttaggaataccacattgtgaagaagtctacccgctccttaagcacgactcaggtggaatctccttggaggctcattcggccatccgtcatctcgatcattgggttgtacaaagaaaaaggcaaggtgagctcttttctgcagactgttctgccttctgggtgaatcttagcacacattcacacatgttctttaaatggttactttttatttgtctttacatgaaatgaaaagtaacaggtataaagaaggaccgctaaagtggcctctgtatggattcaagtggattccctggcattctgtaccataggtctcagtgtgagatggccatgccctctttgctcctacgatgtaaggagtcaccagcacttggctgctagggccagaaccaagggtgcaatgaatgaccctcaacttttacctccagtgaaagaaaagcagagcctgcagcttcagggagtacccttggttatccttttgaatgaatttcatggcgttgccattatcataaaggaaatgatatgaataacttgacattacacaaaaatcaaaatattcattttgatattatacaaaatggaaagactaaaacaaaagaaaacaaatgtggcacctgcatgtaagtgggaaatgactcttaagagctatttaaactttttcccttaatgtaatgcatggctagtgcagcgtaaatagatcggaggaggggaataaggaagagaacacaaacttgagtttgcagctagttgcttagtttaactccaggcctggttagggagggcacttcagttaaatactacaatgggacagatgccttcagttaaatactacaatgggaaagatgccctcagttaaataccacactgtcaacctggactctcatctgcttcggatctagggccttggctttagtattgctggaggtcgagactgcattcgtggacagatggggatttttgtcaagaccatcttcccaaatggatcagctgcagaggacggaagacttaaagaaggtaggggaaagcctcttgtatcctcagtgacagtgactttgatcccatgagaatctgcctcttcacaagatgtgagtgaatgccacagtacctagtagacctcggcggaatctgcctttctgttggggtctttagtgtctatcttgtcaacttggtctgatcatgttcctttccctgaaaattttgagagtttggggtccattcttaccttagggctggtgtggaagcagagcgcctggtcattagtggatatttaatatcttgctacagaaatcaaccaccacatagtctggttcctaaatgaacatcctaaatgaacatcttttaattctcaatagcacctgccattttgccatatgcgaatatactagacaagtgcttctgaatgcaaattaaagtaatattgaggtgccaagttctaccttgccaccttacttgagaaaataaaatataaataggccaaagtttcctttctgtacagacacaatagctgcttttgatagaatatctagaatagatatacatatctttatattttctgtgaaatgtttatctggattaagattatatactttttataaagaagaattgcccagaagttctgaacacacacacaggtatatacatatatatatttattttattgtactttaatgcacatattttaaatagcattcaccagagcatgaatcccgattttttcctctcacttattaatatacttccttcttgaaatatttaaagtagaatatttttagttatcttcaaaaatgctgtgactgttcagttcaattgacctaaacttcaggtgcttttgtgttatacgggttctttttttggaactgatgagaatgaattggaatctcctattttttaggcagagcaaccatcgaaccctgtatgctaacaataagacatgaccaggcttcattctcccacggcagaatatttatttctgtctcttagaggaagggttaactcccaggtggtgtttgtgttgagttttagaacaatataaaattctaacagagcatttttataatggatgtgccatgtgttcacttaattgaaactcatcctgcaaggctggtaaaatggagcaaaacggggaaaaaaaatcaatagttaagaaaggttaatagcacttgattctcctaaatagcgttttttcatatgtgttcatttacaagaaacgtaagtcattggaatggatttcaacctgttgagtgatacttctttaaaaaactttgcatacattttaagagtgcgagtaatcattttaatatttgctccttttcccctatggaaacaacctaaaaacatccacctcctcacctaattgagtaattggttatgccagatttttaaacagagattacttcacttattttatagcttctataattgcattaaggggaagccacataacaaatgcatggggcacagctacatttttgtaactcatctacaggattccttgaattgtgcacacagtgtgctcctgggattggctgtctgcgagaggtgacaatgtgtgttcttatgctgctttgcactttcttataggcgtacagagtccctcttctctacagcaatgctgtgcaaagttcatctgttcttctctctggggcatctttgtagtgtttttgatgaactgttattccaaaaaagcaggccatgtcacaagagtgcaaaccagaaacgagctctgataagtcaacaggatgtccaagttcttttatattcctagcagacgctatcaacagcttgaaaaacgacctgactgtgccgccttagagttaaaaataataggagagctggggcagggggccatgtgcgagcatattcctgcacatgcctggcaaattaacatgaccctgcagtcatctctgagatagaagcttatagtaaacttgccagcttactgacagagaacctggaactgcatcagcaagattatttttgtttttttttagtaaaaaaaagactgtttctgggctgccattgctcagtaatattttagcaagtttttgttatcattaaagccattttccatacaccatgctgattctctgtgcttggggaacttgtctttctacaaatataggagtgacttctcaaatgttgtatgtgttcatgcctcattgccagtgggtttaagtttttaaacaatgactatgaggaacgcctttgaactagatttctgcagtttgatttcgaaacataggacatctgttgtcaaacttggcaatggctaaaaaaataagattttcatgcttcccatagttattttaattgaagattgaaatacagaattactgcaaaagaatatgtgttgtcattaattgtcccattttgtgacattcctgggagctaagctaaacaataaaagttattttatgtggtagtaaatcagggaccatatggtatcccaaaataagtctgactgagcagttaaattccaggaaattaaaggctaatgttaatgtaattctcacatttgatcactaggggatgaaatcctagatgtaaatggaataccaataaagggcttgacatttcaagaagccattcatacctttaaggtaacaacattcttattgatctcctttatcctattttcctttctttatttccttctggcttgggtttggtgagttgttttttttttttaaccctttgatataaggacattccaaatgtttcagcccacctttcctcactgttttctcagcaaatccggagtggattatttgttttaacggtacgcacaaagttggtgagccccagcctcacaccctgctcgacacccacacacatgagcagatccgcctccccgaacttcaataccagtgggggagcctcagcgggaggttccgatgaaggcagttcttcatccctgggtcggaagacccctgggcccaaggacaggatcgtcatggaagtaacactcaacaaaggtgatagcagctattccttacctttgtctcatttcttgaataacattttggaatctgttgttagcttaattcttccttgttgttctatgaattattcctttggtacaatcttctatcaacaacacgtggtctctgcatgggacagtgaggtcaggtagagagatgttagtcactttagtcaaagtgaagggaagttaccagtagcatggagctctctaagctctccccatgaatcactgtgggtcagaggcttgtgttta

SEQ ID NO: 5071 - protein, 209 aa, Homo sapiens [sequence omitted]

SEQ ID NO: 5072 - DNA, 2273 bp, Homo sapiens
actgggctagcttcatatcagatttacttgttaagtgactgttttggaatgtttacttttggactgggtttgtaacacggttaaaggcaatgagaaacaagcagaattccaggagtccttgaagcagagggcactggaagacaatatagcagattaaaatagcacagctcatgtggcataggtgggtattttagatgtttgagtaaatttgaaagagtatgatgtttaaattacctttagcaacatgttcatctgctatgctgtcatgactagggggatgattattagtcacatagagcttgggagtaccactggaaacgtatgggtaggagtttaggtggcttctgtttttcaaaagatgatcttatcctagtatctgtaatgctcacttggcacacctgacttgtgggcggatcacaaggtcaagagatcgagatcaccctggcccacatggtgagaccccaactctactaaaaatacaaaaattagctgggtgtggtggcatgtgccattggcttgagcccaagagtttgagaccagcctgggcaacctggtgaaacctcttctccattaaaaatacaaaaaattagccaggcatggtggtatgtgcctgtagtcccagctactcagggagctgaggtggaaggattgcttgagcctgggaggtcaaggctgcagtgaaccttgattgtgccactgcactccagcctggatgacaaagaccctgtctcaagaaaagtctgtaattctttcctaacccttagtatccagcctcagtcctgaggttttctttacctctgggggctattttatgccggctctctcctgagtgtcacacatctggtcctcaggaaacattctcacatccctggcctgaaaaaaacaatttcagggagatcgcatggcagcagccctctctgggctccccagctaaatggttgtacgaaacacatttcaaagctctctgaagggcttccttgaagttcctttcactgggtttcaaagtagaaggtagtaactcctttgtccaagaaggctgaattgagcacttaacaattctccaaagaaatttcttcattggtctctatcctagaccccttctgtatccttgatatggctgaggattctaaaaaatgaccagtcttacatgggagggctgggatataaaaaataaaataataaataatgataaaaactgaaaactgaccacgttcttggatatgttttctttgggttgtgtgtgtgtgtgagacttttgatagttacccaaagtaggaaaaatcccattctaataaggttatatttatgtagctctgcaaataaacatctagcaaatgtaaaaagtattttctttgccttaaaaatgattaaaattatttgaactcctgaggagtgttatatgaataaaattagtaagttatttggaggaaagttattttttaaaaagacaactggtaaaacagtacaggagaaaggccagcttcctcaagtgaggacagttgtttagaattgactgaggagcggccgggtgcggaggctcacatctgtaatcccacacgccttgggaggctctgaggcgggtagatcacctgaggtcaggagtttgagaccagcctggccaacatggcgaaaccccgtctccactaaaaatacaaaaattagccaggtgcagtggcacacacctgtaatcccagctactccgaaggctgaggcaggaggatcacctgagcccaggaagttgagactgcagtgagctgagattgcaccactgcactccagcctcagtgacagcgagactgtctcaaaaaaagaaaaaagtgactgaggaggaagaggccaggtggcaaatggaacagaatcaccaaagggtgaacaggactaaggcaatgtagtgtatggctcagctacgtcagagtggaaaaggtgttattagagcagaaactatggtccctgcgtcacagggaagcaacctacagagaagcagcagctccccaagagaggagagataagaagccagaagcctcagagtgaacaattgtcctattagggattgctctagagagagaaacctctgggaacgtacccctgtgaggcagcacagcacaatgcttttagaattgtatgagagttgatatatctccatttgttttgcaaaggcaaaaactaagatacagagattatctgttaaagttatgtatttctttggtaataaagatgctgacagtgttgctggaatgcatttctttaataaagatattgtacaatgaaatact

SEQ ID NO: 5073 - protein, 49 aa, Homo sapiens
MRVDISPFVLQRQKLRYRDYLLKLCISLVIKMLTVLLECISLIKILYNE

SEQ ID NO: 5074 - DNA, 8041 bp, Homo sapiens
cagaagcgagatggtgagttgtgactgtggtgtttgtgaatcgcgttccatcctcgtcctttgtgcctctctgtttgctgtgcttggggggctggcaagattccggataaggggaactggtgggctggaaagaggcatgcggtggccctcaagagccagaagaatgactgctaactggtgcctgggggacctatcccgccgtaattgtggtgctagagccgcattgtgtcctttgcctcggtccaacctttggagacctttcacggctctagccttggttgggagccgagggaaggagtttgggaatgtttggctctgtgtaacaatgaaataattcattggtgatgctctctggccggagtctgtaaagataaggtgcatttcagaacattgcaactcttgcggagggttttaggtaacgtgaaatgcgggtagtggtctctgacttggcattcgtggaaagaggcttctcccgcagtttcgatctttacgattgcctttaaattttatcagtaattggtttcccggagaactcgagtaaatctagaagttgccaggtttcagaactatttattcctttaatgtgcagacgaagggaacgtcatcgtttggaaagcgtcgcaataagacgcacacgttgtgccgccgctgtggctctaaggcctaccaccttcagaagtcgacctgtggcaaatgtggctaccctgccaagcgcaagagaaagtgcatggattccgtgaaggaacaacacctaaacccaagagggcagctgttgcagcatccagttcatcttaagaatgtcaacgattagtcatgcaataaatgttctggttttaaaaaatacatatctggttttggtaaggtatttttaatcaattaggcttgtagtatcagtgaaatactgtaggtttagggactgggctagcttcatatcagatttacttgttaagtgactgttttggaatgtttacttttggactgggtttgtaacacggttaaaggcaatgagaaacaagcagaattccaggagtccttgaagcagagggcactggaagacaatatagcagattaaaatagcacagctcatgtggcataggtgggtattttagatgtttgagtaaatttgaaagagtatgatgtttaaattacctttagcaacatgttcatctgctatgctgtcatgactagggggatgattattagtcacatagagcttgggagtaccactggaaacgtatgggtaggagtttaggtggcttctgtttttcaaaagatgatcttatcctagtatctgtaatgctcacttggcacacctgacttgtgggctgtgtgtaaggtggctagctaagtgaaaaaagcctgctaggtgtgagtcaacttaagaatatgtaaataggtttgagaaaaagtagggcttgggtgcaagtaaagattgagcaggaaataaaggaaaatcaagtataatccctgagatttgtagactaaaggcaatgatgtgggactacttggtcgaatttttttagccctcaacttggtaattgggtgtttctgtgttaaagcactgaaacttgctgtcgtgccttcctagttttcgtggtttattgacagggttgggggttttttttgtttttttaaaatgaagggacaaagtcaactggactgctgagtgagagggcaggggcagttgaagggaacatgaattgctggaacagctacataaaatagtgatgtagccaagtcatgctatttaaattataattctccactgtgtttagaataacatctgaggttcttaacctggccttggaagggtatcacttttacttgtaacctggaatggctttataatgtgctagctaattgctactctcatcttgtattttaactcctaatttacccttcaggtctcagcttcagaacattcacttataaagaaaccctgctgattaaatctctcttgggcttcctcccgaaatgtgagactatactttaaagatgtatggttagagtccaattgccattgcctttcttgtttacagatagtgcaatggcgcaatcctggctcactgcagcctctaattcctgggctcaagtcaagtggttctcctgcctcagccttctgagtagctgggactacagatgcacaccaccacacctggctaatttttgtgttttttgtagagatggagattcactcgactaattctttttgtattcttagtagagactgggtttcaacatgttgaccaggctggtctcgaactcgacctcgtgatccgccgcctcggcctcccaaagtgctaggattacaggcgtgagccaccactcccggctgtcatcatcaaattttcaagtgaagatagtctgttgaagattgaacaatgaccttgaaagacagctgagttgctgtgggtataatgtaaagctggtgaagtttggccagtttgggcttcagaagtctaagtctagtgaaggtaccctgacccccatataaacaacccttgaggccggtgtggtggctcacggctgtaatcctggcactttgggaggccgaggtgggcggatcacaaggtcaagagatcgagatcaccctggcccacatggtgagaccccaactctactaaaaatacaaaaattagctgggtgtggtggcatgtgcctgtagtcttagctacttgagaggctgaggcaggagaatcgcttgaacctgggaggcagaggttgcagtgagctgagatcatgccactgtgctccagcctggtggcacagtgagactccacctcaaaaaaaaaaaaaaatccttgaactaatgactcaaattttcaaatgaaacaaaataagcagtggatcttgcattggagatggagttaaactatgttgcccaggctggtcttggactcctggtttcaagtgatcctctcatcttggcctcccaaagtgctgggattacagggacgagccaccacaccccacctattgtctatatttctatctttaacagcacttcagtcctgccttaagttatagttatgtatagatacccattatactttaaatttttcagcagaaattatgcttttatcttctctgcagtgttatatgttggtgtgcaaaaatgttaaatttatttttcctaagtaccccatctgcttttcaactctgtcctctgcctgaaaagcctccctccagcccctacttccctcccatcttagttcacaaagtcaggttgatttgcccccagctgtcaaagcagactacctgtttccacatgtaactggttatgttctgtaaagttacaaaaatagaaaggttgaatctgtggcggccgggtacggtagctcacgtcctatagtcgcagcactttgggaggccaaggtgggcagttcacgtgaggtggggagttcgagaccagcctgaccaacatggagaaaccccgtctctactaaaaatacaaaaatattagccgggcgtggtggtgcatgcctgtaatcccagctactagggaggctgaggcaggagaattgcttgaacctgggagacggaggttgcggtgagctgcagaggcctcacctctaattgagacacaattatatattgttgatatatatatatatatatatacacacacacacacacactatgatggataaatgcatgagtttctgtgagagcattggaaaggagtttgtcactcaataggtgaagccaggctaagatttaagctgagccagggaggacttgaaggaatcatgatgagagagaaggtaagtggctttgccagcaatgaaacagctgacataatggtaaccagtcagaggagggcataactatgaaactggacaccttggttgtcaggttagaaggatggggtgtagggttggtaagaaaagaattcagggaagagcagcgatcagattatgaagaatttgtcttgagaaattacagaggatttaaaccagaatgttaggaatagttattctagcaagatgaatgtggaaagtgttagtgtgcatgtgatgagtcttgaagctggaaactaggtaacaggttcttaaatagttcatgtgaaaatcatgacagactaaggcagtggctgtggggctgtccgggagttctctacagaaaacatctaaaacttgaatgtgcaagtgagtagctaacttccaagcttcccatttctgtataatttaagcatgaaaatgagaacactgagatttgataggcatgtagaagtcagagtaagcaagagggcttgagttcatcgatgaacttcagtaactatccttgacttagtattggtggaaaccatttgtgaatttacagactccaaaaacaaaaagataatttagagtctcaaagtaagatttggggagatgtccattggagacagaagtggagagagggagaagttcatttgttgacatatttatgtatggtgcacctactgtgtgccaagccatgttagagatacagtgggagcaaaaccagatgtgttttctgccctctgactccagtggttgcagaattagcccaggaactagaattggatggagtcacacaaaccaaggaaggggattgtttgaggggggcactcagtcacatgtggctgaggccaaagagaatgaagatatattttaaaattctggatttggcaaaatttaggctagtctttacttttcataaacctctctcatgttagagcagcaaagaaaaaccagtttgccaagaggtcacgagattgggcagtgaggaatggggagtttagtttaaaagacaacactagatacttttggaagtttacctattctgtggttcccttttattgactaaatggtgcccttcattcatgaagcaagtatctatttagtgactactatgtgtcaaaagctatctaggcccagaaacttttaagtggaaaacaaaacaaagaccctgccctgacagatttcaatcatgtatatactgtatgtatgtttgtggaaggtgacataatagacaattgcagatagtgataagtgtgtaagacaaggataccacgagcgtaatagacagtggggatggaggaacctttagaaggttggttaagttgaatgataaggagccattcttttgtctttacctgaatgacttatcattcagccctttttgagttttgggttgcttgcagagtttaaccttgcctgtaattgaaacttaattttgtaatagcataacttcatgtaagaaaagcaaagcaatacattacagaattattttactgaagaacttgtttcagagaaagaggctgtttcacatttattagcacatttggattatatttaggtgttttatttttttttaaacaaaggagtttggatcataatacaagagaagcacagggcaaagacactgcataacctcaagaactaagaatggaaggactggccaggcctggtggtgcacacctgtaatcccagctactcaggaggctgaggcgagagaatcgcttgagcctggggggcagaggttgcagtgagctgagagaacggcgggcggcagagcgagactccatctcaaaaaaaaaaaaggataaaggaaggacttaagcaaaatcttccttgtaagtagaaggatgttttgacaagaaaagttgcaatggaaaaatggttctcatgtacacgagtatgtagaataagcatcgtgtgtggattggattcagatcaaaacattgcttttatgtttgtgtctttatacggtgggagtataccctggtgccccaggatgaagacttgacctgacccatgtatttttagattactcacagataacaaaaagtattttcatcatgattagttgcgaaaacagttttatttcaataggtaaaacgtgcagtcctatgtaatcgtcagaaggtaatcttaattatagcttgggtgtgctttaaactgcaagctggcagtggagggcacgattcctctgatttcagctttctccttatacttttctggagctgtgagctgcaagttaactcagtgggattaaagtgtagactggaggtacaaaaggtgaggagtgaggagatagggtagttcttccttggctggctggcttcataatccctgggccccgcagataattaaatcgactttttctgtctcaggcatttgtatgacctctttggaggttccctgctgggtagttatccttgtatctgatggacccatctcaatttaaaatactctgccaggttcggaggttcatgcttgtcatcccagcactttgggaggctcagaggtgccattggcttgagcccaagagtttgagaccagcctgggcaacctggtgaaacctcttctccattaaaaatacaaaaaattagccaggcatggtggtatgtgcctgtagtcccagctactcagggagctgaggtggaaggattgcttgagcctgggaggtcaaggctgcagtgaaccttgattgtgccactgcactccagcctggatgacaaagaccctgtctcaagaaaagtctgtaattctttcctaacccttagtatccagcctcagtcctgaggttttctttacctctgggggctattttatgccggctctctcctgagtgtcacacatctggtcctcaggaaacattctcacatccctggcctgaaaaaaacaatttcagggagatcgcatggcagcagccctctctgggctccccagctaaatggttgtacgaaacacatttcaaagctctctgaagggcttccttgaagttcctttcactgggtttcaaagtagaaggtagtaactcctttgtccaagaaggctgaattgagcacttaacaattctccaaagaaatttcttcattggtctctatcctagaccccttctgtatccttgatatggctgaggattctaaaaaatgaccagtcttacatgggagggctgggatataaaaaataaaataataaataatgataaaaactgaaaactgaccacgttcttggatatgttttctttgggttgtgtgtgtgtgtgagacttttgatagttacccaaagtaggaaaaatcccattctaataaggttatatttatgtagctctgcaaataaacatctagcaaatgtaaaaagtattttctttgccttaaaaatgattaaaattatttgaactcctgaggagtgttatatgaataaaattagtaagttatttggaggaaagttattttttaaaaagacaactggtaaaacagtacaggagaaaggccagcttcctcaagtgaggacagttgtttagaattgactgaggagcggccgggtgcggaggctcacatctgtaatcccacacgccttgggaggctctgaggcgggtagatcacctgaggtcaggagtttgagaccagcctggccaacatggcgaaaccccgtctccactaaaaatacaaaaattagccaggtgcagtggcacacacctgtaatcccagctactccgaaggctgaggcaggaggatcacctgagcccaggaagttgagactgcagtgagctgagattgcaccactgcactccagcctcagtgacagcgagactgtctcaaaaaaagaaaaaagtgactgaggaggaagaggccaggtggcaaatggaacagaatcaccaaagggtgaacaggactaaggcaatgtagtgtatggctcagctacgtcagagtggaaaaggtgttattagagcagaaactatggtccctgcgtcacagggaagcaacctacagagaagcagcagctccccaagagaggagagataagaagccagaagcctcagagtgaacaattgtcctattagggattgctctagagagagaaacctctgggaacgtacccctgtgaggcagcacagcacaatgcttttagaattgtatgagagttgatatatctccatttgttttgcaaaggcaaaaactaagatacagagattatctgttaaagttatgtatttctttggtaataaagatgctgacagtgttgctggaatgcatttctttaataaagatattgtacaatgaaatact

SEQ ID NO: 5075 - protein, 52 aa, Homo sapiens
MCRRRERHRLESVAIRRTRCAAAVALRPTTFRSRPVANVATLPSARESAWIP

SEQ ID NO: 5076 - DNA, 6133 bp, Homo sapiens
cagaagcgagatggtgagttgtgactgtggtgtttgtgaatcgcgttccatcctcgtcctttgtgcctctctgtttgctgtgcttggggggctggcaagattccggataaggggaactggtgggctggaaagaggcatgcggtggccctcaagagccagaagaatgactgctaactggtgcctgggggacctatcccgccgtaattgtggtgctagagccgcattgtgtcctttgcctcggtccaacctttggagacctttcacggctctagccttggttgggagccgagggaaggagtttgggaatgtttggctctgtgtaacaatgaaataattcattggtgatgctctctggccggagtctgtaaagataaggtgcatttcagaacattgcaactcttgcggagggttttaggtaacgtgaaatgcgggtagtggtctctgacttggcattcgtggaaagaggcttctcccgcagtttcgatctttacgattgcctttaaattttatcagtaattggtttcccggagaactcgagtaaatctagaagttgccaggtttcagaactatttattcctttaatgtgcagacgaagggaacgtcatcgtttggaaagcgtcgcaataagacgcacacgttgtgccgccgctgtggctctaaggcctaccaccttcagaagtcgacctgtggcaaatgtggctaccctgccaagcgcaagagaaagtataactggagtgccaaggctaaaagacgaaataccaccggaactggtcgaatgaggcaggagaatcgcttgaacctgggaggcagaggttgcagtgagctgagatcatgccactgtgctccagcctggtggcacagtgagactccacctcaaaaaaaaaaaaaaatccttgaactaatgactcaaattttcaaatgaaacaaaataagcagtggatcttgcattggagatggagttaaactatgttgcccaggctggtcttggactcctggtttcaagtgatcctctcatcttggcctcccaaagtgctgggattacagggacgagccaccacaccccacctattgtctatatttctatctttaacagcacttcagtcctgccttaagttatagttatgtatagatacccattatactttaaatttttcagcagaaattatgcttttatcttctctgcagtgttatatgttggtgtgcaaaaatgttaaatttatttttcctaagtaccccatctgcttttcaactctgtcctctgcctgaaaagcctccctccagcccctacttccctcccatcttagttcacaaagtcaggttgatttgcccccagctgtcaaagcagactacctgtttccacatgtaactggttatgttctgtaaagttacaaaaatagaaaggttgaatctgtggcggccgggtacggtagctcacgtcctatagtcgcagcactttgggaggccaaggtgggcagttcacgtgaggtggggagttcgagaccagcctgaccaacatggagaaaccccgtctctactaaaaatacaaaaatattagccgggcgtggtggtgcatgcctgtaatcccagctactagggaggctgaggcaggagaattgcttgaacctgggagacggaggttgcggtgagctgcagaggcctcacctctaattgagacacaattatatattgttgatatatatatatatatatatacacacacacacacacactatgatggataaatgcatgagtttctgtgagagcattggaaaggagtttgtcactcaataggtgaagccaggctaagatttaagctgagccagggaggacttgaaggaatcatgatgagagagaaggtaagtggctttgccagcaatgaaacagctgacataatggtaaccagtcagaggagggcataactatgaaactggacaccttggttgtcaggttagaaggatggggtgtagggttggtaagaaaagaattcagggaagagcagcgatcagattatgaagaatttgtcttgagaaattacagaggatttaaaccagaatgttaggaatagttattctagcaagatgaatgtggaaagtgttagtgtgcatgtgatgagtcttgaagctggaaactaggtaacaggttcttaaatagttcatgtgaaaatcatgacagactaaggcagtggctgtggggctgtccgggagttctctacagaaaacatctaaaacttgaatgtgcaagtgagtagctaacttccaagcttcccatttctgtataatttaagcatgaaaatgagaacactgagatttgataggcatgtagaagtcagagtaagcaagagggcttgagttcatcgatgaacttcagtaactatccttgacttagtattggtggaaaccatttgtgaatttacagactccaaaaacaaaaagataatttagagtctcaaagtaagatttggggagatgtccattggagacagaagtggagagagggagaagttcatttgttgacatatttatgtatggtgcacctactgtgtgccaagccatgttagagatacagtgggagcaaaaccagatgtgttttctgccctctgactccagtggttgcagaattagcccaggaactagaattggatggagtcacacaaaccaaggaaggggattgtttgaggggggcactcagtcacatgtggctgaggccaaagagaatgaagatatattttaaaattctggatttggcaaaatttaggctagtctttacttttcataaacctctctcatgttagagcagcaaagaaaaaccagtttgccaagaggtcacgagattgggcagtgaggaatggggagtttagtttaaaagacaacactagatacttttggaagtttacctattctgtggttcccttttattgactaaatggtgcccttcattcatgaagcaagtatctatttagtgactactatgtgtcaaaagctatctaggcccagaaacttttaagtggaaaacaaaacaaagaccctgccctgacagatttcaatcatgtatatactgtatgtatgtttgtggaaggtgacataatagacaattgcagatagtgataagtgtgtaagacaaggataccacgagcgtaatagacagtggggatggaggaacctttagaaggttggttaagttgaatgataaggagccattcttttgtctttacctgaatgacttatcattcagccctttttgagttttgggttgcttgcagagtttaaccttgcctgtaattgaaacttaattttgtaatagcataacttcatgtaagaaaagcaaagcaatacattacagaattattttactgaagaacttgtttcagagaaagaggctgtttcacatttattagcacatttggattatatttaggtgttttatttttttttaaacaaaggagtttggatcataatacaagagaagcacagggcaaagacactgcataacctcaagaactaagaatggaaggactggccaggcctggtggtgcacacctgtaatcccagctactcaggaggctgaggcgagagaatcgcttgagcctggggggcagaggttgcagtgagctgagagaacggcgggcggcagagcgagactccatctcaaaaaaaaaaaaggataaaggaaggacttaagcaaaatcttccttgtaagtagaaggatgttttgacaagaaaagttgcaatggaaaaatggttctcatgtacacgagtatgtagaataagcatcgtgtgtggattggattcagatcaaaacattgcttttatgtttgtgtctttatacggtgggagtataccctggtgccccaggatgaagacttgacctgacccatgtatttttagattactcacagataacaaaaagtattttcatcatgattagttgcgaaaacagttttatttcaataggtaaaacgtgcagtcctatgtaatcgtcagaaggtaatcttaattatagcttgggtgtgctttaaactgcaagctggcagtggagggcacgattcctctgatttcagctttctccttatacttttctggagctgtgagctgcaagttaactcagtgggattaaagtgtagactggaggtacaaaaggtgaggagtgaggagatagggtagttcttccttggctggctggcttcataatccctgggccccgcagataattaaatcgactttttctgtctcaggcatttgtatgacctctttggaggttccctgctgggtagttatccttgtatctgatggacccatctcaatttaaaatactctgccaggttcggaggttcatgcttgtcatcccagcactttgggaggctcagaggtgccattggcttgagcccaagagtttgagaccagcctgggcaacctggtgaaacctcttctccattaaaaatacaaaaaattagccaggcatggtggtatgtgcctgtagtcccagctactcagggagctgaggtggaaggattgcttgagcctgggaggtcaaggctgcagtgaaccttgattgtgccactgcactccagcctggatgacaaagaccctgtctcaagaaaagtctgtaattctttcctaacccttagtatccagcctcagtcctgaggttttctttacctctgggggctattttatgccggctctctcctgagtgtcacacatctggtcctcaggaaacattctcacatccctggcctgaaaaaaacaatttcagggagatcgcatggcagcagccctctctgggctccccagctaaatggttgtacgaaacacatttcaaagctctctgaagggcttccttgaagttcctttcactgggtttcaaagtagaaggtagtaactcctttgtccaagaaggctgaattgagcacttaacaattctccaaagaaatttcttcattggtctctatcctagaccccttctgtatccttgatatggctgaggattctaaaaaatgaccagtcttacatgggagggctgggatataaaaaataaaataataaataatgataaaaactgaaaactgaccacgttcttggatatgttttctttgggttgtgtgtgtgtgtgagacttttgatagttacccaaagtaggaaaaatcccattctaataaggttatatttatgtagctctgcaaataaacatctagcaaatgtaaaaagtattttctttgccttaaaaatgattaaaattatttgaactcctgaggagtgttatatgaataaaattagtaagttatttggaggaaagttattttttaaaaagacaactggtaaaacagtacaggagaaaggccagcttcctcaagtgaggacagttgtttagaattgactgaggagcggccgggtgcggaggctcacatctgtaatcccacacgccttgggaggctctgaggcgggtagatcacctgaggtcaggagtttgagaccagcctggccaacatggcgaaaccccgtctccactaaaaatacaaaaattagccaggtgcagtggcacacacctgtaatcccagctactccgaaggctgaggcaggaggatcacctgagcccaggaagttgagactgcagtgagctgagattgcaccactgcactccagcctcagtgacagcgagactgtctcaaaaaaagaaaaaagtgactgaggaggaagaggccaggtggcaaatggaacagaatcaccaaagggtgaacaggactaaggcaatgtagtgtatggctcagctacgtcagagtggaaaaggtgttattagagcagaaactatggtccctgcgtcacagggaagcaacctacagagaagcagcagctccccaagagaggagagataagaagccagaagcctcagagtgaacaattgtcctattagggattgctctagagagagaaacctctgggaacgtacccctgtgaggcagcacagcacaatgcttttagaattgtatgagagttgatatatctccatttgttttgcaaaggcaaaaactaagatacagagattatctgttaaagttatgtatttctttggtaataaagatgctgacagtgttgctggaatgcatttctttaataaagatattgtacaatgaaatact

SEQ ID NO: 5077 - protein, 65 aa, Homo sapiens
MCRRRERHRLESVAIRRTRCAAAVALRPTTFRSRPVANVATLPSARESITGVPRLKDEIPPELVE

SEQ ID NO: 5078 - DNA, 8062 bp, Homo sapiens
cagaagcgagatggtgagttgtgactgtggtgtttgtgaatcgcgttccatcctcgtcctttgtgcctctctgtttgctgtgcttggggggctggcaagattccggataaggggaactggtgggctggaaagaggcatgcggtggccctcaagagccagaagaatgactgctaactggtgcctgggggacctatcccgccgtaattgtggtgctagagccgcattgtgtcctttgcctcggtccaacctttggagacctttcacggctctagccttggttgggagccgagggaaggagtttgggaatgtttggctctgtgtaacaatgaaataattcattggtgatgctctctggccggagtctgtaaagataaggtgcatttcagaacattgcaactcttgcggagggttttaggtaacgtgaaatgcgggtagtggtctctgacttggcattcgtggaaagaggcttctcccgcagtttcgatctttacgattgcctttaaattttatcagtaattggtttcccggagaactcgagtaaatctagaagttgccaggtttcagaactatttattcctttaatgtgcagacgaagggaacgtcatcgtttggaaagcgtcgcaataagacgcacacgttgtgccgccgctgtggctctaaggcctaccaccttcagaagtcgacctgtggcaaatgtggctaccctgccaagcgcaagagaaagtataactggagtgccaaggctaaaagacgaaataccaccggaaaacacctaaacccaagagggcagctgttgcagcatccagttcatcttaagaatgtcaacgattagtcatgcaataaatgttctggttttaaaaaatacatatctggttttggtaaggtatttttaatcaattaggcttgtagtatcagtgaaatactgtaggtttagggactgggctagcttcatatcagatttacttgttaagtgactgttttggaatgtttacttttggactgggtttgtaacacggttaaaggcaatgagaaacaagcagaattccaggagtccttgaagcagagggcactggaagacaatatagcagattaaaatagcacagctcatgtggcataggtgggtattttagatgtttgagtaaatttgaaagagtatgatgtttaaattacctttagcaacatgttcatctgctatgctgtcatgactagggggatgattattagtcacatagagcttgggagtaccactggaaacgtatgggtaggagtttaggtggcttctgtttttcaaaagatgatcttatcctagtatctgtaatgctcacttggcacacctgacttgtgggctgtgtgtaaggtggctagctaagtgaaaaaagcctgctaggtgtgagtcaacttaagaatatgtaaataggtttgagaaaaagtagggcttgggtgcaagtaaagattgagcaggaaataaaggaaaatcaagtataatccctgagatttgtagactaaaggcaatgatgtgggactacttggtcgaatttttttagccctcaacttggtaattgggtgtttctgtgttaaagcactgaaacttgctgtcgtgccttcctagttttcgtggtttattgacagggttgggggttttttttgtttttttaaaatgaagggacaaagtcaactggactgctgagtgagagggcaggggcagttgaagggaacatgaattgctggaacagctacataaaatagtgatgtagccaagtcatgctatttaaattataattctccactgtgtttagaataacatctgaggttcttaacctggccttggaagggtatcacttttacttgtaacctggaatggctttataatgtgctagctaattgctactctcatcttgtattttaactcctaatttacccttcaggtctcagcttcagaacattcacttataaagaaaccctgctgattaaatctctcttgggcttcctcccgaaatgtgagactatactttaaagatgtatggttagagtccaattgccattgcctttcttgtttacagatagtgcaatggcgcaatcctggctcactgcagcctctaattcctgggctcaagtcaagtggttctcctgcctcagccttctgagtagctgggactacagatgcacaccaccacacctggctaatttttgtgttttttgtagagatggagattcactcgactaattctttttgtattcttagtagagactgggtttcaacatgttgaccaggctggtctcgaactcgacctcgtgatccgccgcctcggcctcccaaagtgctaggattacaggcgtgagccaccactcccggctgtcatcatcaaattttcaagtgaagatagtctgttgaagattgaacaatgaccttgaaagacagctgagttgctgtgggtataatgtaaagctggtgaagtttggccagtttgggcttcagaagtctaagtctagtgaaggtaccctgacccccatataaacaacccttgaggccggtgtggtggctcacggctgtaatcctggcactttgggaggccgaggtgggcggatcacaaggtcaagagatcgagatcaccctggcccacatggtgagaccccaactctactaaaaatacaaaaattagctgggtgtggtggcatgtgcctgtagtcttagctacttgagaggctgaggcaggagaatcgcttgaacctgggaggcagaggttgcagtgagctgagatcatgccactgtgctccagcctggtggcacagtgagactccacctcaaaaaaaaaaaaaaatccttgaactaatgactcaaattttcaaatgaaacaaaataagcagtggatcttgcattggagatggagttaaactatgttgcccaggctggtcttggactcctggtttcaagtgatcctctcatcttggcctcccaaagtgctgggattacagggacgagccaccacaccccacctattgtctatatttctatctttaacagcacttcagtcctgccttaagttatagttatgtatagatacccattatactttaaatttttcagcagaaattatgcttttatcttctctgcagtgttatatgttggtgtgcaaaaatgttaaatttatttttcctaagtaccccatctgcttttcaactctgtcctctgcctgaaaagcctccctccagcccctacttccctcccatcttagttcacaaagtcaggttgatttgcccccagctgtcaaagcagactacctgtttccacatgtaactggttatgttctgtaaagttacaaaaatagaaaggttgaatctgtggcggccgggtacggtagctcacgtcctatagtcgcagcactttgggaggccaaggtgggcagttcacgtgaggtggggagttcgagaccagcctgaccaacatggagaaaccccgtctctactaaaaatacaaaaatattagccgggcgtggtggtgcatgcctgtaatcccagctactagggaggctgaggcaggagaattgcttgaacctgggagacggaggttgcggtgagctgcagaggcctcacctctaattgagacacaattatatattgttgatatatatatatatatatatacacacacacacacacactatgatggataaatgcatgagtttctgtgagagcattggaaaggagtttgtcactcaataggtgaagccaggctaagatttaagctgagccagggaggacttgaaggaatcatgatgagagagaaggtaagtggctttgccagcaatgaaacagctgacataatggtaaccagtcagaggagggcataactatgaaactggacaccttggttgtcaggttagaaggatggggtgtagggttggtaagaaaagaattcagggaagagcagcgatcagattatgaagaatttgtcttgagaaattacagaggatttaaaccagaatgttaggaatagttattctagcaagatgaatgtggaaagtgttagtgtgcatgtgatgagtcttgaagctggaaactaggtaacaggttcttaaatagttcatgtgaaaatcatgacagactaaggcagtggctgtggggctgtccgggagttctctacagaaaacatctaaaacttgaatgtgcaagtgagtagctaacttccaagcttcccatttctgtataatttaagcatgaaaatgagaacactgagatttgataggcatgtagaagtcagagtaagcaagagggcttgagttcatcgatgaacttcagtaactatccttgacttagtattggtggaaaccatttgtgaatttacagactccaaaaacaaaaagataatttagagtctcaaagtaagatttggggagatgtccattggagacagaagtggagagagggagaagttcatttgttgacatatttatgtatggtgcacctactgtgtgccaagccatgttagagatacagtgggagcaaaaccagatgtgttttctgccctctgactccagtggttgcagaattagcccaggaactagaattggatggagtcacacaaaccaaggaaggggattgtttgaggggggcactcagtcacatgtggctgaggccaaagagaatgaagatatattttaaaattctggatttggcaaaatttaggctagtctttacttttcataaacctctctcatgttagagcagcaaagaaaaaccagtttgccaagaggtcacgagattgggcagtgaggaatggggagtttagtttaaaagacaacactagatacttttggaagtttacctattctgtggttcccttttattgactaaatggtgcccttcattcatgaagcaagtatctatttagtgactactatgtgtcaaaagctatctaggcccagaaacttttaagtggaaaacaaaacaaagaccctgccctgacagatttcaatcatgtatatactgtatgtatgtttgtggaaggtgacataatagacaattgcagatagtgataagtgtgtaagacaaggataccacgagcgtaatagacagtggggatggaggaacctttagaaggttggttaagttgaatgataaggagccattcttttgtctttacctgaatgacttatcattcagccctttttgagttttgggttgcttgcagagtttaaccttgcctgtaattgaaacttaattttgtaatagcataacttcatgtaagaaaagcaaagcaatacattacagaattattttactgaagaacttgtttcagagaaagaggctgtttcacatttattagcacatttggattatatttaggtgttttatttttttttaaacaaaggagtttggatcataatacaagagaagcacagggcaaagacactgcataacctcaagaactaagaatggaaggactggccaggcctggtggtgcacacctgtaatcccagctactcaggaggctgaggcgagagaatcgcttgagcctggggggcagaggttgcagtgagctgagagaacggcgggcggcagagcgagactccatctcaaaaaaaaaaaaggataaaggaaggacttaagcaaaatcttccttgtaagtagaaggatgttttgacaagaaaagttgcaatggaaaaatggttctcatgtacacgagtatgtagaataagcatcgtgtgtggattggattcagatcaaaacattgcttttatgtttgtgtctttatacggtgggagtataccctggtgccccaggatgaagacttgacctgacccatgtatttttagattactcacagataacaaaaagtattttcatcatgattagttgcgaaaacagttttatttcaataggtaaaacgtgcagtcctatgtaatcgtcagaaggtaatcttaattatagcttgggtgtgctttaaactgcaagctggcagtggagggcacgattcctctgatttcagctttctccttatacttttctggagctgtgagctgcaagttaactcagtgggattaaagtgtagactggaggtacaaaaggtgaggagtgaggagatagggtagttcttccttggctggctggcttcataatccctgggccccgcagataattaaatcgactttttctgtctcaggcatttgtatgacctctttggaggttccctgctgggtagttatccttgtatctgatggacccatctcaatttaaaatactctgccaggttcggaggttcatgcttgtcatcccagcactttgggaggctcagaggtgccattggcttgagcccaagagtttgagaccagcctgggcaacctggtgaaacctcttctccattaaaaatacaaaaaattagccaggcatggtggtatgtgcctgtagtcccagctactcagggagctgaggtggaaggattgcttgagcctgggaggtcaaggctgcagtgaaccttgattgtgccactgcactccagcctggatgacaaagaccctgtctcaagaaaagtctgtaattctttcctaacccttagtatccagcctcagtcctgaggttttctttacctctgggggctattttatgccggctctctcctgagtgtcacacatctggtcctcaggaaacattctcacatccctggcctgaaaaaaacaatttcagggagatcgcatggcagcagccctctctgggctccccagctaaatggttgtacgaaacacatttcaaagctctctgaagggcttccttgaagttcctttcactgggtttcaaagtagaaggtagtaactcctttgtccaagaaggctgaattgagcacttaacaattctccaaagaaatttcttcattggtctctatcctagaccccttctgtatccttgatatggctgaggattctaaaaaatgaccagtcttacatgggagggctgggatataaaaaataaaataataaataatgataaaaactgaaaactgaccacgttcttggatatgttttctttgggttgtgtgtgtgtgtgagacttttgatagttacccaaagtaggaaaaatcccattctaataaggttatatttatgtagctctgcaaataaacatctagcaaatgtaaaaagtattttctttgccttaaaaatgattaaaattatttgaactcctgaggagtgttatatgaataaaattagtaagttatttggaggaaagttattttttaaaaagacaactggtaaaacagtacaggagaaaggccagcttcctcaagtgaggacagttgtttagaattgactgaggagcggccgggtgcggaggctcacatctgtaatcccacacgccttgggaggctctgaggcgggtagatcacctgaggtcaggagtttgagaccagcctggccaacatggcgaaaccccgtctccactaaaaatacaaaaattagccaggtgcagtggcacacacctgtaatcccagctactccgaaggctgaggcaggaggatcacctgagcccaggaagttgagactgcagtgagctgagattgcaccactgcactccagcctcagtgacagcgagactgtctcaaaaaaagaaaaaagtgactgaggaggaagaggccaggtggcaaatggaacagaatcaccaaagggtgaacaggactaaggcaatgtagtgtatggctcagctacgtcagagtggaaaaggtgttattagagcagaaactatggtccctgcgtcacagggaagcaacctacagagaagcagcagctccccaagagaggagagataagaagccagaagcctcagagtgaacaattgtcctattagggattgctctagagagagaaacctctgggaacgtacccctgtgaggcagcacagcacaatgcttttagaattgtatgagagttgatatatctccatttgttttgcaaaggcaaaaactaagatacagagattatctgttaaagttatgtatttctttggtaataaagatgctgacagtgttgctggaatgcatttctttaataaagatattgtacaatgaaatact

SEQ ID NO: 5079 - protein, 64 aa, Homo sapiens
MCRRRERHRLESVAIRRTRCAAAVALRPTTFRSRPVANVATLPSARESITGVPRLKDEIPPENT

SEQ ID NO: 5080 - DNA, 7618 bp, Homo sapiens
ctgggcggaagcttctgagcgtgatatagcggaagtgccttctcttccggtctttctggtctcggccgcagaagcgagatgacgaagggaacgtcatcgtttggaaagcgtcgcaataagacgcacacgttgtgccgccgctgtggctctaaggcctaccaccttcagaagtcgacctgtggcaaatgtggctaccctgccaagcgcaagagaaagtataactggagtgccaaggctaaaagacgaaataccaccggaactggtcgaatgaggcacctaaaaattgtataccgcagattcaggcatggattccgtgaaggaacaacacctaaacccaagagggcagctgttgcagcatccagttcatcttaagaatgtcaacgattagtcatgcaataaatgttctggttttaaaaaatacatatctggttttggtaaggtatttttaatcaattaggcttgtagtatcagtgaaatactgtaggtttagggactgggctagcttcatatcagatttacttgttaagtgactgttttggaatgtttacttttggactgggtttgtaacacggttaaaggcaatgagaaacaagcagaattccaggagtccttgaagcagagggcactggaagacaatatagcagattaaaatagcacagctcatgtggcataggtgggtattttagatgtttgagtaaatttgaaagagtatgatgtttaaattacctttagcaacatgttcatctgctatgctgtcatgactagggggatgattattagtcacatagagcttgggagtaccactggaaacgtatgggtaggagtttaggtggcttctgtttttcaaaagatgatcttatcctagtatctgtaatgctcacttggcacacctgacttgtgggctgtgtgtaaggtggctagctaagtgaaaaaagcctgctaggtgtgagtcaacttaagaatatgtaaataggtttgagaaaaagtagggcttgggtgcaagtaaagattgagcaggaaataaaggaaaatcaagtataatccctgagatttgtagactaaaggcaatgatgtgggactacttggtcgaatttttttagccctcaacttggtaattgggtgtttctgtgttaaagcactgaaacttgctgtcgtgccttcctagttttcgtggtttattgacagggttgggggttttttttgtttttttaaaatgaagggacaaagtcaactggactgctgagtgagagggcaggggcagttgaagggaacatgaattgctggaacagctacataaaatagtgatgtagccaagtcatgctatttaaattataattctccactgtgtttagaataacatctgaggttcttaacctggccttggaagggtatcacttttacttgtaacctggaatggctttataatgtgctagctaattgctactctcatcttgtattttaactcctaatttacccttcaggtctcagcttcagaacattcacttataaagaaaccctgctgattaaatctctcttgggcttcctcccgaaatgtgagactatactttaaagatgtatggttagagtccaattgccattgcctttcttgtttacagatagtgcaatggcgcaatcctggctcactgcagcctctaattcctgggctcaagtcaagtggttctcctgcctcagccttctgagtagctgggactacagatgcacaccaccacacctggctaatttttgtgttttttgtagagatggagattcactcgactaattctttttgtattcttagtagagactgggtttcaacatgttgaccaggctggtctcgaactcgacctcgtgatccgccgcctcggcctcccaaagtgctaggattacaggcgtgagccaccactcccggctgtcatcatcaaattttcaagtgaagatagtctgttgaagattgaacaatgaccttgaaagacagctgagttgctgtgggtataatgtaaagctggtgaagtttggccagtttgggcttcagaagtctaagtctagtgaaggtaccctgacccccatataaacaacccttgaggccggtgtggtggctcacggctgtaatcctggcactttgggaggccgaggtgggcggatcacaaggtcaagagatcgagatcaccctggcccacatggtgagaccccaactctactaaaaatacaaaaattagctgggtgtggtggcatgtgcctgtagtcttagctacttgagaggctgaggcaggagaatcgcttgaacctgggaggcagaggttgcagtgagctgagatcatgccactgtgctccagcctggtggcacagtgagactccacctcaaaaaaaaaaaaaaatccttgaactaatgactcaaattttcaaatgaaacaaaataagcagtggatcttgcattggagatggagttaaactatgttgcccaggctggtcttggactcctggtttcaagtgatcctctcatcttggcctcccaaagtgctgggattacagggacgagccaccacaccccacctattgtctatatttctatctttaacagcacttcagtcctgccttaagttatagttatgtatagatacccattatactttaaatttttcagcagaaattatgcttttatcttctctgcagtgttatatgttggtgtgcaaaaatgttaaatttatttttcctaagtaccccatctgcttttcaactctgtcctctgcctgaaaagcctccctccagcccctacttccctcccatcttagttcacaaagtcaggttgatttgcccccagctgtcaaagcagactacctgtttccacatgtaactggttatgttctgtaaagttacaaaaatagaaaggttgaatctgtggcggccgggtacggtagctcacgtcctatagtcgcagcactttgggaggccaaggtgggcagttcacgtgaggtggggagttcgagaccagcctgaccaacatggagaaaccccgtctctactaaaaatacaaaaatattagccgggcgtggtggtgcatgcctgtaatcccagctactagggaggctgaggcaggagaattgcttgaacctgggagacggaggttgcggtgagctgcagaggcctcacctctaattgagacacaattatatattgttgatatatatatatatatatatacacacacacacacacactatgatggataaatgcatgagtttctgtgagagcattggaaaggagtttgtcactcaataggtgaagccaggctaagatttaagctgagccagggaggacttgaaggaatcatgatgagagagaaggtaagtggctttgccagcaatgaaacagctgacataatggtaaccagtcagaggagggcataactatgaaactggacaccttggttgtcaggttagaaggatggggtgtagggttggtaagaaaagaattcagggaagagcagcgatcagattatgaagaatttgtcttgagaaattacagaggatttaaaccagaatgttaggaatagttattctagcaagatgaatgtggaaagtgttagtgtgcatgtgatgagtcttgaagctggaaactaggtaacaggttcttaaatagttcatgtgaaaatcatgacagactaaggcagtggctgtggggctgtccgggagttctctacagaaaacatctaaaacttgaatgtgcaagtgagtagctaacttccaagcttcccatttctgtataatttaagcatgaaaatgagaacactgagatttgataggcatgtagaagtcagagtaagcaagagggcttgagttcatcgatgaacttcagtaactatccttgacttagtattggtggaaaccatttgtgaatttacagactccaaaaacaaaaagataatttagagtctcaaagtaagatttggggagatgtccattggagacagaagtggagagagggagaagttcatttgttgacatatttatgtatggtgcacctactgtgtgccaagccatgttagagatacagtgggagcaaaaccagatgtgttttctgccctctgactccagtggttgcagaattagcccaggaactagaattggatggagtcacacaaaccaaggaaggggattgtttgaggggggcactcagtcacatgtggctgaggccaaagagaatgaagatatattttaaaattctggatttggcaaaatttaggctagtctttacttttcataaacctctctcatgttagagcagcaaagaaaaaccagtttgccaagaggtcacgagattgggcagtgaggaatggggagtttagtttaaaagacaacactagatacttttggaagtttacctattctgtggttcccttttattgactaaatggtgcccttcattcatgaagcaagtatctatttagtgactactatgtgtcaaaagctatctaggcccagaaacttttaagtggaaaacaaaacaaagaccctgccctgacagatttcaatcatgtatatactgtatgtatgtttgtggaaggtgacataatagacaattgcagatagtgataagtgtgtaagacaaggataccacgagcgtaatagacagtggggatggaggaacctttagaaggttggttaagttgaatgataaggagccattcttttgtctttacctgaatgacttatcattcagccctttttgagttttgggttgcttgcagagtttaaccttgcctgtaattgaaacttaattttgtaatagcataacttcatgtaagaaaagcaaagcaatacattacagaattattttactgaagaacttgtttcagagaaagaggctgtttcacatttattagcacatttggattatatttaggtgttttatttttttttaaacaaaggagtttggatcataatacaagagaagcacagggcaaagacactgcataacctcaagaactaagaatggaaggactggccaggcctggtggtgcacacctgtaatcccagctactcaggaggctgaggcgagagaatcgcttgagcctggggggcagaggttgcagtgagctgagagaacggcgggcggcagagcgagactccatctcaaaaaaaaaaaaggataaaggaaggacttaagcaaaatcttccttgtaagtagaaggatgttttgacaagaaaagttgcaatggaaaaatggttctcatgtacacgagtatgtagaataagcatcgtgtgtggattggattcagatcaaaacattgcttttatgtttgtgtctttatacggtgggagtataccctggtgccccaggatgaagacttgacctgacccatgtatttttagattactcacagataacaaaaagtattttcatcatgattagttgcgaaaacagttttatttcaataggtaaaacgtgcagtcctatgtaatcgtcagaaggtaatcttaattatagcttgggtgtgctttaaactgcaagctggcagtggagggcacgattcctctgatttcagctttctccttatacttttctggagctgtgagctgcaagttaactcagtgggattaaagtgtagactggaggtacaaaaggtgaggagtgaggagatagggtagttcttccttggctggctggcttcataatccctgggccccgcagataattaaatcgactttttctgtctcaggcatttgtatgacctctttggaggttccctgctgggtagttatccttgtatctgatggacccatctcaatttaaaatactctgccaggttcggaggttcatgcttgtcatcccagcactttgggaggctcagaggtgccattggcttgagcccaagagtttgagaccagcctgggcaacctggtgaaacctcttctccattaaaaatacaaaaaattagccaggcatggtggtatgtgcctgtagtcccagctactcagggagctgaggtggaaggattgcttgagcctgggaggtcaaggctgcagtgaaccttgattgtgccactgcactccagcctggatgacaaagaccctgtctcaagaaaagtctgtaattctttcctaacccttagtatccagcctcagtcctgaggttttctttacctctgggggctattttatgccggctctctcctgagtgtcacacatctggtcctcaggaaacattctcacatccctggcctgaaaaaaacaatttcagggagatcgcatggcagcagccctctctgggctccccagctaaatggttgtacgaaacacatttcaaagctctctgaagggcttccttgaagttcctttcactgggtttcaaagtagaaggtagtaactcctttgtccaagaaggctgaattgagcacttaacaattctccaaagaaatttcttcattggtctctatcctagaccccttctgtatccttgatatggctgaggattctaaaaaatgaccagtcttacatgggagggctgggatataaaaaataaaataataaataatgataaaaactgaaaactgaccacgttcttggatatgttttctttgggttgtgtgtgtgtgtgagacttttgatagttacccaaagtaggaaaaatcccattctaataaggttatatttatgtagctctgcaaataaacatctagcaaatgtaaaaagtattttctttgccttaaaaatgattaaaattatttgaactcctgaggagtgttatatgaataaaattagtaagttatttggaggaaagttattttttaaaaagacaactggtaaaacagtacaggagaaaggccagcttcctcaagtgaggacagttgtttagaattgactgaggagcggccgggtgcggaggctcacatctgtaatcccacacgccttgggaggctctgaggcgggtagatcacctgaggtcaggagtttgagaccagcctggccaacatggcgaaaccccgtctccactaaaaatacaaaaattagccaggtgcagtggcacacacctgtaatcccagctactccgaaggctgaggcaggaggatcacctgagcccaggaagttgagactgcagtgagctgagattgcaccactgcactccagcctcagtgacagcgagactgtctcaaaaaaagaaaaaagtgactgaggaggaagaggccaggtggcaaatggaacagaatcaccaaagggtgaacaggactaaggcaatgtagtgtatggctcagctacgtcagagtggaaaaggtgttattagagcagaaactatggtccctgcgtcacagggaagcaacctacagagaagcagcagctccccaagagaggagagataagaagccagaagcctcagagtgaacaattgtcctattagggattgctctagagagagaaacctctgggaacgtacccctgtgaggcagcacagcacaatgcttttagaattgtatgagagttgatatatctccatttgttttgcaaaggcaaaaactaagatacagagattatctgttaaagttatgtatttctttggtaataaagatgctgacagtgttgctggaatgcatttctttaataaagatattgtacaatgaaatact

SEQ ID NO: 5081 - protein, 97 aa, Homo sapiens [sequence omitted]

SEQ ID NO: 5082 - DNA, 3200 bp, Homo sapiens
ctcttgaccccacctacactacgacgacggacgctcgagaacgctgcaccgcgccccgcaggaagtgcttccctgggcggaagcttctgagcgtgatatagcggaagtgccttctcttccggtctttctggtctcggccgcagaagcgagatgacgaagggaacgtcatcgtttggaaagcgtcgcaataagacgcacacgttgtgccgccgctgtggctctaaggcctaccaccttcagaagtcgacctgtggcaaatgtggctaccctgccaagcgcaagagaaagtataactggagtgccaaggctaaaagacgaaataccaccggaactggtcgaatgaggcacctaaaaattgtataccgcagattcaggcatggattccgtgaaggaacaacacctaaacccaagagggcagctgttgcagcatccagttcatcttaagaatgtcaacgattagtcatgcaataaatgttctggttttaaaaaatacatatctggttttggagtttggatcataatacaagagaagcacagggcaaagacactgcataacctcaagaactaagaatggaaggactggccaggcctggtggtgcacacctgtaatcccagctactcaggaggctgaggcgagagaatcgcttgagcctggggggcagaggttgcagtgagctgagagaacggcgggcggcagagcgagactccatctcaaaaaaaaaaaaggataaaggaaggacttaagcaaaatcttccttgtaagtagaaggatgttttgacaagaaaagttgcaatggaaaaatggttctcatgtacacgagtatgtagaataagcatcgtgtgtggattggattcagatcaaaacattgcttttatgtttgtgtctttatacggtgggagtataccctggtgccccaggatgaagacttgacctgacccatgtatttttagattactcacagataacaaaaagtattttcatcatgattagttgcgaaaacagttttatttcaataggtaaaacgtgcagtcctatgtaatcgtcagaaggtaatcttaattatagcttgggtgtgctttaaactgcaagctggcagtggagggcacgattcctctgatttcagctttctccttatacttttctggagctgtgagctgcaagttaactcagtgggattaaagtgtagactggaggtacaaaaggtgaggagtgaggagatagggtagttcttccttggctggctggcttcataatccctgggccccgcagataattaaatcgactttttctgtctcaggcatttgtatgacctctttggaggttccctgctgggtagttatccttgtatctgatggacccatctcaatttaaaatactctgccaggttcggaggttcatgcttgtcatcccagcactttgggaggctcagaggtgccattggcttgagcccaagagtttgagaccagcctgggcaacctggtgaaacctcttctccattaaaaatacaaaaaattagccaggcatggtggtatgtgcctgtagtcccagctactcagggagctgaggtggaaggattgcttgagcctgggaggtcaaggctgcagtgaaccttgattgtgccactgcactccagcctggatgacaaagaccctgtctcaagaaaagtctgtaattctttcctaacccttagtatccagcctcagtcctgaggttttctttacctctgggggctattttatgccggctctctcctgagtgtcacacatctggtcctcaggaaacattctcacatccctggcctgaaaaaaacaatttcagggagatcgcatggcagcagccctctctgggctccccagctaaatggttgtacgaaacacatttcaaagctctctgaagggcttccttgaagttcctttcactgggtttcaaagtagaaggtagtaactcctttgtccaagaaggctgaattgagcacttaacaattctccaaagaaatttcttcattggtctctatcctagaccccttctgtatccttgatatggctgaggattctaaaaaatgaccagtcttacatgggagggctgggatataaaaaataaaataataaataatgataaaaactgaaaactgaccacgttcttggatatgttttctttgggttgtgtgtgtgtgtgagacttttgatagttacccaaagtaggaaaaatcccattctaataaggttatatttatgtagctctgcaaataaacatctagcaaatgtaaaaagtattttctttgccttaaaaatgattaaaattatttgaactcctgaggagtgttatatgaataaaattagtaagttatttggaggaaagttattttttaaaaagacaactggtaaaacagtacaggagaaaggccagcttcctcaagtgaggacagttgtttagaattgactgaggagcggccgggtgcggaggctcacatctgtaatcccacacgccttgggaggctctgaggcgggtagatcacctgaggtcaggagtttgagaccagcctggccaacatggcgaaaccccgtctccactaaaaatacaaaaattagccaggtgcagtggcacacacctgtaatcccagctactccgaaggctgaggcaggaggatcacctgagcccaggaagttgagactgcagtgagctgagattgcaccactgcactccagcctcagtgacagcgagactgtctcaaaaaaagaaaaaagtgactgaggaggaagaggccaggtggcaaatggaacagaatcaccaaagggtgaacaggactaaggcaatgtagtgtatggctcagctacgtcagagtggaaaaggtgttattagagcagaaactatggtccctgcgtcacagggaagcaacctacagagaagcagcagctccccaagagaggagagataagaagccagaagcctcagagtgaacaattgtcctattagggattgctctagagagagaaacctctgggaacgtacccctgtgaggcagcacagcacaatgcttttagaattgtatgagagttgatatatctccatttgttttgcaaaggcaaaaactaagatacagagattatctgttaaagttatgtatttctttggtaataaagatgctgacagtgttgctggaatgcatttctttaataaagatattgtacaatgaaatact

SEQ ID NO: 5083 - protein, 97 aa, Homo sapiens [sequence omitted]

SEQ ID NO: 5084 - DNA, 741 bp, Homo sapiens
cggcagagcgagactccatctcaaaaaaaaaaaaggataaaggaaggacttaagcaaaatcttccttgtaagtagaaggatgttttgacaagaaaagttgcaatggaaaaatggttctcatgtacacgagtatgtagaataagcatcgtgtgtggattggattcagatcaaaacattgcttttatgtttgtgtctttatacggtgggagtataccctggtgccccaggatgaagacttgacctgacccatgtatttttagattactcacagataacaaaaagtattttcatcatgattagttgcgaaaacagttttatttcaataggtaaaacgtgcagtcctatgtaatcgtcagaaggtaatcttaattatagcttgggtgtgctttaaactgcaagctggcagtggagggcacgattcctctgatttcagctttctccttatacttttctggagctgtgagctgcaagttaactcagtgggattaaagtgtagactggagtgaacaattgtcctattagggattgctctagagagagaaacctctgggaacgtacccctgtgaggcagcacagcacaatgcttttagaattgtatgagagttgatatatctccatttgttttgcaaaggcaaaaactaagatacagagattatctgttaaagttatgtatttctttggtaataaagatgctgacagtgttgctggaatgcatttctttaataaagatattgtacaatg

SEQ ID NO: 5085 - protein, 47 aa, Homo sapiens
MRVDISPFVLQRQKLRYRDYLLKLCISLVIKMLTVLLECISLIKILY

SEQ ID NO: 5086 - DNA, 1205 bp, Homo sapiens
actgggctagcttcatatcagatttacttgttaagtgactgttttggaatgtttacttttggactgggtttgtaacacggttaaaggcaatgagaaacaagcagaattccaggagtccttgaagcagagggcactggaagacaatatagcagattaaaatagcacagctcatgtggcataggtgggtattttagatgtttgagtaaatttgaaagagtatgatgtttaaattacctttagcaacatgttcatctgctatgctgtcatgactagggggatgattattagtcacatagagcttgggagtaccactggaaacgtatgggtaggagtttaggtggcttctgtttttcaaaagatgatcttatcctagtatctgtaatgctcacttggcacacctgacttgtgggcggatcacaaggtcaagagatcgagatcaccctggcccacatggtgagaccccaactctactaaaaatacaaaaattagctgggtgtggtggcatgtgccattggcttgagcccaagagtttgagaccagcctgggcaacctggtgaaacctcttctccattaaaaatacaaaaaattagccaggcatggtggtatgtgcctgtagtcccagctactcagggagctgaggtggaaggattgcttgagcctgggaggtcaaggctgcagtgaaccttgattgtgccactgcactccagcctggatgacaaagaccctgtctcaagaaaagtctgtaattctttcctaacccttagtatccagcctcagtcctgaggttttctttacctctgggggctattttatgccggctctctcctgagtgtcacacatctggtcctcaggaaacattctcacatccctggcctgaaaaaaacaatttcagggagatcgcatggcagcagccctctctgggctccccagctaaatggttgtacgaaacacatttcaaagctctctgaagggcttccttgaagttcctttcactgggtttcaaagtagaaggtagtaactcctttgtccaagaaggctgaattgagcacttaacaattctccaaagaaatttcttcattggtctctatcctagaccccttctgtatccttgatatggctgaggattctaaaaaatgaccagtcttacatgggagggctgggatataaaaaataaaataataaataatgataaaaactgaaaactg

SEQ ID NO: 5087 - protein, 30 aa, Homo sapiens
MFICYAVMTRGMIISHIELGSTTGNVWVGV

SEQ ID NO: 5088 - DNA, 5065 bp, Homo sapiens
cagaagcgagatggtgagttgtgactgtggtgtttgtgaatcgcgttccatcctcgtcctttgtgcctctctgtttgctgtgcttggggggctggcaagattccggataaggggaactggtgggctggaaagaggcatgcggtggccctcaagagccagaagaatgactgctaactggtgcctgggggacctatcccgccgtaattgtggtgctagagccgcattgtgtcctttgcctcggtccaacctttggagacctttcacggctctagccttggttgggagccgagggaaggagtttgggaatgtttggctctgtgtaacaatgaaataattcattggtgatgctctctggccggagtctgtaaagataaggtgcatttcagaacattgcaactcttgcggagggttttaggtaacgtgaaatgcgggtagtggtctctgacttggcattcgtggaaagaggcttctcccgcagtttcgatctttacgattgcctttaaattttatcagtaattggtttcccggagaactcgagtaaatctagaagttgccaggtttcagaactatttattcctttaatgtgcagacgaagggaacgtcatcgtttggaaagcgtcgcaataagacgcacacgttgtgccgccgctgtggctctaaggcctaccaccttcagaagtcgacctgtggcaaatgtggctaccctgccaagcgcaagagaaagtataactggagtgccaaggctaaaagacgaaataccaccggaactggtcgaatgaggcaggagaatcgcttgaacctgggaggcagaggttgcagtgagctgagatcatgccactgtgctccagcctggtggcacagtgagactccacctcaaaaaaaaaaaaaaatccttgaactaatgactcaaattttcaaatgaaacaaaataagcagtggatcttgcattggagatggagttaaactatgttgcccaggctggtcttggactcctggtttcaagtgatcctctcatcttggcctcccaaagtgctgggattacagggacgagccaccacaccccacctattgtctatatttctatctttaacagcacttcagtcctgccttaagttatagttatgtatagatacccattatactttaaatttttcagcagaaattatgcttttatcttctctgcagtgttatatgttggtgtgcaaaaatgttaaatttatttttcctaagtaccccatctgcttttcaactctgtcctctgcctgaaaagcctccctccagcccctacttccctcccatcttagttcacaaagtcaggttgatttgcccccagctgtcaaagcagactacctgtttccacatgtaactggttatgttctgtaaagttacaaaaatagaaaggttgaatctgtggcggccgggtacggtagctcacgtcctatagtcgcagcactttgggaggccaaggtgggcagttcacgtgaggtggggagttcgagaccagcctgaccaacatggagaaaccccgtctctactaaaaatacaaaaatattagccgggcgtggtggtgcatgcctgtaatcccagctactagggaggctgaggcaggagaattgcttgaacctgggagacggaggttgcggtgagctgcagaggcctcacctctaattgagacacaattatatattgttgatatatatatatatatatatacacacacacacacacactatgatggataaatgcatgagtttctgtgagagcattggaaaggagtttgtcactcaataggtgaagccaggctaagatttaagctgagccagggaggacttgaaggaatcatgatgagagagaaggtaagtggctttgccagcaatgaaacagctgacataatggtaaccagtcagaggagggcataactatgaaactggacaccttggttgtcaggttagaaggatggggtgtagggttggtaagaaaagaattcagggaagagcagcgatcagattatgaagaatttgtcttgagaaattacagaggatttaaaccagaatgttaggaatagttattctagcaagatgaatgtggaaagtgttagtgtgcatgtgatgagtcttgaagctggaaactaggtaacaggttcttaaatagttcatgtgaaaatcatgacagactaaggcagtggctgtggggctgtccgggagttctctacagaaaacatctaaaacttgaatgtgcaagtgagtagctaacttccaagcttcccatttctgtataatttaagcatgaaaatgagaacactgagatttgataggcatgtagaagtcagagtaagcaagagggcttgagttcatcgatgaacttcagtaactatccttgacttagtattggtggaaaccatttgtgaatttacagactccaaaaacaaaaagataatttagagtctcaaagtaagatttggggagatgtccattggagacagaagtggagagagggagaagttcatttgttgacatatttatgtatggtgcacctactgtgtgccaagccatgttagagatacagtgggagcaaaaccagatgtgttttctgccctctgactccagtggttgcagaattagcccaggaactagaattggatggagtcacacaaaccaaggaaggggattgtttgaggggggcactcagtcacatgtggctgaggccaaagagaatgaagatatattttaaaattctggatttggcaaaatttaggctagtctttacttttcataaacctctctcatgttagagcagcaaagaaaaaccagtttgccaagaggtcacgagattgggcagtgaggaatggggagtttagtttaaaagacaacactagatacttttggaagtttacctattctgtggttcccttttattgactaaatggtgcccttcattcatgaagcaagtatctatttagtgactactatgtgtcaaaagctatctaggcccagaaacttttaagtggaaaacaaaacaaagaccctgccctgacagatttcaatcatgtatatactgtatgtatgtttgtggaaggtgacataatagacaattgcagatagtgataagtgtgtaagacaaggataccacgagcgtaatagacagtggggatggaggaacctttagaaggttggttaagttgaatgataaggagccattcttttgtctttacctgaatgacttatcattcagccctttttgagttttgggttgcttgcagagtttaaccttgcctgtaattgaaacttaattttgtaatagcataacttcatgtaagaaaagcaaagcaatacattacagaattattttactgaagaacttgtttcagagaaagaggctgtttcacatttattagcacatttggattatatttaggtgttttatttttttttaaacaaaggagtttggatcataatacaagagaagcacagggcaaagacactgcataacctcaagaactaagaatggaaggactggccaggcctggtggtgcacacctgtaatcccagctactcaggaggctgaggcgagagaatcgcttgagcctggggggcagaggttgcagtgagctgagagaacggcgggcggcagagcgagactccatctcaaaaaaaaaaaaggataaaggaaggacttaagcaaaatcttccttgtaagtagaaggatgttttgacaagaaaagttgcaatggaaaaatggttctcatgtacacgagtatgtagaataagcatcgtgtgtggattggattcagatcaaaacattgcttttatgtttgtgtctttatacggtgggagtataccctggtgccccaggatgaagacttgacctgacccatgtatttttagattactcacagataacaaaaagtattttcatcatgattagttgcgaaaacagttttatttcaataggtaaaacgtgcagtcctatgtaatcgtcagaaggtaatcttaattatagcttgggtgtgctttaaactgcaagctggcagtggagggcacgattcctctgatttcagctttctccttatacttttctggagctgtgagctgcaagttaactcagtgggattaaagtgtagactggaggtacaaaaggtgaggagtgaggagatagggtagttcttccttggctggctggcttcataatccctgggccccgcagataattaaatcgactttttctgtctcaggcatttgtatgacctctttggaggttccctgctgggtagttatccttgtatctgatggacccatctcaatttaaaatactctgccaggttcggaggttcatgcttgtcatcccagcactttgggaggctcagaggtgccattggcttgagcccaagagtttgagaccagcctgggcaacctggtgaaacctcttctccattaaaaatacaaaaaattagccaggcatggtggtatgtgcctgtagtcccagctactcagggagctgaggtggaaggattgcttgagcctgggaggtcaaggctgcagtgaaccttgattgtgccactgcactccagcctggatgacaaagaccctgtctcaagaaaagtctgtaattctttcctaacccttagtatccagcctcagtcctgaggttttctttacctctgggggctattttatgccggctctctcctgagtgtcacacatctggtcctcaggaaacattctcacatccctggcctgaaaaaaacaatttcagggagatcgcatggcagcagccctctctgggctccccagctaaatggttgtacgaaacacatttcaaagctctctgaagggcttccttgaagttcctttcactgggtttcaaagtagaaggtagtaactcctttgtccaagaaggctgaattgagcacttaacaattctccaaagaaatttcttcattggtctctatcctagaccccttctgtatccttgatatggctgaggattctaaaaaatgaccagtcttacatgggagggctgggatataaaaaataaaataataaataatgataaaaactgaaaactg

SEQ ID NO: 5089 - protein, 65 aa, Homo sapiens; identical to SEQ ID NO: 5077

SEQ ID NO: 5090 - DNA, 6973 bp, Homo sapiens
cagaagcgagatggtgagttgtgactgtggtgtttgtgaatcgcgttccatcctcgtcctttgtgcctctctgtttgctgtgcttggggggctggcaagattccggataaggggaactggtgggctggaaagaggcatgcggtggccctcaagagccagaagaatgactgctaactggtgcctgggggacctatcccgccgtaattgtggtgctagagccgcattgtgtcctttgcctcggtccaacctttggagacctttcacggctctagccttggttgggagccgagggaaggagtttgggaatgtttggctctgtgtaacaatgaaataattcattggtgatgctctctggccggagtctgtaaagataaggtgcatttcagaacattgcaactcttgcggagggttttaggtaacgtgaaatgcgggtagtggtctctgacttggcattcgtggaaagaggcttctcccgcagtttcgatctttacgattgcctttaaattttatcagtaattggtttcccggagaactcgagtaaatctagaagttgccaggtttcagaactatttattcctttaatgtgcagacgaagggaacgtcatcgtttggaaagcgtcgcaataagacgcacacgttgtgccgccgctgtggctctaaggcctaccaccttcagaagtcgacctgtggcaaatgtggctaccctgccaagcgcaagagaaagtgcatggattccgtgaaggaacaacacctaaacccaagagggcagctgttgcagcatccagttcatcttaagaatgtcaacgattagtcatgcaataaatgttctggttttaaaaaatacatatctggttttggtaaggtatttttaatcaattaggcttgtagtatcagtgaaatactgtaggtttagggactgggctagcttcatatcagatttacttgttaagtgactgttttggaatgtttacttttggactgggtttgtaacacggttaaaggcaatgagaaacaagcagaattccaggagtccttgaagcagagggcactggaagacaatatagcagattaaaatagcacagctcatgtggcataggtgggtattttagatgtttgagtaaatttgaaagagtatgatgtttaaattacctttagcaacatgttcatctgctatgctgtcatgactagggggatgattattagtcacatagagcttgggagtaccactggaaacgtatgggtaggagtttaggtggcttctgtttttcaaaagatgatcttatcctagtatctgtaatgctcacttggcacacctgacttgtgggctgtgtgtaaggtggctagctaagtgaaaaaagcctgctaggtgtgagtcaacttaagaatatgtaaataggtttgagaaaaagtagggcttgggtgcaagtaaagattgagcaggaaataaaggaaaatcaagtataatccctgagatttgtagactaaaggcaatgatgtgggactacttggtcgaatttttttagccctcaacttggtaattgggtgtttctgtgttaaagcactgaaacttgctgtcgtgccttcctagttttcgtggtttattgacagggttgggggttttttttgtttttttaaaatgaagggacaaagtcaactggactgctgagtgagagggcaggggcagttgaagggaacatgaattgctggaacagctacataaaatagtgatgtagccaagtcatgctatttaaattataattctccactgtgtttagaataacatctgaggttcttaacctggccttggaagggtatcacttttacttgtaacctggaatggctttataatgtgctagctaattgctactctcatcttgtattttaactcctaatttacccttcaggtctcagcttcagaacattcacttataaagaaaccctgctgattaaatctctcttgggcttcctcccgaaatgtgagactatactttaaagatgtatggttagagtccaattgccattgcctttcttgtttacagatagtgcaatggcgcaatcctggctcactgcagcctctaattcctgggctcaagtcaagtggttctcctgcctcagccttctgagtagctgggactacagatgcacaccaccacacctggctaatttttgtgttttttgtagagatggagattcactcgactaattctttttgtattcttagtagagactgggtttcaacatgttgaccaggctggtctcgaactcgacctcgtgatccgccgcctcggcctcccaaagtgctaggattacaggcgtgagccaccactcccggctgtcatcatcaaattttcaagtgaagatagtctgttgaagattgaacaatgaccttgaaagacagctgagttgctgtgggtataatgtaaagctggtgaagtttggccagtttgggcttcagaagtctaagtctagtgaaggtaccctgacccccatataaacaacccttgaggccggtgtggtggctcacggctgtaatcctggcactttgggaggccgaggtgggcggatcacaaggtcaagagatcgagatcaccctggcccacatggtgagaccccaactctactaaaaatacaaaaattagctgggtgtggtggcatgtgcctgtagtcttagctacttgagaggctgaggcaggagaatcgcttgaacctgggaggcagaggttgcagtgagctgagatcatgccactgtgctccagcctggtggcacagtgagactccacctcaaaaaaaaaaaaaaatccttgaactaatgactcaaattttcaaatgaaacaaaataagcagtggatcttgcattggagatggagttaaactatgttgcccaggctggtcttggactcctggtttcaagtgatcctctcatcttggcctcccaaagtgctgggattacagggacgagccaccacaccccacctattgtctatatttctatctttaacagcacttcagtcctgccttaagttatagttatgtatagatacccattatactttaaatttttcagcagaaattatgcttttatcttctctgcagtgttatatgttggtgtgcaaaaatgttaaatttatttttcctaagtaccccatctgcttttcaactctgtcctctgcctgaaaagcctccctccagcccctacttccctcccatcttagttcacaaagtcaggttgatttgcccccagctgtcaaagcagactacctgtttccacatgtaactggttatgttctgtaaagttacaaaaatagaaaggttgaatctgtggcggccgggtacggtagctcacgtcctatagtcgcagcactttgggaggccaaggtgggcagttcacgtgaggtggggagttcgagaccagcctgaccaacatggagaaaccccgtctctactaaaaatacaaaaatattagccgggcgtggtggtgcatgcctgtaatcccagctactagggaggctgaggcaggagaattgcttgaacctgggagacggaggttgcggtgagctgcagaggcctcacctctaattgagacacaattatatattgttgatatatatatatatatatatacacacacacacacacactatgatggataaatgcatgagtttctgtgagagcattggaaaggagtttgtcactcaataggtgaagccaggctaagatttaagctgagccagggaggacttgaaggaatcatgatgagagagaaggtaagtggctttgccagcaatgaaacagctgacataatggtaaccagtcagaggagggcataactatgaaactggacaccttggttgtcaggttagaaggatggggtgtagggttggtaagaaaagaattcagggaagagcagcgatcagattatgaagaatttgtcttgagaaattacagaggatttaaaccagaatgttaggaatagttattctagcaagatgaatgtggaaagtgttagtgtgcatgtgatgagtcttgaagctggaaactaggtaacaggttcttaaatagttcatgtgaaaatcatgacagactaaggcagtggctgtggggctgtccgggagttctctacagaaaacatctaaaacttgaatgtgcaagtgagtagctaacttccaagcttcccatttctgtataatttaagcatgaaaatgagaacactgagatttgataggcatgtagaagtcagagtaagcaagagggcttgagttcatcgatgaacttcagtaactatccttgacttagtattggtggaaaccatttgtgaatttacagactccaaaaacaaaaagataatttagagtctcaaagtaagatttggggagatgtccattggagacagaagtggagagagggagaagttcatttgttgacatatttatgtatggtgcacctactgtgtgccaagccatgttagagatacagtgggagcaaaaccagatgtgttttctgccctctgactccagtggttgcagaattagcccaggaactagaattggatggagtcacacaaaccaaggaaggggattgtttgaggggggcactcagtcacatgtggctgaggccaaagagaatgaagatatattttaaaattctggatttggcaaaatttaggctagtctttacttttcataaacctctctcatgttagagcagcaaagaaaaaccagtttgccaagaggtcacgagattgggcagtgaggaatggggagtttagtttaaaagacaacactagatacttttggaagtttacctattctgtggttcccttttattgactaaatggtgcccttcattcatgaagcaagtatctatttagtgactactatgtgtcaaaagctatctaggcccagaaacttttaagtggaaaacaaaacaaagaccctgccctgacagatttcaatcatgtatatactgtatgtatgtttgtggaaggtgacataatagacaattgcagatagtgataagtgtgtaagacaaggataccacgagcgtaatagacagtggggatggaggaacctttagaaggttggttaagttgaatgataaggagccattcttttgtctttacctgaatgacttatcattcagccctttttgagttttgggttgcttgcagagtttaaccttgcctgtaattgaaacttaattttgtaatagcataacttcatgtaagaaaagcaaagcaatacattacagaattattttactgaagaacttgtttcagagaaagaggctgtttcacatttattagcacatttggattatatttaggtgttttatttttttttaaacaaaggagtttggatcataatacaagagaagcacagggcaaagacactgcataacctcaagaactaagaatggaaggactggccaggcctggtggtgcacacctgtaatcccagctactcaggaggctgaggcgagagaatcgcttgagcctggggggcagaggttgcagtgagctgagagaacggcgggcggcagagcgagactccatctcaaaaaaaaaaaaggataaaggaaggacttaagcaaaatcttccttgtaagtagaaggatgttttgacaagaaaagttgcaatggaaaaatggttctcatgtacacgagtatgtagaataagcatcgtgtgtggattggattcagatcaaaacattgcttttatgtttgtgtctttatacggtgggagtataccctggtgccccaggatgaagacttgacctgacccatgtatttttagattactcacagataacaaaaagtattttcatcatgattagttgcgaaaacagttttatttcaataggtaaaacgtgcagtcctatgtaatcgtcagaaggtaatcttaattatagcttgggtgtgctttaaactgcaagctggcagtggagggcacgattcctctgatttcagctttctccttatacttttctggagctgtgagctgcaagttaactcagtgggattaaagtgtagactggaggtacaaaaggtgaggagtgaggagatagggtagttcttccttggctggctggcttcataatccctgggccccgcagataattaaatcgactttttctgtctcaggcatttgtatgacctctttggaggttccctgctgggtagttatccttgtatctgatggacccatctcaatttaaaatactctgccaggttcggaggttcatgcttgtcatcccagcactttgggaggctcagaggtgccattggcttgagcccaagagtttgagaccagcctgggcaacctggtgaaacctcttctccattaaaaatacaaaaaattagccaggcatggtggtatgtgcctgtagtcccagctactcagggagctgaggtggaaggattgcttgagcctgggaggtcaaggctgcagtgaaccttgattgtgccactgcactccagcctggatgacaaagaccctgtctcaagaaaagtctgtaattctttcctaacccttagtatccagcctcagtcctgaggttttctttacctctgggggctattttatgccggctctctcctgagtgtcacacatctggtcctcaggaaacattctcacatccctggcctgaaaaaaacaatttcagggagatcgcatggcagcagccctctctgggctccccagctaaatggttgtacgaaacacatttcaaagctctctgaagggcttccttgaagttcctttcactgggtttcaaagtagaaggtagtaactcctttgtccaagaaggctgaattgagcacttaacaattctccaaagaaatttcttcattggtctctatcctagaccccttctgtatccttgatatggctgaggattctaaaaaatgaccagtcttacatgggagggctgggatataaaaaataaaataataaataatgataaaaactgaaaactg

SEQ ID NO: 5091 - protein, 52 aa, Homo sapiens; identical to SEQ ID NO: 5075

SEQ ID NO: 5092 - DNA, 6994 bp, Homo sapiens
cagaagcgagatggtgagttgtgactgtggtgtttgtgaatcgcgttccatcctcgtcctttgtgcctctctgtttgctgtgcttggggggctggcaagattccggataaggggaactggtgggctggaaagaggcatgcggtggccctcaagagccagaagaatgactgctaactggtgcctgggggacctatcccgccgtaattgtggtgctagagccgcattgtgtcctttgcctcggtccaacctttggagacctttcacggctctagccttggttgggagccgagggaaggagtttgggaatgtttggctctgtgtaacaatgaaataattcattggtgatgctctctggccggagtctgtaaagataaggtgcatttcagaacattgcaactcttgcggagggttttaggtaacgtgaaatgcgggtagtggtctctgacttggcattcgtggaaagaggcttctcccgcagtttcgatctttacgattgcctttaaattttatcagtaattggtttcccggagaactcgagtaaatctagaagttgccaggtttcagaactatttattcctttaatgtgcagacgaagggaacgtcatcgtttggaaagcgtcgcaataagacgcacacgttgtgccgccgctgtggctctaaggcctaccaccttcagaagtcgacctgtggcaaatgtggctaccctgccaagcgcaagagaaagtataactggagtgccaaggctaaaagacgaaataccaccggaaaacacctaaacccaagagggcagctgttgcagcatccagttcatcttaagaatgtcaacgattagtcatgcaataaatgttctggttttaaaaaatacatatctggttttggtaaggtatttttaatcaattaggcttgtagtatcagtgaaatactgtaggtttagggactgggctagcttcatatcagatttacttgttaagtgactgttttggaatgtttacttttggactgggtttgtaacacggttaaaggcaatgagaaacaagcagaattccaggagtccttgaagcagagggcactggaagacaatatagcagattaaaatagcacagctcatgtggcataggtgggtattttagatgtttgagtaaatttgaaagagtatgatgtttaaattacctttagcaacatgttcatctgctatgctgtcatgactagggggatgattattagtcacatagagcttgggagtaccactggaaacgtatgggtaggagtttaggtggcttctgtttttcaaaagatgatcttatcctagtatctgtaatgctcacttggcacacctgacttgtgggctgtgtgtaaggtggctagctaagtgaaaaaagcctgctaggtgtgagtcaacttaagaatatgtaaataggtttgagaaaaagtagggcttgggtgcaagtaaagattgagcaggaaataaaggaaaatcaagtataatccctgagatttgtagactaaaggcaatgatgtgggactacttggtcgaatttttttagccctcaacttggtaattgggtgtttctgtgttaaagcactgaaacttgctgtcgtgccttcctagttttcgtggtttattgacagggttgggggttttttttgtttttttaaaatgaagggacaaagtcaactggactgctgagtgagagggcaggggcagttgaagggaacatgaattgctggaacagctacataaaatagtgatgtagccaagtcatgctatttaaattataattctccactgtgtttagaataacatctgaggttcttaacctggccttggaagggtatcacttttacttgtaacctggaatggctttataatgtgctagctaattgctactctcatcttgtattttaactcctaatttacccttcaggtctcagcttcagaacattcacttataaagaaaccctgctgattaaatctctcttgggcttcctcccgaaatgtgagactatactttaaagatgtatggttagagtccaattgccattgcctttcttgtttacagatagtgcaatggcgcaatcctggctcactgcagcctctaattcctgggctcaagtcaagtggttctcctgcctcagccttctgagtagctgggactacagatgcacaccaccacacctggctaatttttgtgttttttgtagagatggagattcactcgactaattctttttgtattcttagtagagactgggtttcaacatgttgaccaggctggtctcgaactcgacctcgtgatccgccgcctcggcctcccaaagtgctaggattacaggcgtgagccaccactcccggctgtcatcatcaaattttcaagtgaagatagtctgttgaagattgaacaatgaccttgaaagacagctgagttgctgtgggtataatgtaaagctggtgaagtttggccagtttgggcttcagaagtctaagtctagtgaaggtaccctgacccccatataaacaacccttgaggccggtgtggtggctcacggctgtaatcctggcactttgggaggccgaggtgggcggatcacaaggtcaagagatcgagatcaccctggcccacatggtgagaccccaactctactaaaaatacaaaaattagctgggtgtggtggcatgtgcctgtagtcttagctacttgagaggctgaggcaggagaatcgcttgaacctgggaggcagaggttgcagtgagctgagatcatgccactgtgctccagcctggtggcacagtgagactccacctcaaaaaaaaaaaaaaatccttgaactaatgactcaaattttcaaatgaaacaaaataagcagtggatcttgcattggagatggagttaaactatgttgcccaggctggtcttggactcctggtttcaagtgatcctctcatcttggcctcccaaagtgctgggattacagggacgagccaccacaccccacctattgtctatatttctatctttaacagcacttcagtcctgccttaagttatagttatgtatagatacccattatactttaaatttttcagcagaaattatgcttttatcttctctgcagtgttatatgttggtgtgcaaaaatgttaaatttatttttcctaagtaccccatctgcttttcaactctgtcctctgcctgaaaagcctccctccagcccctacttccctcccatcttagttcacaaagtcaggttgatttgcccccagctgtcaaagcagactacctgtttccacatgtaactggttatgttctgtaaagttacaaaaatagaaaggttgaatctgtggcggccgggtacggtagctcacgtcctatagtcgcagcactttgggaggccaaggtgggcagttcacgtgaggtggggagttcgagaccagcctgaccaacatggagaaaccccgtctctactaaaaatacaaaaatattagccgggcgtggtggtgcatgcctgtaatcccagctactagggaggctgaggcaggagaattgcttgaacctgggagacggaggttgcggtgagctgcagaggcctcacctctaattgagacacaattatatattgttgatatatatatatatatatatacacacacacacacacactatgatggataaatgcatgagtttctgtgagagcattggaaaggagtttgtcactcaataggtgaagccaggctaagatttaagctgagccagggaggacttgaaggaatcatgatgagagagaaggtaagtggctttgccagcaatgaaacagctgacataatggtaaccagtcagaggagggcataactatgaaactggacaccttggttgtcaggttagaaggatggggtgtagggttggtaagaaaagaattcagggaagagcagcgatcagattatgaagaatttgtcttgagaaattacagaggatttaaaccagaatgttaggaatagttattctagcaagatgaatgtggaaagtgttagtgtgcatgtgatgagtcttgaagctggaaactaggtaacaggttcttaaatagttcatgtgaaaatcatgacagactaaggcagtggctgtggggctgtccgggagttctctacagaaaacatctaaaacttgaatgtgcaagtgagtagctaacttccaagcttcccatttctgtataatttaagcatgaaaatgagaacactgagatttgataggcatgtagaagtcagagtaagcaagagggcttgagttcatcgatgaacttcagtaactatccttgacttagtattggtggaaaccatttgtgaatttacagactccaaaaacaaaaagataatttagagtctcaaagtaagatttggggagatgtccattggagacagaagtggagagagggagaagttcatttgttgacatatttatgtatggtgcacctactgtgtgccaagccatgttagagatacagtgggagcaaaaccagatgtgttttctgccctctgactccagtggttgcagaattagcccaggaactagaattggatggagtcacacaaaccaaggaaggggattgtttgaggggggcactcagtcacatgtggctgaggccaaagagaatgaagatatattttaaaattctggatttggcaaaatttaggctagtctttacttttcataaacctctctcatgttagagcagcaaagaaaaaccagtttgccaagaggtcacgagattgggcagtgaggaatggggagtttagtttaaaagacaacactagatacttttggaagtttacctattctgtggttcccttttattgactaaatggtgcccttcattcatgaagcaagtatctatttagtgactactatgtgtcaaaagctatctaggcccagaaacttttaagtggaaaacaaaacaaagaccctgccctgacagatttcaatcatgtatatactgtatgtatgtttgtggaaggtgacataatagacaattgcagatagtgataagtgtgtaagacaaggataccacgagcgtaatagacagtggggatggaggaacctttagaaggttggttaagttgaatgataaggagccattcttttgtctttacctgaatgacttatcattcagccctttttgagttttgggttgcttgcagagtttaaccttgcctgtaattgaaacttaattttgtaatagcataacttcatgtaagaaaagcaaagcaatacattacagaattattttactgaagaacttgtttcagagaaagaggctgtttcacatttattagcacatttggattatatttaggtgttttatttttttttaaacaaaggagtttggatcataatacaagagaagcacagggcaaagacactgcataacctcaagaactaagaatggaaggactggccaggcctggtggtgcacacctgtaatcccagctactcaggaggctgaggcgagagaatcgcttgagcctggggggcagaggttgcagtgagctgagagaacggcgggcggcagagcgagactccatctcaaaaaaaaaaaaggataaaggaaggacttaagcaaaatcttccttgtaagtagaaggatgttttgacaagaaaagttgcaatggaaaaatggttctcatgtacacgagtatgtagaataagcatcgtgtgtggattggattcagatcaaaacattgcttttatgtttgtgtctttatacggtgggagtataccctggtgccccaggatgaagacttgacctgacccatgtatttttagattactcacagataacaaaaagtattttcatcatgattagttgcgaaaacagttttatttcaataggtaaaacgtgcagtcctatgtaatcgtcagaaggtaatcttaattatagcttgggtgtgctttaaactgcaagctggcagtggagggcacgattcctctgatttcagctttctccttatacttttctggagctgtgagctgcaagttaactcagtgggattaaagtgtagactggaggtacaaaaggtgaggagtgaggagatagggtagttcttccttggctggctggcttcataatccctgggccccgcagataattaaatcgactttttctgtctcaggcatttgtatgacctctttggaggttccctgctgggtagttatccttgtatctgatggacccatctcaatttaaaatactctgccaggttcggaggttcatgcttgtcatcccagcactttgggaggctcagaggtgccattggcttgagcccaagagtttgagaccagcctgggcaacctggtgaaacctcttctccattaaaaatacaaaaaattagccaggcatggtggtatgtgcctgtagtcccagctactcagggagctgaggtggaaggattgcttgagcctgggaggtcaaggctgcagtgaaccttgattgtgccactgcactccagcctggatgacaaagaccctgtctcaagaaaagtctgtaattctttcctaacccttagtatccagcctcagtcctgaggttttctttacctctgggggctattttatgccggctctctcctgagtgtcacacatctggtcctcaggaaacattctcacatccctggcctgaaaaaaacaatttcagggagatcgcatggcagcagccctctctgggctccccagctaaatggttgtacgaaacacatttcaaagctctctgaagggcttccttgaagttcctttcactgggtttcaaagtagaaggtagtaactcctttgtccaagaaggctgaattgagcacttaacaattctccaaagaaatttcttcattggtctctatcctagaccccttctgtatccttgatatggctgaggattctaaaaaatgaccagtcttacatgggagggctgggatataaaaaataaaataataaataatgataaaaactgaaaactg

SEQ ID NO: 5093 - protein, 64 aa, Homo sapiens; identical to SEQ ID NO: 5079

SEQ ID NO: 5094 - DNA, 6550 bp, Homo sapiens
ctgggcggaagcttctgagcgtgatatagcggaagtgccttctcttccggtctttctggtctcggccgcagaagcgagatgacgaagggaacgtcatcgtttggaaagcgtcgcaataagacgcacacgttgtgccgccgctgtggctctaaggcctaccaccttcagaagtcgacctgtggcaaatgtggctaccctgccaagcgcaagagaaagtataactggagtgccaaggctaaaagacgaaataccaccggaactggtcgaatgaggcacctaaaaattgtataccgcagattcaggcatggattccgtgaaggaacaacacctaaacccaagagggcagctgttgcagcatccagttcatcttaagaatgtcaacgattagtcatgcaataaatgttctggttttaaaaaatacatatctggttttggtaaggtatttttaatcaattaggcttgtagtatcagtgaaatactgtaggtttagggactgggctagcttcatatcagatttacttgttaagtgactgttttggaatgtttacttttggactgggtttgtaacacggttaaaggcaatgagaaacaagcagaattccaggagtccttgaagcagagggcactggaagacaatatagcagattaaaatagcacagctcatgtggcataggtgggtattttagatgtttgagtaaatttgaaagagtatgatgtttaaattacctttagcaacatgttcatctgctatgctgtcatgactagggggatgattattagtcacatagagcttgggagtaccactggaaacgtatgggtaggagtttaggtggcttctgtttttcaaaagatgatcttatcctagtatctgtaatgctcacttggcacacctgacttgtgggctgtgtgtaaggtggctagctaagtgaaaaaagcctgctaggtgtgagtcaacttaagaatatgtaaataggtttgagaaaaagtagggcttgggtgcaagtaaagattgagcaggaaataaaggaaaatcaagtataatccctgagatttgtagactaaaggcaatgatgtgggactacttggtcgaatttttttagccctcaacttggtaattgggtgtttctgtgttaaagcactgaaacttgctgtcgtgccttcctagttttcgtggtttattgacagggttgggggttttttttgtttttttaaaatgaagggacaaagtcaactggactgctgagtgagagggcaggggcagttgaagggaacatgaattgctggaacagctacataaaatagtgatgtagccaagtcatgctatttaaattataattctccactgtgtttagaataacatctgaggttcttaacctggccttggaagggtatcacttttacttgtaacctggaatggctttataatgtgctagctaattgctactctcatcttgtattttaactcctaatttacccttcaggtctcagcttcagaacattcacttataaagaaaccctgctgattaaatctctcttgggcttcctcccgaaatgtgagactatactttaaagatgtatggttagagtccaattgccattgcctttcttgtttacagatagtgcaatggcgcaatcctggctcactgcagcctctaattcctgggctcaagtcaagtggttctcctgcctcagccttctgagtagctgggactacagatgcacaccaccacacctggctaatttttgtgttttttgtagagatggagattcactcgactaattctttttgtattcttagtagagactgggtttcaacatgttgaccaggctggtctcgaactcgacctcgtgatccgccgcctcggcctcccaaagtgctaggattacaggcgtgagccaccactcccggctgtcatcatcaaattttcaagtgaagatagtctgttgaagattgaacaatgaccttgaaagacagctgagttgctgtgggtataatgtaaagctggtgaagtttggccagtttgggcttcagaagtctaagtctagtgaaggtaccctgacccccatataaacaacccttgaggccggtgtggtggctcacggctgtaatcctggcactttgggaggccgaggtgggcggatcacaaggtcaagagatcgagatcaccctggcccacatggtgagaccccaactctactaaaaatacaaaaattagctgggtgtggtggcatgtgcctgtagtcttagctacttgagaggctgaggcaggagaatcgcttgaacctgggaggcagaggttgcagtgagctgagatcatgccactgtgctccagcctggtggcacagtgagactccacctcaaaaaaaaaaaaaaatccttgaactaatgactcaaattttcaaatgaaacaaaataagcagtggatcttgcattggagatggagttaaactatgttgcccaggctggtcttggactcctggtttcaagtgatcctctcatcttggcctcccaaagtgctgggattacagggacgagccaccacaccccacctattgtctatatttctatctttaacagcacttcagtcctgccttaagttatagttatgtatagatacccattatactttaaatttttcagcagaaattatgcttttatcttctctgcagtgttatatgttggtgtgcaaaaatgttaaatttatttttcctaagtaccccatctgcttttcaactctgtcctctgcctgaaaagcctccctccagcccctacttccctcccatcttagttcacaaagtcaggttgatttgcccccagctgtcaaagcagactacctgtttccacatgtaactggttatgttctgtaaagttacaaaaatagaaaggttgaatctgtggcggccgggtacggtagctcacgtcctatagtcgcagcactttgggaggccaaggtgggcagttcacgtgaggtggggagttcgagaccagcctgaccaacatggagaaaccccgtctctactaaaaatacaaaaatattagccgggcgtggtggtgcatgcctgtaatcccagctactagggaggctgaggcaggagaattgcttgaacctgggagacggaggttgcggtgagctgcagaggcctcacctctaattgagacacaattatatattgttgatatatatatatatatatatacacacacacacacacactatgatggataaatgcatgagtttctgtgagagcattggaaaggagtttgtcactcaataggtgaagccaggctaagatttaagctgagccagggaggacttgaaggaatcatgatgagagagaaggtaagtggctttgccagcaatgaaacagctgacataatggtaaccagtcagaggagggcataactatgaaactggacaccttggttgtcaggttagaaggatggggtgtagggttggtaagaaaagaattcagggaagagcagcgatcagattatgaagaatttgtcttgagaaattacagaggatttaaaccagaatgttaggaatagttattctagcaagatgaatgtggaaagtgttagtgtgcatgtgatgagtcttgaagctggaaactaggtaacaggttcttaaatagttcatgtgaaaatcatgacagactaaggcagtggctgtggggctgtccgggagttctctacagaaaacatctaaaacttgaatgtgcaagtgagtagctaacttccaagcttcccatttctgtataatttaagcatgaaaatgagaacactgagatttgataggcatgtagaagtcagagtaagcaagagggcttgagttcatcgatgaacttcagtaactatccttgacttagtattggtggaaaccatttgtgaatttacagactccaaaaacaaaaagataatttagagtctcaaagtaagatttggggagatgtccattggagacagaagtggagagagggagaagttcatttgttgacatatttatgtatggtgcacctactgtgtgccaagccatgttagagatacagtgggagcaaaaccagatgtgttttctgccctctgactccagtggttgcagaattagcccaggaactagaattggatggagtcacacaaaccaaggaaggggattgtttgaggggggcactcagtcacatgtggctgaggccaaagagaatgaagatatattttaaaattctggatttggcaaaatttaggctagtctttacttttcataaacctctctcatgttagagcagcaaagaaaaaccagtttgccaagaggtcacgagattgggcagtgaggaatggggagtttagtttaaaagacaacactagatacttttggaagtttacctattctgtggttcccttttattgactaaatggtgcccttcattcatgaagcaagtatctatttagtgactactatgtgtcaaaagctatctaggcccagaaacttttaagtggaaaacaaaacaaagaccctgccctgacagatttcaatcatgtatatactgtatgtatgtttgtggaaggtgacataatagacaattgcagatagtgataagtgtgtaagacaaggataccacgagcgtaatagacagtggggatggaggaacctttagaaggttggttaagttgaatgataaggagccattcttttgtctttacctgaatgacttatcattcagccctttttgagttttgggttgcttgcagagtttaaccttgcctgtaattgaaacttaattttgtaatagcataacttcatgtaagaaaagcaaagcaatacattacagaattattttactgaagaacttgtttcagagaaagaggctgtttcacatttattagcacatttggattatatttaggtgttttatttttttttaaacaaaggagtttggatcataatacaagagaagcacagggcaaagacactgcataacctcaagaactaagaatggaaggactggccaggcctggtggtgcacacctgtaatcccagctactcaggaggctgaggcgagagaatcgcttgagcctggggggcagaggttgcagtgagctgagagaacggcgggcggcagagcgagactccatctcaaaaaaaaaaaaggataaaggaaggacttaagcaaaatcttccttgtaagtagaaggatgttttgacaagaaaagttgcaatggaaaaatggttctcatgtacacgagtatgtagaataagcatcgtgtgtggattggattcagatcaaaacattgcttttatgtttgtgtctttatacggtgggagtataccctggtgccccaggatgaagacttgacctgacccatgtatttttagattactcacagataacaaaaagtattttcatcatgattagttgcgaaaacagttttatttcaataggtaaaacgtgcagtcctatgtaatcgtcagaaggtaatcttaattatagcttgggtgtgctttaaactgcaagctggcagtggagggcacgattcctctgatttcagctttctccttatacttttctggagctgtgagctgcaagttaactcagtgggattaaagtgtagactggaggtacaaaaggtgaggagtgaggagatagggtagttcttccttggctggctggcttcataatccctgggccccgcagataattaaatcgactttttctgtctcaggcatttgtatgacctctttggaggttccctgctgggtagttatccttgtatctgatggacccatctcaatttaaaatactctgccaggttcggaggttcatgcttgtcatcccagcactttgggaggctcagaggtgccattggcttgagcccaagagtttgagaccagcctgggcaacctggtgaaacctcttctccattaaaaatacaaaaaattagccaggcatggtggtatgtgcctgtagtcccagctactcagggagctgaggtggaaggattgcttgagcctgggaggtcaaggctgcagtgaaccttgattgtgccactgcactccagcctggatgacaaagaccctgtctcaagaaaagtctgtaattctttcctaacccttagtatccagcctcagtcctgaggttttctttacctctgggggctattttatgccggctctctcctgagtgtcacacatctggtcctcaggaaacattctcacatccctggcctgaaaaaaacaatttcagggagatcgcatggcagcagccctctctgggctccccagctaaatggttgtacgaaacacatttcaaagctctctgaagggcttccttgaagttcctttcactgggtttcaaagtagaaggtagtaactcctttgtccaagaaggctgaattgagcacttaacaattctccaaagaaatttcttcattggtctctatcctagaccccttctgtatccttgatatggctgaggattctaaaaaatgaccagtcttacatgggagggctgggatataaaaaataaaataataaataatgataaaaactgaaaactg

SEQ ID NO: 5095 - protein, 97 aa, Homo sapiens [sequence omitted]

SEQ ID NO: 5096 - DNA, 2132 bp, Homo sapiens
ctcttgaccccacctacactacgacgacggacgctcgagaacgctgcaccgcgccccgcaggaagtgcttccctgggcggaagcttctgagcgtgatatagcggaagtgccttctcttccggtctttctggtctcggccgcagaagcgagatgacgaagggaacgtcatcgtttggaaagcgtcgcaataagacgcacacgttgtgccgccgctgtggctctaaggcctaccaccttcagaagtcgacctgtggcaaatgtggctaccctgccaagcgcaagagaaagtataactggagtgccaaggctaaaagacgaaataccaccggaactggtcgaatgaggcacctaaaaattgtataccgcagattcaggcatggattccgtgaaggaacaacacctaaacccaagagggcagctgttgcagcatccagttcatcttaagaatgtcaacgattagtcatgcaataaatgttctggttttaaaaaatacatatctggttttggagtttggatcataatacaagagaagcacagggcaaagacactgcataacctcaagaactaagaatggaaggactggccaggcctggtggtgcacacctgtaatcccagctactcaggaggctgaggcgagagaatcgcttgagcctggggggcagaggttgcagtgagctgagagaacggcgggcggcagagcgagactccatctcaaaaaaaaaaaaggataaaggaaggacttaagcaaaatcttccttgtaagtagaaggatgttttgacaagaaaagttgcaatggaaaaatggttctcatgtacacgagtatgtagaataagcatcgtgtgtggattggattcagatcaaaacattgcttttatgtttgtgtctttatacggtgggagtataccctggtgccccaggatgaagacttgacctgacccatgtatttttagattactcacagataacaaaaagtattttcatcatgattagttgcgaaaacagttttatttcaataggtaaaacgtgcagtcctatgtaatcgtcagaaggtaatcttaattatagcttgggtgtgctttaaactgcaagctggcagtggagggcacgattcctctgatttcagctttctccttatacttttctggagctgtgagctgcaagttaactcagtgggattaaagtgtagactggaggtacaaaaggtgaggagtgaggagatagggtagttcttccttggctggctggcttcataatccctgggccccgcagataattaaatcgactttttctgtctcaggcatttgtatgacctctttggaggttccctgctgggtagttatccttgtatctgatggacccatctcaatttaaaatactctgccaggttcggaggttcatgcttgtcatcccagcactttgggaggctcagaggtgccattggcttgagcccaagagtttgagaccagcctgggcaacctggtgaaacctcttctccattaaaaatacaaaaaattagccaggcatggtggtatgtgcctgtagtcccagctactcagggagctgaggtggaaggattgcttgagcctgggaggtcaaggctgcagtgaaccttgattgtgccactgcactccagcctggatgacaaagaccctgtctcaagaaaagtctgtaattctttcctaacccttagtatccagcctcagtcctgaggttttctttacctctgggggctattttatgccggctctctcctgagtgtcacacatctggtcctcaggaaacattctcacatccctggcctgaaaaaaacaatttcagggagatcgcatggcagcagccctctctgggctccccagctaaatggttgtacgaaacacatttcaaagctctctgaagggcttccttgaagttcctttcactgggtttcaaagtagaaggtagtaactcctttgtccaagaaggctgaattgagcacttaacaattctccaaagaaatttcttcattggtctctatcctagaccccttctgtatccttgatatggctgaggattctaaaaaatgaccagtcttacatgggagggctgggatataaaaaataaaataataaataatgataaaaactgaaaactg

SEQ ID NO: 5097 - protein, 97 aa, Homo sapiens [sequence omitted]

SEQ ID NO: 5098 - DNA, 860 bp, Homo sapiens
ctcttgaccccacctacactacgacgacggacgctcgagaacgctgcaccgcgccccgcaggaagtgcttccctgggcggaagcttctgagcgtgatatagcggaagtgccttctcttccggtctttctggtctcggccgcagaagcgagatgacgaagggaacgtcatcgtttggaaagcgtcgcaataagacgcacacgttgtgccgccgctgtggctctaaggcctaccaccttcagaagtcgacctgtggcaaatgtggctaccctgccaagcgcaagagaaagtataactggagtgccaaggctaaaagacgaaataccaccggaactggtcgaatgaggcacctaaaaattgtataccgcagattcaggcatggattccgtgaaggaacaacacctaaacccaagagggcagctgttgcagcatccagttcatcttaagaatgtcaacgattagtcatgcaataaatgttctggttttaaaaaatacatatctggttttggagtttggatcataatacaagagaagcacagggcaaagacactgcataacctcaagaactaagaatggaaggactggccaggcctggtggtgcacacctgtaatcccagctactcaggaggctgaggcgagagaatcgcttgagcctggggggcagaggttgcagtgagctgagagaacggcgggcggcagagcgagactccatctcaaaaaaaaaaaaggataaaggaaggacttaagcaaaatcttccttgtaagtagaaggatgttttgacaagaaaagttgcaatggaaaaatggttctcatgtacacgagtatgtagaataagcatcgtgtgtggattggattcagatc

SEQ ID NO: 5099 - protein, 97 aa, Homo sapiens [sequence omitted]

SEQ ID NO: 5100 - DNA, 1993 bp, Homo sapiens
cagaagcgagatggtgagttgtgactgtggtgtttgtgaatcgcgttccatcctcgtcctttgtgcctctctgtttgctgtgcttggggggctggcaagattccggataaggggaactggtgggctggaaagaggcatgcggtggccctcaagagccagaagaatgactgctaactggtgcctgggggacctatcccgccgtaattgtggtgctagagccgcattgtgtcctttgcctcggtccaacctttggagacctttcacggctctagccttggttgggagccgagggaaggagtttgggaatgtttggctctgtgtaacaatgaaataattcattggtgatgctctctggccggagtctgtaaagataaggtgcatttcagaacattgcaactcttgcggagggttttaggtaacgtgaaatgcgggtagtggtctctgacttggcattcgtggaaagaggcttctcccgcagtttcgatctttacgattgcctttaaattttatcagtaattggtttcccggagaactcgagtaaatctagaagttgccaggtttcagaactatttattcctttaatgtgcagacgaagggaacgtcatcgtttggaaagcgtcgcaataagacgcacacgttgtgccgccgctgtggctctaaggcctaccaccttcagaagtcgacctgtggcaaatgtggctaccctgccaagcgcaagagaaagtataactggagtgccaaggctaaaagacgaaataccaccggaaaacacctaaacccaagagggcagctgttgcagcatccagttcatcttaagaatgtcaacgattagtcatgcaataaatgttctggttttaaaaaatacatatctggttttggtaaggtatttttaatcaattaggcttgtagtatcagtgaaatactgtaggtttagggactgggctagcttcatatcagatttacttgttaagtgactgttttggaatgtttacttttggactgggtttgtaacacggttaaaggcaatgagaaacaagcagaattccaggagtccttgaagcagagggcactggaagacaatatagcagattaaaatagcacagctcatgtggcataggtgggtattttagatgtttgagtaaatttgaaagagtatgatgtttaaattacctttagcaacatgttcatctgctatgctgtcatgactagggggatgattattagtcacatagagcttgggagtaccactggaaacgtatgggtaggagtttaggtggcttctgtttttcaaaagatgatcttatcctagtatctgtaatgctcacttggcacacctgacttgtgggctgtgtgtaaggtggctagctaagtgaaaaaagcctgctaggtgtgagtcaacttaagaatatgtaaataggtttgagaaaaagtagggcttgggtgcaagtaaagattgagcaggaaataaaggaaaatcaagtataatccctgagatttgtagactaaaggcaatgatgtgggactacttggtcgaatttttttagccctcaacttggtaattgggtgtttctgtgttaaagcactgaaacttgctgtcgtgccttcctagttttcgtggtttattgacagggttgggggttttttttgtttttttaaaatgaagggacaaagtcaactggactgctgagtgagagggcaggggcagttgaagggaacatgaattgctggaacagctacataaaatagtgatgtagccaagtcatgctatttaaattataattctccactgtgtttagaataacatctgaggttcttaacctggccttggaagggtatcacttttacttgtaacctggaatggctttataatgtgctagctaattgctactctcatcttgtattttaactcctaatttacccttcaggtctcagcttcagaacattcacttataaagaaaccctgctgattaaatctctcttgggcttcctcccg

SEQ ID NO: 5101 - protein, 64 aa, Homo sapiens; identical to SEQ ID NO: 5079

SEQ ID NO: 5102 - DNA, 1972 bp, Homo sapiens
cagaagcgagatggtgagttgtgactgtggtgtttgtgaatcgcgttccatcctcgtcctttgtgcctctctgtttgctgtgcttggggggctggcaagattccggataaggggaactggtgggctggaaagaggcatgcggtggccctcaagagccagaagaatgactgctaactggtgcctgggggacctatcccgccgtaattgtggtgctagagccgcattgtgtcctttgcctcggtccaacctttggagacctttcacggctctagccttggttgggagccgagggaaggagtttgggaatgtttggctctgtgtaacaatgaaataattcattggtgatgctctctggccggagtctgtaaagataaggtgcatttcagaacattgcaactcttgcggagggttttaggtaacgtgaaatgcgggtagtggtctctgacttggcattcgtggaaagaggcttctcccgcagtttcgatctttacgattgcctttaaattttatcagtaattggtttcccggagaactcgagtaaatctagaagttgccaggtttcagaactatttattcctttaatgtgcagacgaagggaacgtcatcgtttggaaagcgtcgcaataagacgcacacgttgtgccgccgctgtggctctaaggcctaccaccttcagaagtcgacctgtggcaaatgtggctaccctgccaagcgcaagagaaagtgcatggattccgtgaaggaacaacacctaaacccaagagggcagctgttgcagcatccagttcatcttaagaatgtcaacgattagtcatgcaataaatgttctggttttaaaaaatacatatctggttttggtaaggtatttttaatcaattaggcttgtagtatcagtgaaatactgtaggtttagggactgggctagcttcatatcagatttacttgttaagtgactgttttggaatgtttacttttggactgggtttgtaacacggttaaaggcaatgagaaacaagcagaattccaggagtccttgaagcagagggcactggaagacaatatagcagattaaaatagcacagctcatgtggcataggtgggtattttagatgtttgagtaaatttgaaagagtatgatgtttaaattacctttagcaacatgttcatctgctatgctgtcatgactagggggatgattattagtcacatagagcttgggagtaccactggaaacgtatgggtaggagtttaggtggcttctgtttttcaaaagatgatcttatcctagtatctgtaatgctcacttggcacacctgacttgtgggctgtgtgtaaggtggctagctaagtgaaaaaagcctgctaggtgtgagtcaacttaagaatatgtaaataggtttgagaaaaagtagggcttgggtgcaagtaaagattgagcaggaaataaaggaaaatcaagtataatccctgagatttgtagactaaaggcaatgatgtgggactacttggtcgaatttttttagccctcaacttggtaattgggtgtttctgtgttaaagcactgaaacttgctgtcgtgccttcctagttttcgtggtttattgacagggttgggggttttttttgtttttttaaaatgaagggacaaagtcaactggactgctgagtgagagggcaggggcagttgaagggaacatgaattgctggaacagctacataaaatagtgatgtagccaagtcatgctatttaaattataattctccactgtgtttagaataacatctgaggttcttaacctggccttggaagggtatcacttttacttgtaacctggaatggctttataatgtgctagctaattgctactctcatcttgtattttaactcctaatttacccttcaggtctcagcttcagaacattcacttataaagaaaccctgctgattaaatctctcttgggcttcctcccg

SEQ ID NO: 5103 - protein, 52 aa, Homo sapiens; identical to SEQ ID NO: 5075

SEQ ID NO: 5104 - DNA, 1571 bp, Homo sapiens
gcgccccgcaggaagtgcttccctgggcggaagcttctgagcgtgatatagcggaagtgccttctcttccggtctttctggtctcggccgcagaagcgagatgacgaagggaacgtcatcgtttggaaagcgtcgcaataagacgcacacgttgtgccgccgctgtggctctaaggcctaccaccttcagaagtcgacctgtggcaaatgtggctaccctgccaagcgcaagagaaagtataactggagtgccaaggctaaaagacgaaataccaccggaactggtcgaatgaggcacctaaaaattgtataccgcagattcaggcatggattccgtgaaggaacaacacctaaacccaagagggcagctgttgcagcatccagttcatcttaagaatgtcaacgattagtcatgcaataaatgttctggttttaaaaaatacatatctggttttggtaaggtatttttaatcaattaggcttgtagtatcagtgaaatactgtaggtttagggactgggctagcttcatatcagatttacttgttaagtgactgttttggaatgtttacttttggactgggtttgtaacacggttaaaggcaatgagaaacaagcagaattccaggagtccttgaagcagagggcactggaagacaatatagcagattaaaatagcacagctcatgtggcataggtgggtattttagatgtttgagtaaatttgaaagagtatgatgtttaaattacctttagcaacatgttcatctgctatgctgtcatgactagggggatgattattagtcacatagagcttgggagtaccactggaaacgtatgggtaggagtttaggtggcttctgtttttcaaaagatgatcttatcctagtatctgtaatgctcacttggcacacctgacttgtgggctgtgtgtaaggtggctagctaagtgaaaaaagcctgctaggtgtgagtcaacttaagaatatgtaaataggtttgagaaaaagtagggcttgggtgcaagtaaagattgagcaggaaataaaggaaaatcaagtataatccctgagatttgtagactaaaggcaatgatgtgggactacttggtcgaatttttttagccctcaacttggtaattgggtgtttctgtgttaaagcactgaaacttgctgtcgtgccttcctagttttcgtggtttattgacagggttgggggttttttttgtttttttaaaatgaagggacaaagtcaactggactgctgagtgagagggcaggggcagttgaagggaacatgaattgctggaacagctacataaaatagtgatgtagccaagtcatgctatttaaattataattctccactgtgtttagaataacatctgaggttcttaacctggccttggaagggtatcacttttacttgtaacctggaatggctttataatgtgctagctaattgctactctcatcttgtattttaactcctaatttacccttcaggtctcagcttcagaacattcacttataaagaaaccctgctgattaaatctctcttgggcttcctcccg

SEQ ID NO: 5105 - protein, 97 aa, Homo sapiens [sequence omitted]

SEQ ID NO: 5106 - DNA, 1510 bp, Homo sapiens
cagaagcgagatggtgagttgtgactgtggtgtttgtgaatcgcgttccatcctcgtcctttgtgcctctctgtttgctgtgcttggggggctggcaagattccggataaggggaactggtgggctggaaagaggcatgcggtggccctcaagagccagaagaatgactgctaactggtgcctgggggacctatcccgccgtaattgtggtgctagagccgcattgtgtcctttgcctcggtccaacctttggagacctttcacggctctagccttggttgggagccgagggaaggagtttgggaatgtttggctctgtgtaacaatgaaataattcattggtgatgctctctggccggagtctgtaaagataaggtgcatttcagaacattgcaactcttgcggagggttttaggtaacgtgaaatgcgggtagtggtctctgacttggcattcgtggaaagaggcttctcccgcagtttcgatctttacgattgcctttaaattttatcagtaattggtttcccggagaactcgagtaaatctagaagttgccaggtttcagaactatttattcctttaatgtgcagacgaagggaacgtcatcgtttggaaagcgtcgcaataagacgcacacgttgtgccgccgctgtggctctaaggcctaccaccttcagaagtcgacctgtggcaaatgtggctaccctgccaagcgcaagagaaagtataactggagtgccaaggctaaaagacgaaataccaccggaaaacacctaaacccaagagggcagctgttgcagcatccagttcatcttaagaatgtcaacgattagtcatgcaataaatgttctggttttaaaaaatacatatctggttttggtaaggtatttttaatcaattaggcttgtagtatcagtgaaatactgtaggtttagggactgggctagcttcatatcagatttacttgttaagtgactgttttggaatgtttacttttggactgggtttgtaacacggttaaaggcaatgagaaacaagcagaattccaggagtccttgaagcagagggcactggaagacaatatagcagattaaaatagcacagctcatgtggcataggtgggtattttagatgtttgagtaaatttgaaagagtatgatgtttaaattacctttagcaacatgttcatctgctatgctgtcatgactagggggatgattattagtcacatagagcttgggagtaccactggaaacgtatgggtaggagtttaggtggcttctgtttttcaaaagatgatcttatcctagtatctgtaatgctcacttggcacacctgacttgtgggctgtgtgtaaggtggctagctaagtgaaaaaagcctgctaggtgtgagtcaacttaagaatatgtaaataggtttgagaaaaagtagggcttgggtgcaagtaaagattgagcaggaaataaaggaaaatcaagtataatccctgagatttgtagactaaaggc

SEQ ID NO: 5107 - protein, 64 aa, Homo sapiens; identical to SEQ ID NO: 5079

SEQ ID NO: 5108 - DNA, 1489 bp, Homo sapiens
cagaagcgagatggtgagttgtgactgtggtgtttgtgaatcgcgttccatcctcgtcctttgtgcctctctgtttgctgtgcttggggggctggcaagattccggataaggggaactggtgggctggaaagaggcatgcggtggccctcaagagccagaagaatgactgctaactggtgcctgggggacctatcccgccgtaattgtggtgctagagccgcattgtgtcctttgcctcggtccaacctttggagacctttcacggctctagccttggttgggagccgagggaaggagtttgggaatgtttggctctgtgtaacaatgaaataattcattggtgatgctctctggccggagtctgtaaagataaggtgcatttcagaacattgcaactcttgcggagggttttaggtaacgtgaaatgcgggtagtggtctctgacttggcattcgtggaaagaggcttctcccgcagtttcgatctttacgattgcctttaaattttatcagtaattggtttcccggagaactcgagtaaatctagaagttgccaggtttcagaactatttattcctttaatgtgcagacgaagggaacgtcatcgtttggaaagcgtcgcaataagacgcacacgttgtgccgccgctgtggctctaaggcctaccaccttcagaagtcgacctgtggcaaatgtggctaccctgccaagcgcaagagaaagtgcatggattccgtgaaggaacaacacctaaacccaagagggcagctgttgcagcatccagttcatcttaagaatgtcaacgattagtcatgcaataaatgttctggttttaaaaaatacatatctggttttggtaaggtatttttaatcaattaggcttgtagtatcagtgaaatactgtaggtttagggactgggctagcttcatatcagatttacttgttaagtgactgttttggaatgtttacttttggactgggtttgtaacacggttaaaggcaatgagaaacaagcagaattccaggagtccttgaagcagagggcactggaagacaatatagcagattaaaatagcacagctcatgtggcataggtgggtattttagatgtttgagtaaatttgaaagagtatgatgtttaaattacctttagcaacatgttcatctgctatgctgtcatgactagggggatgattattagtcacatagagcttgggagtaccactggaaacgtatgggtaggagtttaggtggcttctgtttttcaaaagatgatcttatcctagtatctgtaatgctcacttggcacacctgacttgtgggctgtgtgtaaggtggctagctaagtgaaaaaagcctgctaggtgtgagtcaacttaagaatatgtaaataggtttgagaaaaagtagggcttgggtgcaagtaaagattgagcaggaaataaaggaaaatcaagtataatccctgagatttgtagactaaaggc

SEQ ID NO: 5109 - protein, 52 aa, Homo sapiens; identical to SEQ ID NO: 5075

SEQ ID NO: 5110 - DNA, 1066 bp, Homo sapiens
ctgggcggaagcttctgagcgtgatatagcggaagtgccttctcttccggtctttctggtctcggccgcagaagcgagatgacgaagggaacgtcatcgtttggaaagcgtcgcaataagacgcacacgttgtgccgccgctgtggctctaaggcctaccaccttcagaagtcgacctgtggcaaatgtggctaccctgccaagcgcaagagaaagtataactggagtgccaaggctaaaagacgaaataccaccggaactggtcgaatgaggcacctaaaaattgtataccgcagattcaggcatggattccgtgaaggaacaacacctaaacccaagagggcagctgttgcagcatccagttcatcttaagaatgtcaacgattagtcatgcaataaatgttctggttttaaaaaatacatatctggttttggtaaggtatttttaatcaattaggcttgtagtatcagtgaaatactgtaggtttagggactgggctagcttcatatcagatttacttgttaagtgactgttttggaatgtttacttttggactgggtttgtaacacggttaaaggcaatgagaaacaagcagaattccaggagtccttgaagcagagggcactggaagacaatatagcagattaaaatagcacagctcatgtggcataggtgggtattttagatgtttgagtaaatttgaaagagtatgatgtttaaattacctttagcaacatgttcatctgctatgctgtcatgactagggggatgattattagtcacatagagcttgggagtaccactggaaacgtatgggtaggagtttaggtggcttctgtttttcaaaagatgatcttatcctagtatctgtaatgctcacttggcacacctgacttgtgggctgtgtgtaaggtggctagctaagtgaaaaaagcctgctaggtgtgagtcaacttaagaatatgtaaataggtttgagaaaaagtagggcttgggtgcaagtaaagattgagcaggaaataaaggaaaatcaagtataatccctgagatttgtagactaaaggc

SEQ ID NO: 5111 - protein, 97 aa, Homo sapiens [sequence omitted]

SEQ ID NO: 5112 - DNA, 521 bp, Homo sapiens
gatggtgagttgtgactgtggtgtttgtgaatcgcgttccatcctcgtcctttgtgcctctctgtttgctgtgcttggggggctggcaagattccggataaggggaactggtgggctggaaagaggcatgcggtggccctcaagagccagaagaatgactgctaactgacgaagggaacgtcatcgtttggaaagcgtcgcaataagacgcacacgttgtgccgccgctgtggctctaaggcctaccaccttcagaagtcgacctgtggcaaatgtggctaccctgccaagcgcaagagaaagtataactggagtgccaaggctaaaagacgaaataccaccggaactggtcgaatgaggcacctaaaaattgtataccgcagattcaggcatggattccgtgaaggaacaacacctaaacccaagagggcagctgttgcagcatccagttcatcttaagaatgtcaacgattagtcatgcaataaatgttctggttttaaaaaatacatatctggttttg

SEQ ID NO: 5113 - protein, 34 aa, Homo sapiens
MRHLKIVYRRFRHGFREGTTPKPKRAAVAASSSS

SEQ ID NO: 5114 - DNA, 506 bp, Homo sapiens
ctcttgaccccacctacactacgacgacggacgctcgagaacgctgcaccgcgccccgcaggaagtgcttccctgggcggaagcttctgagcgtgatatagcggaagtgccttctcttccggtctttctggtctcggccgcagaagcgagatgacgaagggaacgtcatcgtttggaaagcgtcgcaataagacgcacacgttgtgccgccgctgtggctctaaggcctaccaccttcagaagtcgacctgtggcaaatgtggctaccctgccaagcgcaagagaaagtataactggagtgccaaggctaaaagacgaaataccaccggaactggtcgaatgaggcacctaaaaattgtataccgcagattcaggcatggattccgtgaaggaacaacacctaaacccaagagggcagctgttgcagcatccagttcatcttaagaatgtcaacgattagtcatgcaataaatgttctggttttaaaaaatacatatctggttttg

SEQ ID NO: 5115 - protein, 97 aa, Homo sapiens [sequence omitted]

SEQ ID NO: 5116 - DNA, 945 bp, Homo sapiens
ctttctggtctcggccgcagaagcgagatggtgagttgtgactgtggtgtttgtgaatcgcgttccatcctcgtcctttgtgcctctctgtttgctgtgcttggggggctggcaagattccggataaggggaactggtgggctggaaagaggcatgcggtggccctcaagagccagaagaatgactgctaactggtgcctgggggacctatcccgccgtaattgtggtgctagagccgcattgtgtcctttgcctcggtccaacctttggagacctttcacggctctagccttggttgggagccgagggaaggagtttgggaatgtttggctctgtgtaacaatgaaataattcattggtgatgctctctggccggagtctgtaaagataaggtgcatttcagaacattgcaactcttgcggagggttttaggtaacgtgaaatgcgggtagtggtctctgacttggcattcgtggaaagaggcttctcccgcagtttcgatctttacgattgcctttaaattttatcagtaattggtttcccggagaactcgagtaaatctagaagttgccaggtttcagaactatttattcctttaatgtgcagacgaagggaacgtcatcgtttggaaagcgtcgcaataagacgcacacgttgtgccgccgctgtggctctaaggcctaccaccttcagaagtcgacctgtggcaaatgtggctaccctgccaagcgcaagagaaagtataactggagtgccaaggctaaaagacgaaataccaccggaactggtcgaatgaggcacctaaaaattgtataccgcagattcaggcatggattccgtgaaggaacaacacctaaacccaagagggcagctgttgcagcatccagttcatcttaagaatgtcaacgattagtcatgcaataaatgttctggttttaaaaaata

SEQ ID NO: 5117 - protein, 65 aa, Homo sapiens; identical to SEQ ID NO: 5077

SEQ ID NO: 5118 - DNA, 1213 bp, Homo sapiens
cagaagcgagatggtgagttgtgactgtggtgtttgtgaatcgcgttccatcctcgtcctttgtgcctctctgtttgctgtgcttggggggctggcaagattccggataaggggaactggtgggctggaaagaggcatgcggtggccctcaagagccagaagaatgactgctaactggtgcctgggggacctatcccgccgtaattgtggtgctagagccgcattgtgtcctttgcctcggtccaacctttggagacctttcacggctctagccttggttgggagccgagggaaggagtttgggaatgtttggctctgtgtaacaatgaaataattcattggtgatgctctctggccggagtctgtaaagataaggtgcatttcagaacattgcaactcttgcggagggttttaggtaacgtgaaatgcgggtagtggtctctgacttggcattcgtggaaagaggcttctcccgcagtttcgatctttacgattgcctttaaattttatcagtaattggtttcccggagaactcgagtaaatctagaagttgccaggtttcagaactatttattcctttaatgtgcagacgaagggaacgtcatcgtttggaaagcgtcgcaataagacgcacacgttgtgccgccgctgtggctctaaggcctaccaccttcagaagtcgacctgtggcaaatgtggctaccctgccaagcgcaagagaaagtataactggagtgccaaggctaaaagacgaaataccaccggaactggtcgaatgaggcacctaaaaattgtataccgcagattcaggtacagtttgtatgttcgatcataattggtccagtgggcttgaatgaaaccctcgtgtttacttgtaaaaagataacagtaccctgatggttactggggatgagatgttggaagctttttatttattgttgtttttgaggcagggtttcactatgttgcccaggcttgagtgtagtggcacgatcacggctcagtgcagcctcagtctccccagcctcaggtaatctcatctcagccgcccgagtacccgggactacaggtgtgcgctgccacatgcccagctaatttttgtatttattgtagagaatgggatattgtcatgttacccaggataatctcggaactcctgggctcaggccagatgttgaaagcttttatcttctgccgctgtaaccttgacatc

SEQ ID NO: 5119 - protein, 65 aa, Homo sapiens; identical to SEQ ID NO: 5077

SEQ ID NO: 5120 - DNA, 4210 bp, Homo sapiens
ccggatcagagagtgctccgagctgggttgccccactgtgcttgtatctgcactctccaacactaggcatcattgacatgttaaagcttagccaaatagaattgttctttgtcattctttttttaacttttacttattcattaggatgatttcataatatatttcctggtttagaggaaacaggaacaatggctaccgagagtactccctcagagatcatagaaagagaaagaaaaaagttgcttgaaatccttcaacatgatcctgattctatcttagacacgttaacttctcggaggctgatttctgaggaagagtatgagactctggagaatgttacagatctcctgaagaaaagtcggaagctgttaattttggtacagaaaaagggagaggcgacctgtcagcattttctcaagtgtttatttagtacttttccacagtcagctgccatttgcggcttaaggcatgaagttttaaaacatgagaatacagtacctcctcaatctatgggggcaagcagtaattcagaagatgctttttctcctggaataaaacagcctgaagcccctgagatcacagtgttcttcagtgagaaggaacacttggatttggaaacctctgagtttttcagggacaagaaaactagttatagggaaacagctttgtctgccaggaagaatgagaaggaatatgacacaccagaagtcacattatcatattcagttgagaaagttggatgtgaagttccagcaactattacatatataaaagatggacagagatatgaggagctagatgattctttatacttaggaaaagaggaatatctaggatctgttgacacccctgaagatgcagaagccactgtggaagaggaggtttatgatgacccagagcacgttggatatgatggtgaagaggacttcgagaattcagaaaccacagagttctctggtgaagaaccaagttatgagggatcagaaaccagcctttcattggaggaggaacaggagaaaagtatagaagaaagaaaaaaggtgtttaaagatgtcctgttatgtttgaacatggatagaagcagaaaggttctgccagattttgttaaacaattctccttagatcgaggatgtaagtggacccctgagagtccaggagacttagcctggaatttcctgatgaaagttcaagcacgagatgtgaccgctagggattcaatcctcagtcacaaggttctggatgaagatagcaaggaggatttgctggctggagtggagaatttggaaattcgagacatacaaaccattaatccccttgacgtgctttgtgccaccatgctgtgttcagatagctctttgcaacgccaagtcatgtcaaacatgtatcagtgccagtttgctcttcccctgctactgccagatgcagaaaacaacaaaagcatcttaatgctgggggccatgaaagacattgtgaagaagcagtcaacacagttttcaggggggcctacagaggatacagaaaagtttctgactctcatgaagatgcctgtcatctcttttgtgcgtctaggatactgtagcttctctaagtccagaatcctcaacacacttctcagccctgcccagttgaaattacacaaaatctttcttcatcaagatttgcctcttttggtgcttccccggcaaatctctgatggcctggttgagataacatggtgttttcctgatagcgatgatagaaaggaaaacccctttttccaaaagcctgttgctctggctaatctccgtggaaatctagaaagcttttggactcagtttggttttttgatggaagtttcttcagctgtgttttttttcactgactgtttaggtgagaaggaatgggacttgctaatgtttttaggagaggctgccattgaaagatgctactttgttctcagttcccaagccagggagagtgaagaggctcaaatttttcagaggatactgaacttgaagccagcacagctactgttttgggagaggggagatgctggggatagaaggaagaacatggagggccttcaagctgccctccaggaagtgatgttctcttcttgcctcagatgtgtgtctgtggaggatatggccgccctggccagggagctggggattcaggtagatgaagactttgaaaacactcagagaattcaagtttcctctggagaaaacatggctgggacagctgaaggtgagggtcagcaaagacacagtcagctaaaaagctcatctaaaagccaggctctaatgccaattcaagagcctgggactcaatgtgagctcagccagaatcttcagaatctctatggtaccccagtattcaggcctgttctagagaactcctggctctttccaaccagaattggaggtaactttaaccatgtttccttgaaagcctcctgggttatgggccgcccctttgggtcagagcagaggcctaagtggttccatcctttgccttttcagaatgcaggggcccagggccgaggtaaaagttttggtattcaatccttccatccccagatattttattcaggtgaaagattcatgaaattttccagagttgctcggggatgtcactcgaatggaacatttgggagactgccaagacccatttgtcagcatgtacaggcctgccctgagagaccacaaatgatgggaactcttgaaaggtctagggcagtagcctccaagataggtcactcctattccctggattcacagccagcaagagcagtagggaagccatggcctcagcaagcttgcaccagggtaacagagttaactgaagcaactggaaaactgataagaacatcccatattggaaagcctcaccctcagtcctttcaaccagcagcagccacacaaaaactaagacctgcttctcagcaaggagtccagatgaagacacaaggtggggcttcaaatccagctctccaaatagggtcccatcccatgtgcaagagctctcagttcaaatccgatcagtccaacccatccacagtcaaacactcccagcctaaacccttccattctgtgccctctcaacctaaatcctctcagacaaaatcctgtcagtcccagccctcccaaactaaaccttctccatgcaaatctactcagcctaagccaagccagccctggcctccccagtctaagccttctcagcccagaccccctcaacctaagtcatcctcaaccaatccttcacaagctaaggcacaccactcaaaagcagggcagaagaggggagggaagcattaaagagctaactccagagatctataaagcatatcctttacccaggccattcctatcatatagtaagcagaagagttgccatgaaagtaaaagactactgtcattagcatgtaaaacaaagaaagatatacatgactgaattggatatctttgtttgtttgtttgagacagagtttcactcttgttgcccaggctggagtgcaatggcacgatctcggctcaccgcaacctctgcttcctggcttaaagtgattctcctgcctcagcctctcgagtagctgggattacaggcatgcaccaccacacccagctaattttgtatttttagtagaggcagggtttctccatgttggtcaggctggtcttgaactcccgacctcaggtgatccgcccacctaggcctctcaaagtgttgggattacgtgtgtaagccacagtgcccagcccgaattggatatctttaagatatctgtaagtgttatatccctaaccaagaagaaaaatatgaaaataattaagactagaatcaagcagtagataattgaatccaatcttgggtattattagataatgtataacttgcacccagggaatgggggtctatgagacaaccccacttggagaagaatggggttagggtctctaattgcaaagtgactgtacaataggacgaaagttgcctctgtgtctgagaaagtatcttagttgttggctgctccagaggtatctttgtcaaaagcttctggttcaatatcagccactgagcagataaccctgcttatttggtgtggttaaatcaactagcttctgctaatagccccaatttgcttgaatgggaaaactctctcatttgacccttataggtagaaataatgaattaacaaccaataaaattaatcatttggcattaa

SEQ ID NO: 5121 - protein, 1037 aa, Homo sapiens; identical to SEQ ID NO: 642

SEQ ID NO: 5122 - DNA, 499 bp, Homo sapiens
ctcaccctcagtcctttcaaccagcagcagccacacaaaaactaagacctgcttctcagcaaggagtccagatgaagacacaaggtggggcttcaaatccagctctccaaatagggtcccatcccatgtgcaagagctctcagttcaaatccgatcagtccaacccatccacagtcaaacactcccagcctaaacccttccattctgtgccctctcaacctaaatcctctcagacaaaatcctgtcagtcccagccctcccaaactaaaccttctccatgcaaatctactcagcctaagccaagccagccctggcctccccagtcaaaagcttctggttcaatatcagccactgagcagataaccctgcttatttggtgtggttaaatcaactagcttctgctaatagccccaatttgcttgaatgggaaaactctctcatttgacccttataggtagaaataatgaattaacaaccaataaaattaatcatttggcat

SEQ ID NO: 5123 - protein, 104 aa, Homo sapiens
MKTQGGASNPALQIGSHPMCKSSQFKSDQSNPSTVKHSQPKPFHSVPSQPKSSQTKSCQSQPSQTKPSPCKSTQPKPSQPWPPQSKASGSISATEQITLLIWCG

SEQ ID NO: 5124 - DNA, 2896 bp, Homo sapiens
ggagaatccggttggggtaggagctaaatctcaggaccacttgctctatatatgagtgccaagataatctagagcagggagaggcagagaggcaggcagcctgctgggctcttcctgctgttgaaaacttacccggcccttacagaggaaatcttcctcctctcttctgccctgaatgttttcccaaacatgaaggtgataagcttattcattttggtgggatttataggagagttccaaagtttttcaagtgcctcctctccagtcaactgccagtgggacttctatgccccttggtcagaatgcaatggctgtaccaagactcagactcgcaggcggtcagttgctgtgtatgggcagtatggaggccagccttgtgttggaaatgcttttgaaacacagtcctgtgaacctacaagaggatgtccaacagaggagggatgtggagagcgtttcaggtgcttttcaggtcagtgcatcagcaaatcattggtttgcaatggggattctgactgtgatgaagacagtgctgatgaagacagatgtgaggactcagaaaggagaccttcctgtgatatcgataaacctcctcctaacatagaacttactggaaatggttacaatgaactcactggccagtttaggaacagagtcatcaataccaaaagttttggtggtcaatgtagaaaggtgtttagtggggatggaaaagatttctacaggctgagtggaaatgtcctgtcctatacattccaggtgaaaataaataatgattttaattatgaattttacaatagtacttggtcttatgtaaaacatacgtcgacagaacacacatcatctagtcggaagcgctccttttttagatcttcatcatcttcttcacgcagttatacttcacataccaatgaaatccataaaggaaagagttaccaactgctggttgttgagaacactgttgaagtggctcagttcattaataacaatccagaatttttacaacttgctgagccattctggaaggagctttcccacctcccctctctgtatgactacagtgcctaccgaagattaatcgaccagtacgggacacattatctgcaatctgggtcgttaggaggagaatacagagttctattttatgtggactcagaaaaattaaaacaaaatgattttaattcagtcgaagaaaagaaatgtaaatcctcaggttggcattttgtcgttaaattttcaagtcatggatgcaaggaactggaaaacgctttaaaagctgcttcaggaacccagaacaatgtattgcgaggagaaccgttcatcagagggggaggtgcaggcttcatatctggccttagttacctagagctggacaatcctgctggaaacaaaaggcgatattctgcctgggcagaatctgtgactaatcttcctcaagtcataaaacaaaagctgacacctttatatgagctggtaaaggaagtaccttgtgcctctgtgaaaaaactatacctgaaatgggctcttgaagagtatctggatgaatttgacccctgtcattgccggccttgtcaaaatggtggtttggctactgttgaggggacccattgtctgtgccattgcaaaccgtacacatttggtgcggcgtgtgagcaaggagtcctcgtagggaatcaagcaggaggggttgatggaggttggagttgctggtcctcttggagcccctgtgtccaagggaagaaaacaagaagccgtgaatgcaataacccacctcccagtgggggtgggagatcctgcgttggagaaacgacagaaagcacacaatgcgaagatgaggagctggagcacttgaggttgcttgaaccacattgctttcctttgtctttggttccaacagaattctgtccatcacctcctgccttgaaagatggatttgttcaagatgaaggtacaatgtttcctgtggggaaaaatgtagtgtacacttgcaatgaaggatactctcttattggaaacccagtggccagatgtggagaagatttacggtggcttgttggggaaatgcattgtcagaaaattgcctgtgttctacctgtactgatggatggcatacagagtcacccccaaaaacctttctacacagttggtgagaaggtgactgtttcctgttcaggtggcatgtccttagaaggtccttcagcatttctctgtggctccagccttaagtggagtcctgagatgaagaatgcccgctgtgtacaaaaagaaaatccgttaacacaggcagtgcctaaatgtcagcgctgggagaaactgcagaattcaagatgtgtttgtaaaatgccctacgaatgtggaccttccttggatgtatgtgctcaagatgagagaagcaaaaggatactgcctctgacagtttgcaagatgcatgttctccactgtcagggtagaaattacacccttactggtagggacagctgtactctgcctgcctcagctgagaaagcttgtggtgcctgcccactgtggggaaaatgtgatgctgagagcagcaaatgtgtctgccgagaagcatcggagtgcgaggaagaagggtttagcatttgtgtggaagtgaacggcaaggagcagacgatgtctgagtgtgaggcgggcgctctgagatgcagagggcagagcatctctgtcaccagcataaggccttgtgctgcggaaacccagtaggctcctggaggccctggtcagcttgcttggaatccagcaggcagctggggctgagtgaaaacatctgcacaactgggcactggacagcttttccttcttctccagtgtctaccttcctcctcaactcccagccatctgtataaacacaatcctttgttctcccaaatctgaatcg

SEQ ID NO: 5125 - protein, 843 aa, Homo sapiens; identical to SEQ ID NO: 644

SEQ ID NO: 5126 - DNA, 4091 bp, Homo sapiens
ggagaatccggttggggtaggagctaaatctcaggaccacttgctctatatatgagtgccaagataatctagagcagggagaggcagagaggcaggcagcctgctgggctcttcctgctgttgaaaacttacccggcccttacagaggaaatcttcctcctctcttctgccctgaatgttttcccaaacatgaaggtgataagcttattcattttggtgggatttataggagagttccaaagtttttcaagtgcctcctctccagtcaactgccagtgggacttctatgccccttggtcagaatgcaatggctgtaccaagactcagactcgcaggcggtcagttgctgtgtatgggcagtatggaggccagccttgtgttggaaatgcttttgaaacacagtcctgtgaacctacaagaggatgtccaacagaggagggatgtggagagcgtttcaggtgcttttcaggtcagtgcatcagcaaatcattggtttgcaatggggattctgactgtgatgaagacagtgctgatgaagacagatgtgaggactcagaaaggagaccttcctgtgatatcgataaacctcctcctaacatagaacttactggaaatggttacaatgaactcactggccagtttaggaacagagtcatcaataccaaaagttttggtggtcaatgtagaaaggtgtttagtggggatggaaaagatttctacaggctgagtggaaatgtcctgtcctatacattccaggtgaaaataaataatgattttaattatgaattttacaatagtacttggtcttatgtaaaacatacgtcgacagaacacacatcatctagtcggaagcgctccttttttagatcttcatcatcttcttcacgcagttatacttcacataccaatgaaatccataaaggaaagagttaccaactgctggttgttgagaacactgttgaagtggctcagttcattaataacaatccagaatttttacaacttgctgagccattctggaaggagctttcccacctcccctctctgtatgactacagtgcctaccgaagattaatcgaccagtacgggacacattatctgcaatctgggtcgttaggaggagaatacagagttctattttatgtggactcagaaaaattaaaacaaaatgattttaattcagtcgaagaaaagaaatgtaaatcctcaggttggcattttgtcgttaaattttcaagtcatggatgcaaggaactggaaaacgctttaaaagctgcttcaggaacccagaacaatgtattgcgaggagaaccgttcatcagagggggaggtgcaggcttcatatctggccttagttacctagagctggacaatcctgctggaaacaaaaggcgatattctgcctgggcagaatctgtgactaatcttcctcaagtcataaaacaaaagctgacacctttatatgagctggtaaaggaagtaccttgtgcctctgtgaaaaaactatacctgaaatgggctcttgaagagtatctggatgaatttgacccctgtcattgccggccttgtcaaaatggtggtttggctactgttgaggggacccattgtctgtgccattgcaaaccgtacacatttggtgcggcgtgtgagcaaggagtcctcgtagggaatcaagcaggaggggttgatggaggttggagttgctggtcctcttggagcccctgtgtccaagggaagaaaacaagaagccgtgaatgcaataacccacctcccagtgggggtgggagatcctgcgttggagaaacgacagaaagcacacaatgcgaagatgaggagctggagcacttgaggttgcttgaaccacattgctttcctttgtctttggttccaacagaattctgtccatcacctcctgccttgaaagatggatttgttcaagatgaaggtacaatgtttcctgtggggaaaaatgtagtgtacacttgcaatgaaggatactctcttattggaaacccagtggccagatgtggagaagatttacggtggcttgttggggaaatgcattgtcagaaaattgcctgtgttctacctgtactgatggatggcatacagagtcacccccaaaaacctttctacacagttggtgagaaggtgactgtttcctgttcaggtggcatgtccttagaaggtccttcagcatttctctgtggctccagccttaagtggagtcctgagatgaagaatgcccgctgtgtacaaaaagaaaatccgttaacacaggcagtgcctaaatgtcagcgctgggagaaactgcagaattcaagatgtgtttgtaaaatgccctacgaatgtggaccttccttggatgtatgtgctcaagatgagagaagcaaaaggatactgcctctgacagtttgcaagatgcatgttctccactgtcagggtagaaattacacccttactggtagggacagctgtactctgcctgcctcagctgagaaagcttgtggtgcctgcccactgtggggaaaatgtgatgctgagagcagcaaatgtgtctgccgagaagcatcggagtgcgaggaagaagggtttagcatttgtgtggaagtgaacggcaaggagcagacgatgtctgagtgtgaggcgggcgctctgagatgcagagggcagagcatctctgtcaccagcataaggccttgtgctgcggaaacccagtaggctcctggaggccctggtcagcttgcttggaatccagcaggcagctggggctgagtgaaaacatctgcacaactgggcactggacagcttttccttcttctccagtgtctaccttcctcctcaactcccagccatctgtataaacacaatcctttgttctcccaaatctgaatcgaattactcttttgcctcctttttaatgtcagtaaggatatgagcctttgcacaggctggctgcgtgttcttgaaataggtgttaccttctctgggccttggttttttaaaatctgtaaaattagaggattgcactagagaaacttgaatgctccattcaggcctatcattttattaagtatgattgacacagcccatgggccagaacacactctacaaaatgactaggataacagaaagaacgtgatctcctgattagagagggtggttttcctcaatggaaccaaatataaagaggacttgaacaaaaatgacagatacaaactatttctatcctgagtagtaatctcacacttcatcctatagagtcaaccaccacagataggaattccttattctttttttaatttttttaagacagagtctcactttgttgcccaggctggagcgcagtggggtgatctcatctccctgcaacctccgcctcctgggttcaagcgattcttgtgcctcagcttcccaagcagctgggattacaggtgcccgccaccacgcccagctaatttttgcatttttagtagagatggggtttcaccatgttggccacgctcgtctccaactcctgacctcaggtaatccgcctgccttggcctcccaaagtgctgggattacagacatgaaccaccacgcctggctggaatacttactcttgtcgggagattgaaccactaaaatgttagagcagaattcattatgctgtggtcacaggggtgtcttgtctgagaacaaatacaattcagtcttctctttggggttttagtatgtgtcaaacataggactggaagtttgcccctgttcttttttcttttgaaagaacatcagttcatgcctgaggcatgagtgactgtgcatttgagaatagttttccctattctgtggatacagtcccagagttttcagggagtacacaggtagattagtttgaagcattgaccttttatttattccttatttctctttcatcaaaacaaaacagcagctgtgggaggagaaatgagagggcttaaatgaaatttaaaataagctatattatacaaatactatctctgtattgttctgaccctggtaaatatatttcaaaacttcagatgacaaggattagaacactcattaaagatgctattcttcagaattgt

SEQ ID NO: 5127 - protein, 843 aa, Homo sapiens; identical to SEQ ID NO: 644

SEQ ID NO: 5128 - DNA, 568 bp, Homo sapiens
aagataatctagagcagggagaggcagagaggcaggcagcctgctgggctcttcctgctgttgaaaacttacccggcccttacagaggaaatcttcctcctctcttctgccctgaatgttttcccaaacatgaaggtgataagcttattcattttggtgggatttataggagagttccaaagtttttcaagtgcctcctctccagtcaactgccagtgggacttctatgccccttggtcagaatgcaatggctgtaccaagactcagactcgcaggcggtcagttgctgtgtatgggcagtatggaggccagccttgtgttggaaatgcttttgaaacacagtcctgtgaacctacaagaggatgtccaacagaggagggatgtggagagcgtttcaggtgcttttcagaacaatgtattgcgaggagaaccgttcatcagagggggaggtgcaggcttcatatctggccttagttacctagagctggacaatcctgctggaaacaaaaggcgatattctgcctgggcagaatctgtgactaatcttcctcaagtcataaaacaaaag

SEQ ID NO: 5129 - protein, 114 aa, Homo sapiens
MKVISLFILVGFIGEFQSFSSASSPVNCQWDFYAPWSECNGCTKTQTRRRSVAVYGQYGGQPCVGNAFETQSCEPTRGCPTEEGCGERFRCFSEQCIARRTVHQRGRCRLHIWP

SEQ ID NO: 5130 - DNA, 2514 bp, Homo sapiens
acatgctctgtctggccctgtgaatcctcactcacccattcagatttctgttggtgtaaagcgacattccagctgctgaagctccgtgatctgctgtgtttttccagcccagatccaaggcagacctggatgctttttgccattctgatggtaaatgatgagacaggctaccatggatttcagcaccccttctgtgtttgatcagcaaagaggtgactcatctgaggaagttgacctgaccatggtttatcaagcagcctctaatggagatgtcaatgctctgactgcagtgattcgggaagacccttctatcctagaatgctgtgacagtgaaggatgcacgcccttgatgcatgcggtttctggacgtcaagcggacacagtgaagctgctgttgaagatgggagccaatattaacatgcaggatgcttatggccgcacaagtttatgcctggccacctacctgggctggcttgaaggctgtgtgagtctactcagaaacggtgccaagcacaatatcccagataaaaatggccgcctgccactgcatgctgccactgctgagcccgatatgaggctcctcacggtcctgttgcaacagtcgaacatcagcgagattaatcaccaggacaatgagggaatgacaccactccactgggcggctttccacaaccagcctcaacacacacaaatgctgctgaagaagggggcagaccccacccttgtggataaagactttaaaaccgctctccactgggcagtccagagtggaaataggattctgtgctccatcattctgagccatcaccaggggccgtccataatcaactatgatgatgagagtgggaagacatgtgtacatatcgcagcggcagcgggcttcagcgatattattcatgagctggcaagagtccctgagtgtaacctgcaggctctggatgtggatgacaggacacctctgcactgggctgcagctgcagggaaggccgaatgtgtccagtcactgctggagttgggaatggacagcaacctgcgggacatcaatgagagcacgcccttggcctatgccctgtactgcggtcacacggcgtgtgtcaaactcctctcccaagagagcagaacagagcctactcgaccccctccctcccagagcagtcggccccagaagaaggagagacggttcaacgtgctcaaccaaatattctgcaaaaacaagaaagaagagcagagagcccatcagaaggatcccagcagggaccgatacagagaggaggacacctcagaagtcaatgacatcatcaccacctttgatagcatcgtgggtaccaactgccaagaacagcctggtgatcaggtggctatggttgaatttaagaagaaaacctcagacaattcaaaatatctcttaccagaaaagaaaccgctggcccgtaaggggcttccaccaatcagaacgcagagtctcccacccatcaccctgggcaataacttcctaacagcctcccatagggccacttcccatgcaggcctgagctctgctcctcatcatatggcccagcgatctcagaaaagtcgaagtgagcaggatttattaaataacagaactggctgccagatgttactagataacccctggaagagtgattctaatcaggtattttcctacaaagtttggactgtgtcttcttctgataagctgctggacagattgctcagtgtccggcctggtcaccaagaggtctccgtgccaccacaccttcgccatctacataatccatcatcaggacaaaattttcagcatctttccccaaacagacacaaaatcagggatcttcctttcactcggaacaacctagctcccctaccagatcaaaaatttctatctggagaacctctgcggacaaaccgagtgcttcctgcaattccaagtcaacgaagacacagcacagcagcagaagagagtgaacattctgccaaccccaccagtgatgaaaattaactgtgggccactcgctgcagaaatgtagatgaatatgtattttcaactctcaaaggacaagattactccagtttgtaagaacgaagaccaatttagtaagctgcattctataagccatcagttttataactcgaaattctttattccaaataaagatactccctaaataagcacttagaatatttgggtgtgcatattaagtctgtgaatttctgtgacttccacatgccaaaattaaaagacaaaatatgttatcagtaggaaaactgagctatgtttggtttgctttgtggcatgtgcactgtttttttgttattgttctttggttgtttttttgctgaatgattttatgttttgggaaaaaaagtacgctttgctgaataaaagcaaaaaacaaaacaaaaaaaaaaccacatcccagacaaacatgtcttcacatttattgtcattctaacttgaactaatgaaacctatttaaaaataaattcctatgatcagtcacagtttacggcttt

SEQ ID NO: 5131 - protein, 614 aa, Homo sapiens; identical to SEQ ID NO: 648

SEQ ID NO: 5132 - DNA, 2270 bp, Homo sapiens
acatgctctgtctggccctgtgaatcctcactcacccattcagatttctgttggtgtaaagcgacattccagctgctgaagctccgtgatctgctgtgtttttccagcccagatccaaggcagacctggatgctttttgccattctgatggtaaatgatgagacaggctaccatggatttcagcaccccttctgtgtttgatcagcaaagaggtgactcatctgaggaagttgacctgaccatggtttatcaagcagcctctaatggagatgtcaatgctctgactgcagtgattcgggaagacccttctatcctagaatgctgtgacagtgaaggatgcacgcccttgatgcatgcggtttctggacgtcaagcggacacagtgaagctgctgttgaagatgggagccaatattaacatgcaggatgcttatggccgcacaagtttatgcctggccacctacctgggctggcttgaaggctgtgtgagtctactcagaaacggtgccaagcacaatatcccagataaaaatggccgcctgccactgcatgctgccactgctgagcccgatatgaggctcctcacggtcctgttgcaacagtcgaacatcagcgagattaatcaccaggacaatgagggaatgacaccactccactgggcggctttccacaaccagcctcaacacacacaaatgctgctgaagaagggggcagaccccacccttgtggataaagactttaaaaccgctctccactgggcagtccagagtggaaataggattctgtgctccatcattctgagccatcaccaggggccgtccataatcaactatgatgatgagagtgggaagacatgtgtacatatcgcagcggcagcgggcttcagcgatattattcatgagctggcaagagtccctgagtgtaacctgcaggctctggatgtggatgacaggacacctctgcactgggctgcagctgcagggaaggccgaatgtgtccagtcactgctggagttgggaatggacagcaacctgcgggacatcaatgagagcacgcccttggcctatgccctgtactgcggtcacacggcgtgtgtcaaactcctctcccaagagagcagaacagagcctactcgaccccctccctcccagagcagtcggccccagaagaaggagagacggttcaacgtgctcaaccaaatattctgcaaaaacaagaaagaagagcagagagcccatcagaaggatcccagcagggaccgatacagagaggaggacacctcagaagtcaatgacatcatcaccacctttgatagcatcgtgggtaccaactgccaagaacagcctggtgatcaggtggctatggttgaatttaagaagaaaacctcagacaattcaaaatatctcttaccagaaaagaaaccgctggcccgtaaggggcttccaccaatcagaacgcagagtctcccacccatcaccctgggcaataacttcctaacagcctcccatagggccacttcccatgcaggcctgagctctgctcctcatcatatggcccagcgatctcagaaaagtcgaagtgagcaggatttattaaataacagaactggctgccagatgttactagataacccctggaagagtgattctaatcaggtattttcctacaaagtttggactgtgtcttcttctgataagctgctggacagattgctcagtgtccggcctggtcaccaagaggtctccgtgccaccacaccttcgccatctacataatccatcatcaggacaaaattttcagcatctttccccaaacagacacaaaatcagggatcttcctttcactcggaacaacctagctcccctaccagatcaaaaatttctatctggagaacctctgcggacaaaccgagtgcttcctgcaattccaagtcaacgaagacacagcacagcagcagaagagagtgaacattctgccaaccccaccagtgatgaaaattaactgtgggccactcgctgcagaaatgtagatgaatatgtattttcaactctcaaaggacaagattactccagtttgtaagaacgaagaccaatttagtaagctgcattctataagccatcagttttataactcgaaattctttattccaaataaagatactccctaaataagcacttagaatatttgggtgtgcatattaagtctgtgaatttctgtgacttccacatgccaaaattaaaagacaaaatatgttatcagtaggaaaactgag

SEQ ID NO: 5133 - protein, 614 aa, Homo sapiens; identical to SEQ ID NO: 648

SEQ ID NO: 5134 - DNA, 2180 bp, Homo sapiens
acatgctctgtctggccctgtgaatcctcactcacccattcagatttctgttggtgtaaagcgacattccagctgctgaagctccgtgatctgctgtgtttttccagcccagatccaaggcagacctggatgctttttgccattctgatggtaaatgatgagacaggctaccatggatttcagcaccccttctgtgtttgatcagcaaagaggtgactcatctgaggaagttgacctgaccatggtttatcaagcagcctctaatggagatgtcaatgctctgactgcagtgattcgggaagacccttctatcctagaatgctgtgacagtgaaggatgcacgcccttgatgcatgcggtttctggacgtcaagcggacacagtgaagctgctgttgaagatgggagccaatattaacatgcaggatgcttatggccgcacaagtttatgcctggccacctacctgggctggcttgaaggctgtgtgagtctactcagaaacggtgccaagcacaatatcccagataaaaatggccgcctgccactgcatgctgccactgctgagcccgatatgaggctcctcacggtcctgttgcaacagtcgaacatcagcgagattaatcaccaggacaatgagggaatgacaccactccactgggcggctttccacaaccagcctcaacacacacaaatgctgctgaagaagggggcagaccccacccttgtggataaagactttaaaaccgctctccactgggcagtccagagtggaaataggattctgtgctccatcattctgagccatcaccaggggccgtccataatcaactatgatgatgagagtgggaagacatgtgtacatatcgcagcggcagcgggcttcagcgatattattcatgagctggcaagagtccctgagtgtaacctgcaggctctggatgtggatgacaggacacctctgcactgggctgcagctgcagggaaggccgaatgtgtccagtcactgctggagttgggaatggacagcaacctgcgggacatcaatgagagcacgcccttggcctatgccctgtactgcggtcacacggcgtgtgtcaaactcctctcccaagagagcagaacagagcctactcgaccccctccctcccagagcagtcggccccagaagaaggagagacggttcaacgtgctcaaccaaatattctgcaaaaacaagaaagaagagcagagagcccatcagaaggatcccagcagggaccgatacagagaggaggacacctcagaagtcaatgacatcatcaccacctttgatagcatcgtgggtaccaactgccaagaacagcctggtgatcaggtggctatggttgaatttaagaagaaaacctcagacaattcaaaatatctcttaccagaaaagaaaccgctggcccgtaaggggcttccaccaatcagaacgcagagtctcccacccatcaccctgggcaataacttcctaacagcctcccatagggccacttcccatgcaggcctgagctctgctcctcatcatatggcccagcgatctcagaaaagtcgaagtgagcaggatttattaaataacagaactggctgccagatgttactagataacccctggaagagtgattctaatcaggtattttcctacaaagtttggactgtgtcttcttctgataagctgctggacagattgctcagtgtccggcctggtcaccaagaggtctccgtgccaccacaccttcgccatctacataatccatcatcaggacaaaattttcagcatctttccccaaacagacacaaaatcagggatcttcctttcactcggaacaacctagctcccctaccagatcaaaaatttctatctggagaacctctgcggacaaaccgagtgcttcctgcaattccaagtcaacgaagacacagcacagcagcagaagagagtgaacattctgccaaccccaccagtgatgaaaattaactgtgggccactcgctgcagaaatgtagatgaatatgtattttcaactctcaaaggacaagattactccagtttgtaagaacgaagaccaatttagtaagctgcattctataagccatcagttttataactcgaaattctttattccaaataaagatactccctaaataagcacttagaat

SEQ ID NO: 5135 - protein, 614 aa, Homo sapiens; identical to SEQ ID NO: 648

SEQ ID NO: 5136 - DNA, 898 bp, Homo sapiens
cttactctcccagacttgttctcagcctttctggggacaaatgaaggaagcaactggggagaagaaactaaccagaggtttggagatgtttctcaggttattttgagaacagccgatccgaatgctgattgaattggcttctcactgtatttgtcaaggctggaacagacgatggcactgcagaatcttatgtgcacagaagaaatctacagacattcaatgaggggaggatttcgttccatcagatgggcttcctgacataattgcaaagacacatgaagactcaacgatttatctcccatcaacctcttcttagttaatatcagcccatgtgctccaagaaaaccagaggaaatatcaagaaagaagaaaacatgagaccctgaaaataaaaacctcaacccagaaggagaccatgaaataattccagtatgtttgcttaattgttgggtattcctgtgacaaagaaggcactactcagccagccagaatgcactgaccaccactgcagggtttcagtcacatgagacatctgggtgatagagggaagtgtggggaatggctatcattgatgagcctgtatgttctaagtgatctggggactaaggcttatttttctccaggcttgtcttatgaagaagttttagtctatttggaatagataaggcttatacacataaagtaactgatactcaattatatgtaattatgttagttggggataaggctaagctgtgttatgtagtgactcaaaaatgcgatgactcaaacaagattggagcttgtttctctccgggaatgaatgatcccacactcgggggcagctaggctgctgggatccaggttccttcacctgttgctctgttatggttgaagctggcttatcccaacctcattc

SEQ ID NO: 5137 - protein, 45 aa, Homo sapiens
MRHLGDRGKCGEWLSLMSLYVLSDLGTKAYFSPGLSYEEVLVYLE

SEQ ID NO: 5138 - DNA, 6349 bp, Homo sapiens
gacagaagatctgcgaacatgatgcacgtgaataattttccctttagaaggcattcctggatatgaggaggcctaccagaaactggccagcgagaccctggaggagctggactggtgtctggaccagctagagaccctacagaccaggcactccgtcagtgagatggcctccaacaagtttaaaaggatgcttaatcgggagctcacccatctctctgaaatgagtcggtctggaaatcaagtgtcagagtttatatcaaacacattcttagataagcaacatgaagtggaaattccttctccaactcagaaggaaaaggagaaaaagaaaagaccaatgtctcagatcagtggagtcaagaaattgatgcacagctctagtctgactaattcaagtatcccaaggtttggagttaaaactgaacaagaagatgtccttgccaaggaactagaagatgtgaacaaatggggtcttcatgttttcagaatagcagagttgtctggtaaccggcccttgactgttatcatgcacaccatttttcaggaacgggatttattaaaaacatttaaaattccagtagatactttaattacatatcttatgactctcgaagaccattaccatgctgatgtggcctatcacaacaatatccatgctgcagatgttgtccagtctactcatgtgctattatctacacctgctttggaggctgtgtttacagatttggagattcttgcagcaatttttgccagtgcaatacatgatgtagatcatcctggtgtgtccaatcaatttctgatcaatacaaactctgaacttgccttgatgtacaatgattcctcagtcttagagaaccatcatttggctgtgggctttaaattgcttcaggaagaaaactgtgacattttccagaatttgaccaaaaaacaaagacaatctttaaggaaaatggtcattgacatcgtacttgcaacagatatgtcaaaacacatgaatctactggctgatttgaagactatggttgaaactaagaaagtgacaagctctggagttcttcttcttgataattattccgataggattcaggttcttcagaatatggtgcactgtgcagatctgagcaacccaacaaagcctctccagctgtaccgccagtggacggaccggataatggaggagttcttccgccaaggagaccgagagagggaacgtggcatggagataagccccatgtgtgacaagcacaatgcttccgtggaaaaatcacaggtgggcttcatagactatattgttcatcccctctgggagacatgggcagacctcgtccaccctgacgcccaggatattttggacactttggaggacaatcgtgaatggtaccagagcacaatccctcagagcccctctcctgcacctgatgacccagaggagggccggcagggtcaaactgagaaattccagtttgaactaactttagaggaagatggtgagtcagacacggaaaaggacagtggcagtcaagtggaagaagacactagctgcagtgactccaagactctttgtactcaagactcagagtctactgaaattccccttgatgaacaggttgaagaggaggcagtaggggaagaagaggaaagccagcctgaagcctgtgtcatagatgatcgttctcctgacacgtaacagtgcaaaaactttcatgccttttttttttttaagtagaaaaattgtttccaaagtgcatgtcacatgccacaaccacggtcacacctcactgtcatctgccaggacgtttgttgaacaaaactgaccttgactactcagtccagcgctcaggaatatcgtaaccagttttttcacctccatgtcatccgagcaaggtggacatcttcacgaacagcgtttttaacaagatttcagcttggtagagctgacaaagcagataaaatctactccaaattattttcaagagagtgtgactcatcaggcagcccaaaagtttattggacttggggtttctattcctttttatttgtttgcaatattttcagaagaaaggcattgcacagagtgaacttaatggacgaagcaacaaatatgtcaagaacaggacatagcacgaatctgttaccagtaggaggaggatgagccacagaaattgcataattttctaatttcaagtcttcctgatacatgactgaatagtgtggttcagtgagctgcactgacctctacattttgtatgatatgtaaaacagattttttgtagagcttacttttattattaaatgtattgaggtattatatttaaaaaaaactatgttcagaacttcatctgccactggttatttttttctaaggagtaacttgcaagttttcagtacaaatctgtgctacactggataaaaatctaatttatgaattttacttgcaccttatagttcatagcaattaactgatttgtagtgattcattgtttgttttatataccaatgacttccatattttaaaagagaaaaacaactttatgttgcaggaaaccctttttgtaagtctttattatttactttgcattttgtttcactctttccagataagcagagttgctcttcaccagtgtttttcttcatgtgcaaagtgactatttgttctataatacttttatgtgtgttatatcaaatgtgtcttaagcttcatgcaaactcagtcatcagttcgtgttgtctgaagcaagtgggagatatataaatacccagtagctaaaatggtcagtcttttttagatgttttcctacttagtatctcctaataacgttttgctgtgtcactagatgttcatttcacaagtgcatgtctttctaataatccacacatttcatgctctaataatccacacatttcatgctcatttttattgtttttacagccagttatagtaagaaaaaggtttttccccttgtgctgctttataatttagcgtgtgtctgaaccttatccatgtttgctagatgaggtcttgtcaaatatatcactaccattgtcaccggtgaaaagaaacaggtagttaagttagggttaacattcatttcaaccacgaggttgtatatcatgactagcttttactcttggtttacagagaaaagttaaacagccaactaggcagtttttaagaatattaacaatatattaacaaacaccaatacaactaatcctatttggttttaatgatttcaccatgggattaagaactatatcaggaacatccctgagaaacggttttaagtgtagcaactactcttccttaatggacagccacataacgtgtaggaagtcctttatcacttatcctcgatccataagcatatcttgcagaggggaactacttctttaaacacatggagggaaagaagatgatgccactggcaccagagggttagtactgtgatgcatcctaaaatatttattatattggtaaaaattctggttaaataaaaaattagagatcactcttggctgatttcagcaccaggaactgtattacagttttagagattaattcctagtgtttacctgattatagcagttggcatcatggggcatttaattctgactttatccccacgtcagccttaataaagtcttctttaccttctctatgaagactttaaagcccaaataatcatttttcacattgatattcaagaattgagatagatagaagccaaagtgggtatctgacaagtggaaaatcaaacgtttaagaagaattacaactctgaaaagcatttatatgtggaacttctcaaggagcctcctggggactggaaagtaagtcatcagccaggcaaatgactcatgctgaagagagtccccatttcagtcccctgagatctagctgatgcttagatcctttgaaataaaaattatgtctttataactctgatcttttacataaagcagaagaggaatcaactagttaattgcaaggtttctactctgtttcctctgtaaagatcagatggtaatctttcaaataagaaaaaaataaagacgtatgtttgaccaagtagtttcacaagaatatttgggaacttgtttcttttaattttatttgtccctgagtgaagtctagaaagaaaggtaaagagtctagagtttattcctctttccaaaacattctcattcctctcctccctacacttagtatttcccccacagagtgcctagaatcttaataatgaataaaataaaaagcagcaatatgtcattaacaaatccagacctgaaagggtaaagggtttataactgcactaataaagagaggctctttttttttcttccagtttgttggtttttaatggtaccgtgttgtaaagatacccactaatggacaatcaaattgcagaaaaggctcaatatccaagagacagggactaatgcactgtacaatctgcttatccttgcccttctctcttgccaaagtgtgcttcagaaatatatactgctttaaaaaagaataaaagaatatccttttacaagtggctttacatttcctaaaatgccataagaaaatgcaatatctgggtactgtatggggaaaaaaatgtccaagtttgtgtaaaaccagtgcatttcagcttgcaagttactgaacacaataatgctgttttaattttgttttatatcagttaaaattcacaataatgtagatagaacaaattacagacaaggaaagaaaaaacttgaatgaaatggattttacagaaagctttatgataatttttgaatgcattatttattttttgtgccatgcattttttttctcaccaaatgaccttacctgtaatacagtcttgtttgtctgtttacaaccatgtatttattgcaatgtacatactgtaatgttaattgtaaattatctgttcttattaaaacatcatcccatgatgggatggtgttgatatatttggaaactcttggtgagagaatgaatggtgtgtatacatactctgtacatttttcttttctcctgtaatatagtcttgtcaccttagagcttgtttatggaagattcaagaaaactataaaatacttaaagatatataaatttaaaaaaacatagctgcaggtctttggtcccagggctgtgccttaactttaaccaatattttcttctgttttgctgcatttgaaaggtaacagtggagctagggctgggcattttacatccaggcttttaattgattagaattctgccaataggtggattttacaaaaccacagacaacctctgaaagattctgagacccttttgagacagaagctcttaagtacttcttgccagggagcagcactgcatgtgtgatggttgtttgccatctgttgatcaggaactacttcagctacttgcatttgattatttcctttttttttttttttaactcggaaacacaactggggaaatatattctttcccagtgattataaacaatctttttcttttttttaagtccttttggcttctagagctcataggaaaatggacttgatttgaaattggagccagagtttactcgtgttggttatctattcatcagcttcctgacatgttaagagaatacattaaagagaaaatactgttttttaatcctaaaatttttcttccactaagataaaccaaatgtccttacatatatgtaaacccatctatttaaacgcaaaggtgggttgatgtcagtttacatagcagaaagcattcactatcctctaagatttgtttctgcaaaactttcattgctttagaattttaaaatttcaccttgtacaatggccagcccctaaagcaggaaacatttataatggattatatggaaacatcctcccagtacttgcccagcccttgaatcatgtggcttttcagtgaaaggaaagattctttttctaggaaaaatgagcctattttattttattttattttattttttgacacaaactgtagattttagcagccctggcccaaaggaatttgattacttttgttttaaacagtacaaaggggacactataattacaaaaacatccttaactgatttgagttgtttttatttctttggatatattttcagagtggtaaattgtgtgtgagaattacaaatgattattcttttagtggtttcttagcctctcttacagcccacggggatagtactgtacatcaataccttcatatgaaatttttatatgcaatgaaaataaaagcatgggttgattctgcctatttatgactcaatcttttacaaataaaagattattcattttaaattatagttcaatcagcatgtctctt

SEQ ID NO: 5139 - protein, 507 aa, Homo sapiens
MASNKFKRMLNRELTHLSEMSRSGNQVSEFISNTFLDKQHEVEIPSPTQKEKEKKKRPMSQISGVKKLMHSSSLTNSSIPRFGVKTEQEDVLAKELEDVNKWGLHVFRIAELSGNRPLTVIMHTIFQERDLLKTFKIPVDTLITYLMTLEDHYHADVAYHNNIHAADVVQSTHVLLSTPALEAVFTDLEILAAIFASAIHDVDHPGVSNQFLINTNSELALMYNDSSVLENHHLAVGFKLLQEENCDIFQNLTKKQRQSLRKMVIDIVLATDMSKHMNLLADLKTMVETKKVTSSGVLLLDNYSDRIQVLQNMVHCADLSNPTKPLQLYRQWTDRIMEEFFRQGDRERERGMEISPMCDKHNASVEKSQVGFIDYIVHPLWETWADLVHPDAQDILDTLEDNREWYQSTIPQSPSPAPDDPEEGRQGQTEKFQFELTLEEDGESDTEKDSGSQVEEDTSCSDSKTLCTQDSESTEIPLDEQVEEEAVGEEEESQPEACVIDDRSPDT

SEQ ID NO: 5140 - DNA, 6808 bp, Homo sapiens
caatacttgttgcaataattgcccacgatagctgctcaaacaagagagttggaattcatctgtaaaaatcactacatgtaacgtaggagacaagaaaaatattaatgacagaagatctgcgaacatgatgcacgtgaataattttccctttagaaggcattcctggatatgttttgatgtggacaatggcacatctgcgggacggagtcccttggatcccatgaccagcccaggatccgggctaattctccaagcaaattttgtccacagtcaacgacgggagtccttcctgtatcgatccgacagcgattatgacctctctccaaagtctatgtcccggaactcctccattgccagtgatatacacggagatgacttgattgtgactccatttgctcaggtcttggccagtctgcgaactgtacgaaacaactttgctgcattaactaatttgcaagatcgagcacctagcaaaagatcacccatgtgcaaccaaccatccatcaacaaagccaccataacagaggaggcctaccagaaactggccagcgagaccctggaggagctggactggtgtctggaccagctagagaccctacagaccaggcactccgtcagtgagatggcctccaacaagtttaaaaggatgcttaatcgggagctcacccatctctctgaaatgagtcggtctggaaatcaagtgtcagagtttatatcaaacacattcttagataagcaacatgaagtggaaattccttctccaactcagaaggaaaaggagaaaaagaaaagaccaatgtctcagatcagtggagtcaagaaattgatgcacagctctagtctgactaattcaagtatcccaaggtttggagttaaaactgaacaagaagatgtccttgccaaggaactagaagatgtgaacaaatggggtcttcatgttttcagaatagcagagttgtctggtaaccggcccttgactgttatcatgcacaccatttttcaggaacgggatttattaaaaacatttaaaattccagtagatactttaattacatatcttatgactctcgaagaccattaccatgctgatgtggcctatcacaacaatatccatgctgcagatgttgtccagtctactcatgtgctattatctacacctgctttggaggctgtgtttacagatttggagattcttgcagcaatttttgccagtgcaatacatgatgtagatcatcctggtgtgtccaatcaatttctgatcaatacaaactctgaacttgccttgatgtacaatgattcctcagtcttagagaaccatcatttggctgtgggctttaaattgcttcaggaagaaaactgtgacattttccagaatttgaccaaaaaacaaagacaatctttaaggaaaatggtcattgacatcgtacttgcaacagatatgtcaaaacacatgaatctactggctgatttgaagactatggttgaaactaagaaagtgacaagctctggagttcttcttcttgataattattccgataggattcaggttcttcagaatatggtgcactgtgcagatctgagcaacccaacaaagcctctccagctgtaccgccagtggacggaccggataatggaggagttcttccgccaaggagaccgagagagggaacgtggcatggagataagccccatgtgtgacaagcacaatgcttccgtggaaaaatcacaggtgggcttcatagactatattgttcatcccctctgggagacatgggcagacctcgtccaccctgacgcccaggatattttggacactttggaggacaatcgtgaatggtaccagagcacaatccctcagagcccctctcctgcacctgatgacccagaggagggccggcagggtcaaactgagaaattccagtttgaactaactttagaggaagatggtgagtcagacacggaaaaggacagtggcagtcaagtggaagaagacactagctgcagtgactccaagactctttgtactcaagactcagagtctactgaaattccccttgatgaacaggttgaagaggaggcagtaggggaagaagaggaaagccagcctgaagcctgtgtcatagatgatcgttctcctgacacgtaacagtgcaaaaactttcatgccttttttttttttaagtagaaaaattgtttccaaagtgcatgtcacatgccacaaccacggtcacacctcactgtcatctgccaggacgtttgttgaacaaaactgaccttgactactcagtccagcgctcaggaatatcgtaaccagttttttcacctccatgtcatccgagcaaggtggacatcttcacgaacagcgtttttaacaagatttcagcttggtagagctgacaaagcagataaaatctactccaaattattttcaagagagtgtgactcatcaggcagcccaaaagtttattggacttggggtttctattcctttttatttgtttgcaatattttcagaagaaaggcattgcacagagtgaacttaatggacgaagcaacaaatatgtcaagaacaggacatagcacgaatctgttaccagtaggaggaggatgagccacagaaattgcataattttctaatttcaagtcttcctgatacatgactgaatagtgtggttcagtgagctgcactgacctctacattttgtatgatatgtaaaacagattttttgtagagcttacttttattattaaatgtattgaggtattatatttaaaaaaaactatgttcagaacttcatctgccactggttatttttttctaaggagtaacttgcaagttttcagtacaaatctgtgctacactggataaaaatctaatttatgaattttacttgcaccttatagttcatagcaattaactgatttgtagtgattcattgtttgttttatataccaatgacttccatattttaaaagagaaaaacaactttatgttgcaggaaaccctttttgtaagtctttattatttactttgcattttgtttcactctttccagataagcagagttgctcttcaccagtgtttttcttcatgtgcaaagtgactatttgttctataatacttttatgtgtgttatatcaaatgtgtcttaagcttcatgcaaactcagtcatcagttcgtgttgtctgaagcaagtgggagatatataaatacccagtagctaaaatggtcagtcttttttagatgttttcctacttagtatctcctaataacgttttgctgtgtcactagatgttcatttcacaagtgcatgtctttctaataatccacacatttcatgctctaataatccacacatttcatgctcatttttattgtttttacagccagttatagtaagaaaaaggtttttccccttgtgctgctttataatttagcgtgtgtctgaaccttatccatgtttgctagatgaggtcttgtcaaatatatcactaccattgtcaccggtgaaaagaaacaggtagttaagttagggttaacattcatttcaaccacgaggttgtatatcatgactagcttttactcttggtttacagagaaaagttaaacagccaactaggcagtttttaagaatattaacaatatattaacaaacaccaatacaactaatcctatttggttttaatgatttcaccatgggattaagaactatatcaggaacatccctgagaaacggttttaagtgtagcaactactcttccttaatggacagccacataacgtgtaggaagtcctttatcacttatcctcgatccataagcatatcttgcagaggggaactacttctttaaacacatggagggaaagaagatgatgccactggcaccagagggttagtactgtgatgcatcctaaaatatttattatattggtaaaaattctggttaaataaaaaattagagatcactcttggctgatttcagcaccaggaactgtattacagttttagagattaattcctagtgtttacctgattatagcagttggcatcatggggcatttaattctgactttatccccacgtcagccttaataaagtcttctttaccttctctatgaagactttaaagcccaaataatcatttttcacattgatattcaagaattgagatagatagaagccaaagtgggtatctgacaagtggaaaatcaaacgtttaagaagaattacaactctgaaaagcatttatatgtggaacttctcaaggagcctcctggggactggaaagtaagtcatcagccaggcaaatgactcatgctgaagagagtccccatttcagtcccctgagatctagctgatgcttagatcctttgaaataaaaattatgtctttataactctgatcttttacataaagcagaagaggaatcaactagttaattgcaaggtttctactctgtttcctctgtaaagatcagatggtaatctttcaaataagaaaaaaataaagacgtatgtttgaccaagtagtttcacaagaatatttgggaacttgtttcttttaattttatttgtccctgagtgaagtctagaaagaaaggtaaagagtctagagtttattcctctttccaaaacattctcattcctctcctccctacacttagtatttcccccacagagtgcctagaatcttaataatgaataaaataaaaagcagcaatatgtcattaacaaatccagacctgaaagggtaaagggtttataactgcactaataaagagaggctctttttttttcttccagtttgttggtttttaatggtaccgtgttgtaaagatacccactaatggacaatcaaattgcagaaaaggctcaatatccaagagacagggactaatgcactgtacaatctgcttatccttgcccttctctcttgccaaagtgtgcttcagaaatatatactgctttaaaaaagaataaaagaatatccttttacaagtggctttacatttcctaaaatgccataagaaaatgcaatatctgggtactgtatggggaaaaaaatgtccaagtttgtgtaaaaccagtgcatttcagcttgcaagttactgaacacaataatgctgttttaattttgttttatatcagttaaaattcacaataatgtagatagaacaaattacagacaaggaaagaaaaaacttgaatgaaatggattttacagaaagctttatgataatttttgaatgcattatttattttttgtgccatgcattttttttctcaccaaatgaccttacctgtaatacagtcttgtttgtctgtttacaaccatgtatttattgcaatgtacatactgtaatgttaattgtaaattatctgttcttattaaaacatcatcccatgatgggatggtgttgatatatttggaaactcttggtgagagaatgaatggtgtgtatacatactctgtacatttttcttttctcctgtaatatagtcttgtcaccttagagcttgtttatggaagattcaagaaaactataaaatacttaaagatatataaatttaaaaaaacatagctgcaggtctttggtcccagggctgtgccttaactttaaccaatattttcttctgttttgctgcatttgaaaggtaacagtggagctagggctgggcattttacatccaggcttttaattgattagaattctgccaataggtggattttacaaaaccacagacaacctctgaaagattctgagacccttttgagacagaagctcttaagtacttcttgccagggagcagcactgcatgtgtgatggttgtttgccatctgttgatcaggaactacttcagctacttgcatttgattatttcctttttttttttttttaactcggaaacacaactggggaaatatattctttcccagtgattataaacaatctttttcttttttttaagtccttttggcttctagagctcataggaaaatggacttgatttgaaattggagccagagtttactcgtgttggttatctattcatcagcttcctgacatgttaagagaatacattaaagagaaaatactgttttttaatcctaaaatttttcttccactaagataaaccaaatgtccttacatatatgtaaacccatctatttaaacgcaaaggtgggttgatgtcagtttacatagcagaaagcattcactatcctctaagatttgtttctgcaaaactttcattgctttagaattttaaaatttcaccttgtacaatggccagcccctaaagcaggaaacatttataatggattatatggaaacatcctcccagtacttgcccagcccttgaatcatgtggcttttcagtgaaaggaaagattctttttctaggaaaaatgagcctattttattttattttattttattttttgacacaaactgtagattttagcagccctggcccaaaggaatttgattacttttgttttaaacagtacaaaggggacactataattacaaaaacatccttaactgatttgagttgtttttatttctttggatatattttcagagtggtaaattgtgtgtgagaattacaaatgattattcttttagtggtttcttagcctctcttacagcccacggggatagtactgtacatcaataccttcatatgaaatttttatatgcaatgaaaataaaagcatgggttgattctgcctatttatgactcaatcttttacaaataaaagattattcattttaaattatagttcaatcagcatgtctctt

SEQ ID NO: 5141 - protein, 673 aa, Homo sapiens; identical to SEQ ID NO: 650

SEQ ID NO: 5142 - DNA, 7284 bp, Homo sapiens
tgcggcgcattagttccaatagtttaacaggctgctttgtagcacggacaaagccgtgcgagcgcggtgctttccctccttgttcatttgctatgcgagcttgtcagtgatctttggcaggggcttgggagaggaggggtgacgtttaatacgcttccgcggaggagtgcgctcgcctcctctgcacccagccccaggctctacagagagactgaggcaggcgactgaatgcactaacagcagcaggctcagacctgcttccctggacatttccgggaccgtgagcgagggaaccacgttgccctggattcttgccagctgtacaaagttgaccaggaaaatggctcagcagacaagcccggacactttaacagtacctgaagtggataatccgcattgtccaaacccgtggctgaacgaagaccttgtgaaatccttgcgagaaaacctgttgcagcatgagaagtccaagacagcgaggaaatcggtttctcccaagctctctccagtgatctctccgagaaattcccccaggcttctgcgcagaatgcttctcagcagcaacatccccaaacagcggcgtttcacggtggcacatacatgttttgatgtggacaatggcacatctgcgggacggagtcccttggatcccatgaccagcccaggatccgggctaattctccaagcaaattttgtccacagtcaacgacgggagtccttcctgtatcgatccgacagcgattatgacctctctccaaagtctatgtcccggaactcctccattgccagtgatatacacggagatgacttgattgtgactccatttgctcaggtcttggccagtctgcgaactgtacgaaacaactttgctgcattaactaatttgcaagatcgagcacctagcaaaagatcacccatgtgcaaccaaccatccatcaacaaagccaccataacagggctctataatgggatcattgcatttctctgattactaatgagaaggaggcctaccagaaactggccagcgagaccctggaggagctggactggtgtctggaccagctagagaccctacagaccaggcactccgtcagtgagatggcctccaacaagtttaaaaggatgcttaatcgggagctcacccatctctctgaaatgagtcggtctggaaatcaagtgtcagagtttatatcaaacacattcttagataagcaacatgaagtggaaattccttctccaactcagaaggaaaaggagaaaaagaaaagaccaatgtctcagatcagtggagtcaagaaattgatgcacagctctagtctgactaattcaagtatcccaaggtttggagttaaaactgaacaagaagatgtccttgccaaggaactagaagatgtgaacaaatggggtcttcatgttttcagaatagcagagttgtctggtaaccggcccttgactgttatcatgcacaccatttttcaggaacgggatttattaaaaacatttaaaattccagtagatactttaattacatatcttatgactctcgaagaccattaccatgctgatgtggcctatcacaacaatatccatgctgcagatgttgtccagtctactcatgtgctattatctacacctgctttggaggctgtgtttacagatttggagattcttgcagcaatttttgccagtgcaatacatgatgtagatcatcctggtgtgtccaatcaatttctgatcaatacaaactctgaacttgccttgatgtacaatgattcctcagtcttagagaaccatcatttggctgtgggctttaaattgcttcaggaagaaaactgtgacattttccagaatttgaccaaaaaacaaagacaatctttaaggaaaatggtcattgacatcgtacttgcaacagatatgtcaaaacacatgaatctactggctgatttgaagactatggttgaaactaagaaagtgacaagctctggagttcttcttcttgataattattccgataggattcaggttcttcagaatatggtgcactgtgcagatctgagcaacccaacaaagcctctccagctgtaccgccagtggacggaccggataatggaggagttcttccgccaaggagaccgagagagggaacgtggcatggagataagccccatgtgtgacaagcacaatgcttccgtggaaaaatcacaggtgggcttcatagactatattgttcatcccctctgggagacatgggcagacctcgtccaccctgacgcccaggatattttggacactttggaggacaatcgtgaatggtaccagagcacaatccctcagagcccctctcctgcacctgatgacccagaggagggccggcagggtcaaactgagaaattccagtttgaactaactttagaggaagatggtgagtcagacacggaaaaggacagtggcagtcaagtggaagaagacactagctgcagtgactccaagactctttgtactcaagactcagagtctactgaaattccccttgatgaacaggttgaagaggaggcagtaggggaagaagaggaaagccagcctgaagcctgtgtcatagatgatcgttctcctgacacgtaacagtgcaaaaactttcatgccttttttttttttaagtagaaaaattgtttccaaagtgcatgtcacatgccacaaccacggtcacacctcactgtcatctgccaggacgtttgttgaacaaaactgaccttgactactcagtccagcgctcaggaatatcgtaaccagttttttcacctccatgtcatccgagcaaggtggacatcttcacgaacagcgtttttaacaagatttcagcttggtagagctgacaaagcagataaaatctactccaaattattttcaagagagtgtgactcatcaggcagcccaaaagtttattggacttggggtttctattcctttttatttgtttgcaatattttcagaagaaaggcattgcacagagtgaacttaatggacgaagcaacaaatatgtcaagaacaggacatagcacgaatctgttaccagtaggaggaggatgagccacagaaattgcataattttctaatttcaagtcttcctgatacatgactgaatagtgtggttcagtgagctgcactgacctctacattttgtatgatatgtaaaacagattttttgtagagcttacttttattattaaatgtattgaggtattatatttaaaaaaaactatgttcagaacttcatctgccactggttatttttttctaaggagtaacttgcaagttttcagtacaaatctgtgctacactggataaaaatctaatttatgaattttacttgcaccttatagttcatagcaattaactgatttgtagtgattcattgtttgttttatataccaatgacttccatattttaaaagagaaaaacaactttatgttgcaggaaaccctttttgtaagtctttattatttactttgcattttgtttcactctttccagataagcagagttgctcttcaccagtgtttttcttcatgtgcaaagtgactatttgttctataatacttttatgtgtgttatatcaaatgtgtcttaagcttcatgcaaactcagtcatcagttcgtgttgtctgaagcaagtgggagatatataaatacccagtagctaaaatggtcagtcttttttagatgttttcctacttagtatctcctaataacgttttgctgtgtcactagatgttcatttcacaagtgcatgtctttctaataatccacacatttcatgctctaataatccacacatttcatgctcatttttattgtttttacagccagttatagtaagaaaaaggtttttccccttgtgctgctttataatttagcgtgtgtctgaaccttatccatgtttgctagatgaggtcttgtcaaatatatcactaccattgtcaccggtgaaaagaaacaggtagttaagttagggttaacattcatttcaaccacgaggttgtatatcatgactagcttttactcttggtttacagagaaaagttaaacagccaactaggcagtttttaagaatattaacaatatattaacaaacaccaatacaactaatcctatttggttttaatgatttcaccatgggattaagaactatatcaggaacatccctgagaaacggttttaagtgtagcaactactcttccttaatggacagccacataacgtgtaggaagtcctttatcacttatcctcgatccataagcatatcttgcagaggggaactacttctttaaacacatggagggaaagaagatgatgccactggcaccagagggttagtactgtgatgcatcctaaaatatttattatattggtaaaaattctggttaaataaaaaattagagatcactcttggctgatttcagcaccaggaactgtattacagttttagagattaattcctagtgtttacctgattatagcagttggcatcatggggcatttaattctgactttatccccacgtcagccttaataaagtcttctttaccttctctatgaagactttaaagcccaaataatcatttttcacattgatattcaagaattgagatagatagaagccaaagtgggtatctgacaagtggaaaatcaaacgtttaagaagaattacaactctgaaaagcatttatatgtggaacttctcaaggagcctcctggggactggaaagtaagtcatcagccaggcaaatgactcatgctgaagagagtccccatttcagtcccctgagatctagctgatgcttagatcctttgaaataaaaattatgtctttataactctgatcttttacataaagcagaagaggaatcaactagttaattgcaaggtttctactctgtttcctctgtaaagatcagatggtaatctttcaaataagaaaaaaataaagacgtatgtttgaccaagtagtttcacaagaatatttgggaacttgtttcttttaattttatttgtccctgagtgaagtctagaaagaaaggtaaagagtctagagtttattcctctttccaaaacattctcattcctctcctccctacacttagtatttcccccacagagtgcctagaatcttaataatgaataaaataaaaagcagcaatatgtcattaacaaatccagacctgaaagggtaaagggtttataactgcactaataaagagaggctctttttttttcttccagtttgttggtttttaatggtaccgtgttgtaaagatacccactaatggacaatcaaattgcagaaaaggctcaatatccaagagacagggactaatgcactgtacaatctgcttatccttgcccttctctcttgccaaagtgtgcttcagaaatatatactgctttaaaaaagaataaaagaatatccttttacaagtggctttacatttcctaaaatgccataagaaaatgcaatatctgggtactgtatggggaaaaaaatgtccaagtttgtgtaaaaccagtgcatttcagcttgcaagttactgaacacaataatgctgttttaattttgttttatatcagttaaaattcacaataatgtagatagaacaaattacagacaaggaaagaaaaaacttgaatgaaatggattttacagaaagctttatgataatttttgaatgcattatttattttttgtgccatgcattttttttctcaccaaatgaccttacctgtaatacagtcttgtttgtctgtttacaaccatgtatttattgcaatgtacatactgtaatgttaattgtaaattatctgttcttattaaaacatcatcccatgatgggatggtgttgatatatttggaaactcttggtgagagaatgaatggtgtgtatacatactctgtacatttttcttttctcctgtaatatagtcttgtcaccttagagcttgtttatggaagattcaagaaaactataaaatacttaaagatatataaatttaaaaaaacatagctgcaggtctttggtcccagggctgtgccttaactttaaccaatattttcttctgttttgctgcatttgaaaggtaacagtggagctagggctgggcattttacatccaggcttttaattgattagaattctgccaataggtggattttacaaaaccacagacaacctctgaaagattctgagacccttttgagacagaagctcttaagtacttcttgccagggagcagcactgcatgtgtgatggttgtttgccatctgttgatcaggaactacttcagctacttgcatttgattatttcctttttttttttttttaactcggaaacacaactggggaaatatattctttcccagtgattataaacaatctttttcttttttttaagtccttttggcttctagagctcataggaaaatggacttgatttgaaattggagccagagtttactcgtgttggttatctattcatcagcttcctgacatgttaagagaatacattaaagagaaaatactgttttttaatcctaaaatttttcttccactaagataaaccaaatgtccttacatatatgtaaacccatctatttaaacgcaaaggtgggttgatgtcagtttacatagcagaaagcattcactatcctctaagatttgtttctgcaaaactttcattgctttagaattttaaaatttcaccttgtacaatggccagcccctaaagcaggaaacatttataatggattatatggaaacatcctcccagtacttgcccagcccttgaatcatgtggcttttcagtgaaaggaaagattctttttctaggaaaaatgagcctattttattttattttattttattttttgacacaaactgtagattttagcagccctggcccaaaggaatttgattacttttgttttaaacagtacaaaggggacactataattacaaaaacatccttaactgatttgagttgtttttatttctttggatatattttcagagtggtaaattgtgtgtgagaattacaaatgattattcttttagtggtttcttagcctctcttacagcccacggggatagtactgtacatcaataccttcatatgaaatttttatatgcaatgaaaataaaagcatgggttgattctgcctatttatgactcaatcttttacaaataaaagattattcattttaaattatagttcaatcagcatgtctctt

SEQ ID NO: 5143 - protein, 507 aa, Homo sapiens; identical to SEQ ID NO: 5139

SEQ ID NO: 5144 - DNA, 7240 bp, Homo sapiens
tgcggcgcattagttccaatagtttaacaggctgctttgtagcacggacaaagccgtgcgagcgcggtgctttccctccttgttcatttgctatgcgagcttgtcagtgatctttggcaggggcttgggagaggaggggtgacgtttaatacgcttccgcggaggagtgcgctcgcctcctctgcacccagccccaggctctacagagagactgaggcaggcgactgaatgcactaacagcagcaggctcagacctgcttccctggacatttccgggaccgtgagcgagggaaccacgttgccctggattcttgccagctgtacaaagttgaccaggaaaatggctcagcagacaagcccggacactttaacagtacctgaagtggataatccgcattgtccaaacccgtggctgaacgaagaccttgtgaaatccttgcgagaaaacctgttgcagcatgagaagtccaagacagcgaggaaatcggtttctcccaagctctctccagtgatctctccgagaaattcccccaggcttctgcgcagaatgcttctcagcagcaacatccccaaacagcggcgtttcacggtggcacatacatgttttgatgtggacaatggcacatctgcgggacggagtcccttggatcccatgaccagcccaggatccgggctaattctccaagcaaattttgtccacagtcaacgacgggagtccttcctgtatcgatccgacagcgattatgacctctctccaaagtctatgtcccggaactcctccattgccagtgatatacacggagatgacttgattgtgactccatttgctcaggtcttggccagtctgcgaactgtacgaaacaactttgctgcattaactaatttgcaagatcgagcacctagcaaaagatcacccatgtgcaaccaaccatccatcaacaaagccaccataacagaggaggcctaccagaaactggccagcgagaccctggaggagctggactggtgtctggaccagctagagaccctacagaccaggcactccgtcagtgagatggcctccaacaagtttaaaaggatgcttaatcgggagctcacccatctctctgaaatgagtcggtctggaaatcaagtgtcagagtttatatcaaacacattcttagataagcaacatgaagtggaaattccttctccaactcagaaggaaaaggagaaaaagaaaagaccaatgtctcagatcagtggagtcaagaaattgatgcacagctctagtctgactaattcaagtatcccaaggtttggagttaaaactgaacaagaagatgtccttgccaaggaactagaagatgtgaacaaatggggtcttcatgttttcagaatagcagagttgtctggtaaccggcccttgactgttatcatgcacaccatttttcaggaacgggatttattaaaaacatttaaaattccagtagatactttaattacatatcttatgactctcgaagaccattaccatgctgatgtggcctatcacaacaatatccatgctgcagatgttgtccagtctactcatgtgctattatctacacctgctttggaggctgtgtttacagatttggagattcttgcagcaatttttgccagtgcaatacatgatgtagatcatcctggtgtgtccaatcaatttctgatcaatacaaactctgaacttgccttgatgtacaatgattcctcagtcttagagaaccatcatttggctgtgggctttaaattgcttcaggaagaaaactgtgacattttccagaatttgaccaaaaaacaaagacaatctttaaggaaaatggtcattgacatcgtacttgcaacagatatgtcaaaacacatgaatctactggctgatttgaagactatggttgaaactaagaaagtgacaagctctggagttcttcttcttgataattattccgataggattcaggttcttcagaatatggtgcactgtgcagatctgagcaacccaacaaagcctctccagctgtaccgccagtggacggaccggataatggaggagttcttccgccaaggagaccgagagagggaacgtggcatggagataagccccatgtgtgacaagcacaatgcttccgtggaaaaatcacaggtgggcttcatagactatattgttcatcccctctgggagacatgggcagacctcgtccaccctgacgcccaggatattttggacactttggaggacaatcgtgaatggtaccagagcacaatccctcagagcccctctcctgcacctgatgacccagaggagggccggcagggtcaaactgagaaattccagtttgaactaactttagaggaagatggtgagtcagacacggaaaaggacagtggcagtcaagtggaagaagacactagctgcagtgactccaagactctttgtactcaagactcagagtctactgaaattccccttgatgaacaggttgaagaggaggcagtaggggaagaagaggaaagccagcctgaagcctgtgtcatagatgatcgttctcctgacacgtaacagtgcaaaaactttcatgccttttttttttttaagtagaaaaattgtttccaaagtgcatgtcacatgccacaaccacggtcacacctcactgtcatctgccaggacgtttgttgaacaaaactgaccttgactactcagtccagcgctcaggaatatcgtaaccagttttttcacctccatgtcatccgagcaaggtggacatcttcacgaacagcgtttttaacaagatttcagcttggtagagctgacaaagcagataaaatctactccaaattattttcaagagagtgtgactcatcaggcagcccaaaagtttattggacttggggtttctattcctttttatttgtttgcaatattttcagaagaaaggcattgcacagagtgaacttaatggacgaagcaacaaatatgtcaagaacaggacatagcacgaatctgttaccagtaggaggaggatgagccacagaaattgcataattttctaatttcaagtcttcctgatacatgactgaatagtgtggttcagtgagctgcactgacctctacattttgtatgatatgtaaaacagattttttgtagagcttacttttattattaaatgtattgaggtattatatttaaaaaaaactatgttcagaacttcatctgccactggttatttttttctaaggagtaacttgcaagttttcagtacaaatctgtgctacactggataaaaatctaatttatgaattttacttgcaccttatagttcatagcaattaactgatttgtagtgattcattgtttgttttatataccaatgacttccatattttaaaagagaaaaacaactttatgttgcaggaaaccctttttgtaagtctttattatttactttgcattttgtttcactctttccagataagcagagttgctcttcaccagtgtttttcttcatgtgcaaagtgactatttgttctataatacttttatgtgtgttatatcaaatgtgtcttaagcttcatgcaaactcagtcatcagttcgtgttgtctgaagcaagtgggagatatataaatacccagtagctaaaatggtcagtcttttttagatgttttcctacttagtatctcctaataacgttttgctgtgtcactagatgttcatttcacaagtgcatgtctttctaataatccacacatttcatgctctaataatccacacatttcatgctcatttttattgtttttacagccagttatagtaagaaaaaggtttttccccttgtgctgctttataatttagcgtgtgtctgaaccttatccatgtttgctagatgaggtcttgtcaaatatatcactaccattgtcaccggtgaaaagaaacaggtagttaagttagggttaacattcatttcaaccacgaggttgtatatcatgactagcttttactcttggtttacagagaaaagttaaacagccaactaggcagtttttaagaatattaacaatatattaacaaacaccaatacaactaatcctatttggttttaatgatttcaccatgggattaagaactatatcaggaacatccctgagaaacggttttaagtgtagcaactactcttccttaatggacagccacataacgtgtaggaagtcctttatcacttatcctcgatccataagcatatcttgcagaggggaactacttctttaaacacatggagggaaagaagatgatgccactggcaccagagggttagtactgtgatgcatcctaaaatatttattatattggtaaaaattctggttaaataaaaaattagagatcactcttggctgatttcagcaccaggaactgtattacagttttagagattaattcctagtgtttacctgattatagcagttggcatcatggggcatttaattctgactttatccccacgtcagccttaataaagtcttctttaccttctctatgaagactttaaagcccaaataatcatttttcacattgatattcaagaattgagatagatagaagccaaagtgggtatctgacaagtggaaaatcaaacgtttaagaagaattacaactctgaaaagcatttatatgtggaacttctcaaggagcctcctggggactggaaagtaagtcatcagccaggcaaatgactcatgctgaagagagtccccatttcagtcccctgagatctagctgatgcttagatcctttgaaataaaaattatgtctttataactctgatcttttacataaagcagaagaggaatcaactagttaattgcaaggtttctactctgtttcctctgtaaagatcagatggtaatctttcaaataagaaaaaaataaagacgtatgtttgaccaagtagtttcacaagaatatttgggaacttgtttcttttaattttatttgtccctgagtgaagtctagaaagaaaggtaaagagtctagagtttattcctctttccaaaacattctcattcctctcctccctacacttagtatttcccccacagagtgcctagaatcttaataatgaataaaataaaaagcagcaatatgtcattaacaaatccagacctgaaagggtaaagggtttataactgcactaataaagagaggctctttttttttcttccagtttgttggtttttaatggtaccgtgttgtaaagatacccactaatggacaatcaaattgcagaaaaggctcaatatccaagagacagggactaatgcactgtacaatctgcttatccttgcccttctctcttgccaaagtgtgcttcagaaatatatactgctttaaaaaagaataaaagaatatccttttacaagtggctttacatttcctaaaatgccataagaaaatgcaatatctgggtactgtatggggaaaaaaatgtccaagtttgtgtaaaaccagtgcatttcagcttgcaagttactgaacacaataatgctgttttaattttgttttatatcagttaaaattcacaataatgtagatagaacaaattacagacaaggaaagaaaaaacttgaatgaaatggattttacagaaagctttatgataatttttgaatgcattatttattttttgtgccatgcattttttttctcaccaaatgaccttacctgtaatacagtcttgtttgtctgtttacaaccatgtatttattgcaatgtacatactgtaatgttaattgtaaattatctgttcttattaaaacatcatcccatgatgggatggtgttgatatatttggaaactcttggtgagagaatgaatggtgtgtatacatactctgtacatttttcttttctcctgtaatatagtcttgtcaccttagagcttgtttatggaagattcaagaaaactataaaatacttaaagatatataaatttaaaaaaacatagctgcaggtctttggtcccagggctgtgccttaactttaaccaatattttcttctgttttgctgcatttgaaaggtaacagtggagctagggctgggcattttacatccaggcttttaattgattagaattctgccaataggtggattttacaaaaccacagacaacctctgaaagattctgagacccttttgagacagaagctcttaagtacttcttgccagggagcagcactgcatgtgtgatggttgtttgccatctgttgatcaggaactacttcagctacttgcatttgattatttcctttttttttttttttaactcggaaacacaactggggaaatatattctttcccagtgattataaacaatctttttcttttttttaagtccttttggcttctagagctcataggaaaatggacttgatttgaaattggagccagagtttactcgtgttggttatctattcatcagcttcctgacatgttaagagaatacattaaagagaaaatactgttttttaatcctaaaatttttcttccactaagataaaccaaatgtccttacatatatgtaaacccatctatttaaacgcaaaggtgggttgatgtcagtttacatagcagaaagcattcactatcctctaagatttgtttctgcaaaactttcattgctttagaattttaaaatttcaccttgtacaatggccagcccctaaagcaggaaacatttataatggattatatggaaacatcctcccagtacttgcccagcccttgaatcatgtggcttttcagtgaaaggaaagattctttttctaggaaaaatgagcctattttattttattttattttattttttgacacaaactgtagattttagcagccctggcccaaaggaatttgattacttttgttttaaacagtacaaaggggacactataattacaaaaacatccttaactgatttgagttgtttttatttctttggatatattttcagagtggtaaattgtgtgtgagaattacaaatgattattcttttagtggtttcttagcctctcttacagcccacggggatagtactgtacatcaataccttcatatgaaatttttatatgcaatgaaaataaaagcatgggttgattctgcctatttatgactcaatcttttacaaataaaagattattcattttaaattatagttcaatcagcatgtctctt

SEQ ID NO: 5145 - protein, 745 aa, Homo sapiens
MAQQTSPDTLTVPEVDNPHCPNPWLNEDLVKSLRENLLQHEKSKTARKSVSPKLSPVISPRNSPRLLRRMLLSSNIPKQRRFTVAHTCFDVDNGTSAGRSPLDPMTSPGSGLILQANFVHSQRRESFLYRSDSDYDLSPKSMSRNSSIASDIHGDDLIVTPFAQVLASLRTVRNNFAALTNLQDRAPSKRSPMCNQPSINKATITEEAYQKLASETLEELDWCLDQLETLQTRHSVSEMASNKFKRMLNRELTHLSEMSRSGNQVSEFISNTFLDKQHEVEIPSPTQKEKEKKKRPMSQISGVKKLMHSSSLTNSSIPRFGVKTEQEDVLAKELEDVNKWGLHVFRIAELSGNRPLTVIMHTIFQERDLLKTFKIPVDTLITYLMTLEDHYHADVAYHNNIHAADVVQSTHVLLSTPALEAVFTDLEILAAIFASAIHDVDHPGVSNQFLINTNSELALMYNDSSVLENHHLAVGFKLLQEENCDIFQNLTKKQRQSLRKMVIDIVLATDMSKHMNLLADLKTMVETKKVTSSGVLLLDNYSDRIQVLQNMVHCADLSNPTKPLQLYRQWTDRIMEEFFRQGDRERERGMEISPMCDKHNASVEKSQVGFIDYIVHPLWETWADLVHPDAQDILDTLEDNREWYQSTIPQSPSPAPDDPEEGRQGQTEKFQFELTLEEDGESDTEKDSGSQVEEDTSCSDSKTLCTQDSESTEIPLDEQVEEEAVGEEEESQPEACVIDDRSPDT

SEQ ID NO: 5146 - DNA, 7264 bp, Homo sapiens
cccctctcggtagccctgaggctctggcgccttcaagtgagaagctaagcaccagcctctgctgggctgcagaagcggcggcggcggcagcagcagcagcagcatcaggaaggcgctcgggccagcgcggtgaacccgggctgggcagcaggtcgcggagccgcgagccaggatggaggcagagggcagcagcgcgccggcccgggcgggcagcggagagggcagcgacagcgccggcggggccacgctcaaagcccccaagcatctctggaggcacgagcagcaccaccagtacccgctccggcagccccagttccgcctcctgcatccccatcaccacctgcccccgccgccgccaccctcgccccagccccagccccagtgtccgctacagccgccgccgccgccccccctgccgccgcccccgccgccgcccggggctgcccgcggccgctacgcctcgagcggggccaccggccgcgtccggcatcgcggctactcggacaccgagcgctacctgtactgtcgcgccatggaccgcacctcctacgcggtggagaccggccaccggcccggcctgaagaaatccaggatgtcctggccctcctcgttccagggactcaggcgttttgatgtggacaatggcacatctgcgggacggagtcccttggatcccatgaccagcccaggatccgggctaattctccaagcaaattttgtccacagtcaacgacgggagtccttcctgtatcgatccgacagcgattatgacctctctccaaagtctatgtcccggaactcctccattgccagtgatatacacggagatgacttgattgtgactccatttgctcaggtcttggccagtctgcgaactgtacgaaacaactttgctgcattaactaatttgcaagatcgagcacctagcaaaagatcacccatgtgcaaccaaccatccatcaacaaagccaccataacagaggaggcctaccagaaactggccagcgagaccctggaggagctggactggtgtctggaccagctagagaccctacagaccaggcactccgtcagtgagatggcctccaacaagtttaaaaggatgcttaatcgggagctcacccatctctctgaaatgagtcggtctggaaatcaagtgtcagagtttatatcaaacacattcttagataagcaacatgaagtggaaattccttctccaactcagaaggaaaaggagaaaaagaaaagaccaatgtctcagatcagtggagtcaagaaattgatgcacagctctagtctgactaattcaagtatcccaaggtttggagttaaaactgaacaagaagatgtccttgccaaggaactagaagatgtgaacaaatggggtcttcatgttttcagaatagcagagttgtctggtaaccggcccttgactgttatcatgcacaccatttttcaggaacgggatttattaaaaacatttaaaattccagtagatactttaattacatatcttatgactctcgaagaccattaccatgctgatgtggcctatcacaacaatatccatgctgcagatgttgtccagtctactcatgtgctattatctacacctgctttggaggctgtgtttacagatttggagattcttgcagcaatttttgccagtgcaatacatgatgtagatcatcctggtgtgtccaatcaatttctgatcaatacaaactctgaacttgccttgatgtacaatgattcctcagtcttagagaaccatcatttggctgtgggctttaaattgcttcaggaagaaaactgtgacattttccagaatttgaccaaaaaacaaagacaatctttaaggaaaatggtcattgacatcgtacttgcaacagatatgtcaaaacacatgaatctactggctgatttgaagactatggttgaaactaagaaagtgacaagctctggagttcttcttcttgataattattccgataggattcaggttcttcagaatatggtgcactgtgcagatctgagcaacccaacaaagcctctccagctgtaccgccagtggacggaccggataatggaggagttcttccgccaaggagaccgagagagggaacgtggcatggagataagccccatgtgtgacaagcacaatgcttccgtggaaaaatcacaggtgggcttcatagactatattgttcatcccctctgggagacatgggcagacctcgtccaccctgacgcccaggatattttggacactttggaggacaatcgtgaatggtaccagagcacaatccctcagagcccctctcctgcacctgatgacccagaggagggccggcagggtcaaactgagaaattccagtttgaactaactttagaggaagatggtgagtcagacacggaaaaggacagtggcagtcaagtggaagaagacactagctgcagtgactccaagactctttgtactcaagactcagagtctactgaaattccccttgatgaacaggttgaagaggaggcagtaggggaagaagaggaaagccagcctgaagcctgtgtcatagatgatcgttctcctgacacgtaacagtgcaaaaactttcatgccttttttttttttaagtagaaaaattgtttccaaagtgcatgtcacatgccacaaccacggtcacacctcactgtcatctgccaggacgtttgttgaacaaaactgaccttgactactcagtccagcgctcaggaatatcgtaaccagttttttcacctccatgtcatccgagcaaggtggacatcttcacgaacagcgtttttaacaagatttcagcttggtagagctgacaaagcagataaaatctactccaaattattttcaagagagtgtgactcatcaggcagcccaaaagtttattggacttggggtttctattcctttttatttgtttgcaatattttcagaagaaaggcattgcacagagtgaacttaatggacgaagcaacaaatatgtcaagaacaggacatagcacgaatctgttaccagtaggaggaggatgagccacagaaattgcataattttctaatttcaagtcttcctgatacatgactgaatagtgtggttcagtgagctgcactgacctctacattttgtatgatatgtaaaacagattttttgtagagcttacttttattattaaatgtattgaggtattatatttaaaaaaaactatgttcagaacttcatctgccactggttatttttttctaaggagtaacttgcaagttttcagtacaaatctgtgctacactggataaaaatctaatttatgaattttacttgcaccttatagttcatagcaattaactgatttgtagtgattcattgtttgttttatataccaatgacttccatattttaaaagagaaaaacaactttatgttgcaggaaaccctttttgtaagtctttattatttactttgcattttgtttcactctttccagataagcagagttgctcttcaccagtgtttttcttcatgtgcaaagtgactatttgttctataatacttttatgtgtgttatatcaaatgtgtcttaagcttcatgcaaactcagtcatcagttcgtgttgtctgaagcaagtgggagatatataaatacccagtagctaaaatggtcagtcttttttagatgttttcctacttagtatctcctaataacgttttgctgtgtcactagatgttcatttcacaagtgcatgtctttctaataatccacacatttcatgctctaataatccacacatttcatgctcatttttattgtttttacagccagttatagtaagaaaaaggtttttccccttgtgctgctttataatttagcgtgtgtctgaaccttatccatgtttgctagatgaggtcttgtcaaatatatcactaccattgtcaccggtgaaaagaaacaggtagttaagttagggttaacattcatttcaaccacgaggttgtatatcatgactagcttttactcttggtttacagagaaaagttaaacagccaactaggcagtttttaagaatattaacaatatattaacaaacaccaatacaactaatcctatttggttttaatgatttcaccatgggattaagaactatatcaggaacatccctgagaaacggttttaagtgtagcaactactcttccttaatggacagccacataacgtgtaggaagtcctttatcacttatcctcgatccataagcatatcttgcagaggggaactacttctttaaacacatggagggaaagaagatgatgccactggcaccagagggttagtactgtgatgcatcctaaaatatttattatattggtaaaaattctggttaaataaaaaattagagatcactcttggctgatttcagcaccaggaactgtattacagttttagagattaattcctagtgtttacctgattatagcagttggcatcatggggcatttaattctgactttatccccacgtcagccttaataaagtcttctttaccttctctatgaagactttaaagcccaaataatcatttttcacattgatattcaagaattgagatagatagaagccaaagtgggtatctgacaagtggaaaatcaaacgtttaagaagaattacaactctgaaaagcatttatatgtggaacttctcaaggagcctcctggggactggaaagtaagtcatcagccaggcaaatgactcatgctgaagagagtccccatttcagtcccctgagatctagctgatgcttagatcctttgaaataaaaattatgtctttataactctgatcttttacataaagcagaagaggaatcaactagttaattgcaaggtttctactctgtttcctctgtaaagatcagatggtaatctttcaaataagaaaaaaataaagacgtatgtttgaccaagtagtttcacaagaatatttgggaacttgtttcttttaattttatttgtccctgagtgaagtctagaaagaaaggtaaagagtctagagtttattcctctttccaaaacattctcattcctctcctccctacacttagtatttcccccacagagtgcctagaatcttaataatgaataaaataaaaagcagcaatatgtcattaacaaatccagacctgaaagggtaaagggtttataactgcactaataaagagaggctctttttttttcttccagtttgttggtttttaatggtaccgtgttgtaaagatacccactaatggacaatcaaattgcagaaaaggctcaatatccaagagacagggactaatgcactgtacaatctgcttatccttgcccttctctcttgccaaagtgtgcttcagaaatatatactgctttaaaaaagaataaaagaatatccttttacaagtggctttacatttcctaaaatgccataagaaaatgcaatatctgggtactgtatggggaaaaaaatgtccaagtttgtgtaaaaccagtgcatttcagcttgcaagttactgaacacaataatgctgttttaattttgttttatatcagttaaaattcacaataatgtagatagaacaaattacagacaaggaaagaaaaaacttgaatgaaatggattttacagaaagctttatgataatttttgaatgcattatttattttttgtgccatgcattttttttctcaccaaatgaccttacctgtaatacagtcttgtttgtctgtttacaaccatgtatttattgcaatgtacatactgtaatgttaattgtaaattatctgttcttattaaaacatcatcccatgatgggatggtgttgatatatttggaaactcttggtgagagaatgaatggtgtgtatacatactctgtacatttttcttttctcctgtaatatagtcttgtcaccttagagcttgtttatggaagattcaagaaaactataaaatacttaaagatatataaatttaaaaaaacatagctgcaggtctttggtcccagggctgtgccttaactttaaccaatattttcttctgttttgctgcatttgaaaggtaacagtggagctagggctgggcattttacatccaggcttttaattgattagaattctgccaataggtggattttacaaaaccacagacaacctctgaaagattctgagacccttttgagacagaagctcttaagtacttcttgccagggagcagcactgcatgtgtgatggttgtttgccatctgttgatcaggaactacttcagctacttgcatttgattatttcctttttttttttttttaactcggaaacacaactggggaaatatattctttcccagtgattataaacaatctttttcttttttttaagtccttttggcttctagagctcataggaaaatggacttgatttgaaattggagccagagtttactcgtgttggttatctattcatcagcttcctgacatgttaagagaatacattaaagagaaaatactgttttttaatcctaaaatttttcttccactaagataaaccaaatgtccttacatatatgtaaacccatctatttaaacgcaaaggtgggttgatgtcagtttacatagcagaaagcattcactatcctctaagatttgtttctgcaaaactttcattgctttagaattttaaaatttcaccttgtacaatggccagcccctaaagcaggaaacatttataatggattatatggaaacatcctcccagtacttgcccagcccttgaatcatgtggcttttcagtgaaaggaaagattctttttctaggaaaaatgagcctattttattttattttattttattttttgacacaaactgtagattttagcagccctggcccaaaggaatttgattacttttgttttaaacagtacaaaggggacactataattacaaaaacatccttaactgatttgagttgtttttatttctttggatatattttcagagtggtaaattgtgtgtgagaattacaaatgattattcttttagtggtttcttagcctctcttacagcccacggggatagtactgtacatcaataccttcatatgaaatttttatatgcaatgaaaataaaagcatgggttgattctgcctatttatgactcaatcttttacaaataaaagattattcattttaaattatagttcaatcagcatgtctctt

SEQ ID NO: 5147 - protein, 809 aa, Homo sapiens
MEAEGSSAPARAGSGEGSDSAGGATLKAPKHLWRHEQHHQYPLRQPQFRLLHPHHHLPPPPPPSPQPQPQCPLQPPPPPPLPPPPPPPGAARGRYASSGATGRVRHRGYSDTERYLYCRAMDRTSYAVETGHRPGLKKSRMSWPSSFQGLRRFDVDNGTSAGRSPLDPMTSPGSGLILQANFVHSQRRESFLYRSDSDYDLSPKSMSRNSSIASDIHGDDLIVTPFAQVLASLRTVRNNFAALTNLQDRAPSKRSPMCNQPSINKATITEEAYQKLASETLEELDWCLDQLETLQTRHSVSEMASNKFKRMLNRELTHLSEMSRSGNQVSEFISNTFLDKQHEVEIPSPTQKEKEKKKRPMSQISGVKKLMHSSSLTNSSIPRFGVKTEQEDVLAKELEDVNKWGLHVFRIAELSGNRPLTVIMHTIFQERDLLKTFKIPVDTLITYLMTLEDHYHADVAYHNNIHAADVVQSTHVLLSTPALEAVFTDLEILAAIFASAIHDVDHPGVSNQFLINTNSELALMYNDSSVLENHHLAVGFKLLQEENCDIFQNLTKKQRQSLRKMVIDIVLATDMSKHMNLLADLKTMVETKKVTSSGVLLLDNYSDRIQVLQNMVHCADLSNPTKPLQLYRQWTDRIMEEFFRQGDRERERGMEISPMCDKHNASVEKSQVGFIDYIVHPLWETWADLVHPDAQDILDTLEDNREWYQSTIPQSPSPAPDDPEEGRQGQTEKFQFELTLEEDGESDTEKDSGSQVEEDTSCSDSKTLCTQDSESTEIPLDEQVEEEAVGEEEESQPEACVIDDRSPDT

SEQ ID NO: 5148 - DNA, 6279 bp, Homo sapiens
gacagaagatctgcgaacatgatgcacgtgaataattttccctttagaaggcattcctggatatgaggaggcctaccagaaactggccagcgagaccctggaggagctggactggtgtctggaccagctagagaccctacagaccaggcactccgtcagtgagatggcctccaacaagtttaaaaggatgcttaatcgggagctcacccatctctctgaaatgagtcggtctggaaatcaagtgtcagagtttatatcaaacacattcttagataagcaacatgaagtggaaattccttctccaactcagaaggaaaaggagaaaaagaaaagaccaatgtctcagatcagtggagtcaagaaattgatgcacagctctagtctgactaattcaagtatcccaaggtttggagttaaaactgaacaagaagatgtccttgccaaggaactagaagatgtgaacaaatggggtcttcatgttttcagaatagcagagttgtctggtaaccggcccttgactgttatcatgcacaccatttttcaggaacgggatttattaaaaacatttaaaattccagtagatactttaattacatatcttatgactctcgaagaccattaccatgctgatgtggcctatcacaacaatatccatgctgcagatgttgtccagtctactcatgtgctattatctacacctgctttggaggctgtgtttacagatttggagattcttgcagcaatttttgccagtgcaatacatgatgtagatcatcctggtgtgtccaatcaatttctgatcaatacaaactctgaacttgccttgatgtacaatgattcctcagtcttagagaaccatcatttggctgtgggctttaaattgcttcaggaagaaaactgtgacattttccagaatttgaccaaaaaacaaagacaatctttaaggaaaatggtcattgacatcgtacttgcaacagatatgtcaaaacacatgaatctactggctgatttgaagactatggttgaaactaagaaagtgacaagctctggagttcttcttcttgataattattccgataggattcaggttcttcagaatatggtgcactgtgcagatctgagcaacccaacaaagcctctccagctgtaccgccagtggacggaccggataatggaggagttcttccgccaaggagaccgagagagggaacgtggcatggagataagccccatgtgtgacaagcacaatgcttccgtggaaaaatcacaggtgggcttcatagactatattgttcatcccctctgggagacatgggcagacctcgtccaccctgacgcccaggatattttggacactttggaggacaatcgtgaatggtaccagagcacaatccctcagagcccctctcctgcacctgatgacccagaggagggccggcagggtcaaactgagaaattccagtttgaactaactttagaggaagatggtgagtcagacacggaaaaggacagtggcagtcaagtggaagaagacactagctgcagtgactccaagactctttgtactcaagactcagagtctactgaaattccccttgatgaacaggttgaagaggaggcagtaggggaagaagaggaaagccagcctgaagcctgtgtcatagatgatcgttctcctgacacgtaacagtgcaaaaactttcatgccttttttttttttaagtagaaaaattgtttccaaagtgcatgtcacatgccacaaccacggtcacacctcactgtcatctgccaggacgtttgttgaacaaaactgaccttgactactcagtccagcgctcaggaatatcgtaaccagttttttcacctccatgtcatccgagcaaggtggacatcttcacgaacagcgtttttaacaagatttcagcttggtagagctgacaaagcagataaaatctactccaaattattttcaagagagtgtgactcatcaggcagcccaaaagtttattggacttggggtttctattcctttttatttgtttgcaatattttcagaagaaaggcattgcacagagtgaacttaatggacgaagcaacaaatatgtcaagaacaggacatagcacgaatctgttaccagtaggaggaggatgagccacagaaattgcataattttctaatttcaagtcttcctgatacatgactgaatagtgtggttcagtgagctgcactgacctctacattttgtatgatatgtaaaacagattttttgtagagcttacttttattattaaatgtattgaggtattatatttaaaaaaaactatgttcagaacttcatctgccactggttatttttttctaaggagtaacttgcaagttttcagtacaaatctgtgctacactggataaaaatctaatttatgaattttacttgcaccttatagttcatagcaattaactgatttgtagtgattcattgtttgttttatataccaatgacttccatattttaaaagagaaaaacaactttatgttgcaggaaaccctttttgtaagtctttattatttactttgcattttgtttcactctttccagataagcagagttgctcttcaccagtgtttttcttcatgtgcaaagtgactatttgttctataatacttttatgtgtgttatatcaaatgtgtcttaagcttcatgcaaactcagtcatcagttcgtgttgtctgaagcaagtgggagatatataaatacccagtagctaaaatggtcagtcttttttagatgttttcctacttagtatctcctaataacgttttgctgtgtcactagatgttcatttcacaagtgcatgtctttctaataatccacacatttcatgctctaataatccacacatttcatgctcatttttattgtttttacagccagttatagtaagaaaaaggtttttccccttgtgctgctttataatttagcgtgtgtctgaaccttatccatgtttgctagatgaggtcttgtcaaatatatcactaccattgtcaccggtgaaaagaaacaggtagttaagttagggttaacattcatttcaaccacgaggttgtatatcatgactagcttttactcttggtttacagagaaaagttaaacagccaactaggcagtttttaagaatattaacaatatattaacaaacaccaatacaactaatcctatttggttttaatgatttcaccatgggattaagaactatatcaggaacatccctgagaaacggttttaagtgtagcaactactcttccttaatggacagccacataacgtgtaggaagtcctttatcacttatcctcgatccataagcatatcttgcagaggggaactacttctttaaacacatggagggaaagaagatgatgccactggcaccagagggttagtactgtgatgcatcctaaaatatttattatattggtaaaaattctggttaaataaaaaattagagatcactcttggctgatttcagcaccaggaactgtattacagttttagagattaattcctagtgtttacctgattatagcagttggcatcatggggcatttaattctgactttatccccacgtcagccttaataaagtcttctttaccttctctatgaagactttaaagcccaaataatcatttttcacattgatattcaagaattgagatagatagaagccaaagtgggtatctgacaagtggaaaatcaaacgtttaagaagaattacaactctgaaaagcatttatatgtggaacttctcaaggagcctcctggggactggaaagtaagtcatcagccaggcaaatgactcatgctgaagagagtccccatttcagtcccctgagatctagctgatgcttagatcctttgaaataaaaattatgtctttataactctgatcttttacataaagcagaagaggaatcaactagttaattgcaaggtttctactctgtttcctctgtaaagatcagatggtaatctttcaaataagaaaaaaataaagacgtatgtttgaccaagtagtttcacaagaatatttgggaacttgtttcttttaattttatttgtccctgagtgaagtctagaaagaaaggtaaagagtctagagtttattcctctttccaaaacattctcattcctctcctccctacacttagtatttcccccacagagtgcctagaatcttaataatgaataaaataaaaagcagcaatatgtcattaacaaatccagacctgaaagggtaaagggtttataactgcactaataaagagaggctctttttttttcttccagtttgttggtttttaatggtaccgtgttgtaaagatacccactaatggacaatcaaattgcagaaaaggctcaatatccaagagacagggactaatgcactgtacaatctgcttatccttgcccttctctcttgccaaagtgtgcttcagaaatatatactgctttaaaaaagaataaaagaatatccttttacaagtggctttacatttcctaaaatgccataagaaaatgcaatatctgggtactgtatggggaaaaaaatgtccaagtttgtgtaaaaccagtgcatttcagcttgcaagttactgaacacaataatgctgttttaattttgttttatatcagttaaaattcacaataatgtagatagaacaaattacagacaaggaaagaaaaaacttgaatgaaatggattttacagaaagctttatgataatttttgaatgcattatttattttttgtgccatgcattttttttctcaccaaatgaccttacctgtaatacagtcttgtttgtctgtttacaaccatgtatttattgcaatgtacatactgtaatgttaattgtaaattatctgttcttattaaaacatcatcccatgatgggatggtgttgatatatttggaaactcttggtgagagaatgaatggtgtgtatacatactctgtacatttttcttttctcctgtaatatagtcttgtcaccttagagcttgtttatggaagattcaagaaaactataaaatacttaaagatatataaatttaaaaaaacatagctgcaggtctttggtcccagggctgtgccttaactttaaccaatattttcttctgttttgctgcatttgaaaggtaacagtggagctagggctgggcattttacatccaggcttttaattgattagaattctgccaataggtggattttacaaaaccacagacaacctctgaaagattctgagacccttttgagacagaagctcttaagtacttcttgccagggagcagcactgcatgtgtgatggttgtttgccatctgttgatcaggaactacttcagctacttgcatttgattatttcctttttttttttttttaactcggaaacacaactggggaaatatattctttcccagtgattataaacaatctttttcttttttttaagtccttttggcttctagagctcataggaaaatggacttgatttgaaattggagccagagtttactcgtgttggttatctattcatcagcttcctgacatgttaagagaatacattaaagagaaaatactgttttttaatcctaaaatttttcttccactaagataaaccaaatgtccttacatatatgtaaacccatctatttaaacgcaaaggtgggttgatgtcagtttacatagcagaaagcattcactatcctctaagatttgtttctgcaaaactttcattgctttagaattttaaaatttcaccttgtacaatggccagcccctaaagcaggaaacatttataatggattatatggaaacatcctcccagtacttgcccagcccttgaatcatgtggcttttcagtgaaaggaaagattctttttctaggaaaaatgagcctattttattttattttattttattttttgacacaaactgtagattttagcagccctggcccaaaggaatttgattacttttgttttaaacagtacaaaggggacactataattacaaaaacatccttaactgatttgagttgtttttatttctttggatatattttcagagtggtaaattgtgtgtgagaattacaaatgattattcttttagtggtttcttagcctctcttacagcccacggggatagtactgtacatcaataccttcatatgaaatttttatatgcaatgaaaataaaagcatgggttgattctgcct

SEQ ID NO: 5149 - protein, 507 aa, Homo sapiens; identical to SEQ ID NO: 5139

SEQ ID NO: 5150 - DNA, 6738 bp, Homo sapiens
caatacttgttgcaataattgcccacgatagctgctcaaacaagagagttggaattcatctgtaaaaatcactacatgtaacgtaggagacaagaaaaatattaatgacagaagatctgcgaacatgatgcacgtgaataattttccctttagaaggcattcctggatatgttttgatgtggacaatggcacatctgcgggacggagtcccttggatcccatgaccagcccaggatccgggctaattctccaagcaaattttgtccacagtcaacgacgggagtccttcctgtatcgatccgacagcgattatgacctctctccaaagtctatgtcccggaactcctccattgccagtgatatacacggagatgacttgattgtgactccatttgctcaggtcttggccagtctgcgaactgtacgaaacaactttgctgcattaactaatttgcaagatcgagcacctagcaaaagatcacccatgtgcaaccaaccatccatcaacaaagccaccataacagaggaggcctaccagaaactggccagcgagaccctggaggagctggactggtgtctggaccagctagagaccctacagaccaggcactccgtcagtgagatggcctccaacaagtttaaaaggatgcttaatcgggagctcacccatctctctgaaatgagtcggtctggaaatcaagtgtcagagtttatatcaaacacattcttagataagcaacatgaagtggaaattccttctccaactcagaaggaaaaggagaaaaagaaaagaccaatgtctcagatcagtggagtcaagaaattgatgcacagctctagtctgactaattcaagtatcccaaggtttggagttaaaactgaacaagaagatgtccttgccaaggaactagaagatgtgaacaaatggggtcttcatgttttcagaatagcagagttgtctggtaaccggcccttgactgttatcatgcacaccatttttcaggaacgggatttattaaaaacatttaaaattccagtagatactttaattacatatcttatgactctcgaagaccattaccatgctgatgtggcctatcacaacaatatccatgctgcagatgttgtccagtctactcatgtgctattatctacacctgctttggaggctgtgtttacagatttggagattcttgcagcaatttttgccagtgcaatacatgatgtagatcatcctggtgtgtccaatcaatttctgatcaatacaaactctgaacttgccttgatgtacaatgattcctcagtcttagagaaccatcatttggctgtgggctttaaattgcttcaggaagaaaactgtgacattttccagaatttgaccaaaaaacaaagacaatctttaaggaaaatggtcattgacatcgtacttgcaacagatatgtcaaaacacatgaatctactggctgatttgaagactatggttgaaactaagaaagtgacaagctctggagttcttcttcttgataattattccgataggattcaggttcttcagaatatggtgcactgtgcagatctgagcaacccaacaaagcctctccagctgtaccgccagtggacggaccggataatggaggagttcttccgccaaggagaccgagagagggaacgtggcatggagataagccccatgtgtgacaagcacaatgcttccgtggaaaaatcacaggtgggcttcatagactatattgttcatcccctctgggagacatgggcagacctcgtccaccctgacgcccaggatattttggacactttggaggacaatcgtgaatggtaccagagcacaatccctcagagcccctctcctgcacctgatgacccagaggagggccggcagggtcaaactgagaaattccagtttgaactaactttagaggaagatggtgagtcagacacggaaaaggacagtggcagtcaagtggaagaagacactagctgcagtgactccaagactctttgtactcaagactcagagtctactgaaattccccttgatgaacaggttgaagaggaggcagtaggggaagaagaggaaagccagcctgaagcctgtgtcatagatgatcgttctcctgacacgtaacagtgcaaaaactttcatgccttttttttttttaagtagaaaaattgtttccaaagtgcatgtcacatgccacaaccacggtcacacctcactgtcatctgccaggacgtttgttgaacaaaactgaccttgactactcagtccagcgctcaggaatatcgtaaccagttttttcacctccatgtcatccgagcaaggtggacatcttcacgaacagcgtttttaacaagatttcagcttggtagagctgacaaagcagataaaatctactccaaattattttcaagagagtgtgactcatcaggcagcccaaaagtttattggacttggggtttctattcctttttatttgtttgcaatattttcagaagaaaggcattgcacagagtgaacttaatggacgaagcaacaaatatgtcaagaacaggacatagcacgaatctgttaccagtaggaggaggatgagccacagaaattgcataattttctaatttcaagtcttcctgatacatgactgaatagtgtggttcagtgagctgcactgacctctacattttgtatgatatgtaaaacagattttttgtagagcttacttttattattaaatgtattgaggtattatatttaaaaaaaactatgttcagaacttcatctgccactggttatttttttctaaggagtaacttgcaagttttcagtacaaatctgtgctacactggataaaaatctaatttatgaattttacttgcaccttatagttcatagcaattaactgatttgtagtgattcattgtttgttttatataccaatgacttccatattttaaaagagaaaaacaactttatgttgcaggaaaccctttttgtaagtctttattatttactttgcattttgtttcactctttccagataagcagagttgctcttcaccagtgtttttcttcatgtgcaaagtgactatttgttctataatacttttatgtgtgttatatcaaatgtgtcttaagcttcatgcaaactcagtcatcagttcgtgttgtctgaagcaagtgggagatatataaatacccagtagctaaaatggtcagtcttttttagatgttttcctacttagtatctcctaataacgttttgctgtgtcactagatgttcatttcacaagtgcatgtctttctaataatccacacatttcatgctctaataatccacacatttcatgctcatttttattgtttttacagccagttatagtaagaaaaaggtttttccccttgtgctgctttataatttagcgtgtgtctgaaccttatccatgtttgctagatgaggtcttgtcaaatatatcactaccattgtcaccggtgaaaagaaacaggtagttaagttagggttaacattcatttcaaccacgaggttgtatatcatgactagcttttactcttggtttacagagaaaagttaaacagccaactaggcagtttttaagaatattaacaatatattaacaaacaccaatacaactaatcctatttggttttaatgatttcaccatgggattaagaactatatcaggaacatccctgagaaacggttttaagtgtagcaactactcttccttaatggacagccacataacgtgtaggaagtcctttatcacttatcctcgatccataagcatatcttgcagaggggaactacttctttaaacacatggagggaaagaagatgatgccactggcaccagagggttagtactgtgatgcatcctaaaatatttattatattggtaaaaattctggttaaataaaaaattagagatcactcttggctgatttcagcaccaggaactgtattacagttttagagattaattcctagtgtttacctgattatagcagttggcatcatggggcatttaattctgactttatccccacgtcagccttaataaagtcttctttaccttctctatgaagactttaaagcccaaataatcatttttcacattgatattcaagaattgagatagatagaagccaaagtgggtatctgacaagtggaaaatcaaacgtttaagaagaattacaactctgaaaagcatttatatgtggaacttctcaaggagcctcctggggactggaaagtaagtcatcagccaggcaaatgactcatgctgaagagagtccccatttcagtcccctgagatctagctgatgcttagatcctttgaaataaaaattatgtctttataactctgatcttttacataaagcagaagaggaatcaactagttaattgcaaggtttctactctgtttcctctgtaaagatcagatggtaatctttcaaataagaaaaaaataaagacgtatgtttgaccaagtagtttcacaagaatatttgggaacttgtttcttttaattttatttgtccctgagtgaagtctagaaagaaaggtaaagagtctagagtttattcctctttccaaaacattctcattcctctcctccctacacttagtatttcccccacagagtgcctagaatcttaataatgaataaaataaaaagcagcaatatgtcattaacaaatccagacctgaaagggtaaagggtttataactgcactaataaagagaggctctttttttttcttccagtttgttggtttttaatggtaccgtgttgtaaagatacccactaatggacaatcaaattgcagaaaaggctcaatatccaagagacagggactaatgcactgtacaatctgcttatccttgcccttctctcttgccaaagtgtgcttcagaaatatatactgctttaaaaaagaataaaagaatatccttttacaagtggctttacatttcctaaaatgccataagaaaatgcaatatctgggtactgtatggggaaaaaaatgtccaagtttgtgtaaaaccagtgcatttcagcttgcaagttactgaacacaataatgctgttttaattttgttttatatcagttaaaattcacaataatgtagatagaacaaattacagacaaggaaagaaaaaacttgaatgaaatggattttacagaaagctttatgataatttttgaatgcattatttattttttgtgccatgcattttttttctcaccaaatgaccttacctgtaatacagtcttgtttgtctgtttacaaccatgtatttattgcaatgtacatactgtaatgttaattgtaaattatctgttcttattaaaacatcatcccatgatgggatggtgttgatatatttggaaactcttggtgagagaatgaatggtgtgtatacatactctgtacatttttcttttctcctgtaatatagtcttgtcaccttagagcttgtttatggaagattcaagaaaactataaaatacttaaagatatataaatttaaaaaaacatagctgcaggtctttggtcccagggctgtgccttaactttaaccaatattttcttctgttttgctgcatttgaaaggtaacagtggagctagggctgggcattttacatccaggcttttaattgattagaattctgccaataggtggattttacaaaaccacagacaacctctgaaagattctgagacccttttgagacagaagctcttaagtacttcttgccagggagcagcactgcatgtgtgatggttgtttgccatctgttgatcaggaactacttcagctacttgcatttgattatttcctttttttttttttttaactcggaaacacaactggggaaatatattctttcccagtgattataaacaatctttttcttttttttaagtccttttggcttctagagctcataggaaaatggacttgatttgaaattggagccagagtttactcgtgttggttatctattcatcagcttcctgacatgttaagagaatacattaaagagaaaatactgttttttaatcctaaaatttttcttccactaagataaaccaaatgtccttacatatatgtaaacccatctatttaaacgcaaaggtgggttgatgtcagtttacatagcagaaagcattcactatcctctaagatttgtttctgcaaaactttcattgctttagaattttaaaatttcaccttgtacaatggccagcccctaaagcaggaaacatttataatggattatatggaaacatcctcccagtacttgcccagcccttgaatcatgtggcttttcagtgaaaggaaagattctttttctaggaaaaatgagcctattttattttattttattttattttttgacacaaactgtagattttagcagccctggcccaaaggaatttgattacttttgttttaaacagtacaaaggggacactataattacaaaaacatccttaactgatttgagttgtttttatttctttggatatattttcagagtggtaaattgtgtgtgagaattacaaatgattattcttttagtggtttcttagcctctcttacagcccacggggatagtactgtacatcaataccttcatatgaaatttttatatgcaatgaaaataaaagcatgggttgattctgcct

SEQ ID NO: 5151 - protein, 673 aa, Homo sapiens; identical to SEQ ID NO: 650

SEQ ID NO: 5152 - DNA, 7214 bp, Homo sapiens
tgcggcgcattagttccaatagtttaacaggctgctttgtagcacggacaaagccgtgcgagcgcggtgctttccctccttgttcatttgctatgcgagcttgtcagtgatctttggcaggggcttgggagaggaggggtgacgtttaatacgcttccgcggaggagtgcgctcgcctcctctgcacccagccccaggctctacagagagactgaggcaggcgactgaatgcactaacagcagcaggctcagacctgcttccctggacatttccgggaccgtgagcgagggaaccacgttgccctggattcttgccagctgtacaaagttgaccaggaaaatggctcagcagacaagcccggacactttaacagtacctgaagtggataatccgcattgtccaaacccgtggctgaacgaagaccttgtgaaatccttgcgagaaaacctgttgcagcatgagaagtccaagacagcgaggaaatcggtttctcccaagctctctccagtgatctctccgagaaattcccccaggcttctgcgcagaatgcttctcagcagcaacatccccaaacagcggcgtttcacggtggcacatacatgttttgatgtggacaatggcacatctgcgggacggagtcccttggatcccatgaccagcccaggatccgggctaattctccaagcaaattttgtccacagtcaacgacgggagtccttcctgtatcgatccgacagcgattatgacctctctccaaagtctatgtcccggaactcctccattgccagtgatatacacggagatgacttgattgtgactccatttgctcaggtcttggccagtctgcgaactgtacgaaacaactttgctgcattaactaatttgcaagatcgagcacctagcaaaagatcacccatgtgcaaccaaccatccatcaacaaagccaccataacagggctctataatgggatcattgcatttctctgattactaatgagaaggaggcctaccagaaactggccagcgagaccctggaggagctggactggtgtctggaccagctagagaccctacagaccaggcactccgtcagtgagatggcctccaacaagtttaaaaggatgcttaatcgggagctcacccatctctctgaaatgagtcggtctggaaatcaagtgtcagagtttatatcaaacacattcttagataagcaacatgaagtggaaattccttctccaactcagaaggaaaaggagaaaaagaaaagaccaatgtctcagatcagtggagtcaagaaattgatgcacagctctagtctgactaattcaagtatcccaaggtttggagttaaaactgaacaagaagatgtccttgccaaggaactagaagatgtgaacaaatggggtcttcatgttttcagaatagcagagttgtctggtaaccggcccttgactgttatcatgcacaccatttttcaggaacgggatttattaaaaacatttaaaattccagtagatactttaattacatatcttatgactctcgaagaccattaccatgctgatgtggcctatcacaacaatatccatgctgcagatgttgtccagtctactcatgtgctattatctacacctgctttggaggctgtgtttacagatttggagattcttgcagcaatttttgccagtgcaatacatgatgtagatcatcctggtgtgtccaatcaatttctgatcaatacaaactctgaacttgccttgatgtacaatgattcctcagtcttagagaaccatcatttggctgtgggctttaaattgcttcaggaagaaaactgtgacattttccagaatttgaccaaaaaacaaagacaatctttaaggaaaatggtcattgacatcgtacttgcaacagatatgtcaaaacacatgaatctactggctgatttgaagactatggttgaaactaagaaagtgacaagctctggagttcttcttcttgataattattccgataggattcaggttcttcagaatatggtgcactgtgcagatctgagcaacccaacaaagcctctccagctgtaccgccagtggacggaccggataatggaggagttcttccgccaaggagaccgagagagggaacgtggcatggagataagccccatgtgtgacaagcacaatgcttccgtggaaaaatcacaggtgggcttcatagactatattgttcatcccctctgggagacatgggcagacctcgtccaccctgacgcccaggatattttggacactttggaggacaatcgtgaatggtaccagagcacaatccctcagagcccctctcctgcacctgatgacccagaggagggccggcagggtcaaactgagaaattccagtttgaactaactttagaggaagatggtgagtcagacacggaaaaggacagtggcagtcaagtggaagaagacactagctgcagtgactccaagactctttgtactcaagactcagagtctactgaaattccccttgatgaacaggttgaagaggaggcagtaggggaagaagaggaaagccagcctgaagcctgtgtcatagatgatcgttctcctgacacgtaacagtgcaaaaactttcatgccttttttttttttaagtagaaaaattgtttccaaagtgcatgtcacatgccacaaccacggtcacacctcactgtcatctgccaggacgtttgttgaacaaaactgaccttgactactcagtccagcgctcaggaatatcgtaaccagttttttcacctccatgtcatccgagcaaggtggacatcttcacgaacagcgtttttaacaagatttcagcttggtagagctgacaaagcagataaaatctactccaaattattttcaagagagtgtgactcatcaggcagcccaaaagtttattggacttggggtttctattcctttttatttgtttgcaatattttcagaagaaaggcattgcacagagtgaacttaatggacgaagcaacaaatatgtcaagaacaggacatagcacgaatctgttaccagtaggaggaggatgagccacagaaattgcataattttctaatttcaagtcttcctgatacatgactgaatagtgtggttcagtgagctgcactgacctctacattttgtatgatatgtaaaacagattttttgtagagcttacttttattattaaatgtattgaggtattatatttaaaaaaaactatgttcagaacttcatctgccactggttatttttttctaaggagtaacttgcaagttttcagtacaaatctgtgctacactggataaaaatctaatttatgaattttacttgcaccttatagttcatagcaattaactgatttgtagtgattcattgtttgttttatataccaatgacttccatattttaaaagagaaaaacaactttatgttgcaggaaaccctttttgtaagtctttattatttactttgcattttgtttcactctttccagataagcagagttgctcttcaccagtgtttttcttcatgtgcaaagtgactatttgttctataatacttttatgtgtgttatatcaaatgtgtcttaagcttcatgcaaactcagtcatcagttcgtgttgtctgaagcaagtgggagatatataaatacccagtagctaaaatggtcagtcttttttagatgttttcctacttagtatctcctaataacgttttgctgtgtcactagatgttcatttcacaagtgcatgtctttctaataatccacacatttcatgctctaataatccacacatttcatgctcatttttattgtttttacagccagttatagtaagaaaaaggtttttccccttgtgctgctttataatttagcgtgtgtctgaaccttatccatgtttgctagatgaggtcttgtcaaatatatcactaccattgtcaccggtgaaaagaaacaggtagttaagttagggttaacattcatttcaaccacgaggttgtatatcatgactagcttttactcttggtttacagagaaaagttaaacagccaactaggcagtttttaagaatattaacaatatattaacaaacaccaatacaactaatcctatttggttttaatgatttcaccatgggattaagaactatatcaggaacatccctgagaaacggttttaagtgtagcaactactcttccttaatggacagccacataacgtgtaggaagtcctttatcacttatcctcgatccataagcatatcttgcagaggggaactacttctttaaacacatggagggaaagaagatgatgccactggcaccagagggttagtactgtgatgcatcctaaaatatttattatattggtaaaaattctggttaaataaaaaattagagatcactcttggctgatttcagcaccaggaactgtattacagttttagagattaattcctagtgtttacctgattatagcagttggcatcatggggcatttaattctgactttatccccacgtcagccttaataaagtcttctttaccttctctatgaagactttaaagcccaaataatcatttttcacattgatattcaagaattgagatagatagaagccaaagtgggtatctgacaagtggaaaatcaaacgtttaagaagaattacaactctgaaaagcatttatatgtggaacttctcaaggagcctcctggggactggaaagtaagtcatcagccaggcaaatgactcatgctgaagagagtccccatttcagtcccctgagatctagctgatgcttagatcctttgaaataaaaattatgtctttataactctgatcttttacataaagcagaagaggaatcaactagttaattgcaaggtttctactctgtttcctctgtaaagatcagatggtaatctttcaaataagaaaaaaataaagacgtatgtttgaccaagtagtttcacaagaatatttgggaacttgtttcttttaattttatttgtccctgagtgaagtctagaaagaaaggtaaagagtctagagtttattcctctttccaaaacattctcattcctctcctccctacacttagtatttcccccacagagtgcctagaatcttaataatgaataaaataaaaagcagcaatatgtcattaacaaatccagacctgaaagggtaaagggtttataactgcactaataaagagaggctctttttttttcttccagtttgttggtttttaatggtaccgtgttgtaaagatacccactaatggacaatcaaattgcagaaaaggctcaatatccaagagacagggactaatgcactgtacaatctgcttatccttgcccttctctcttgccaaagtgtgcttcagaaatatatactgctttaaaaaagaataaaagaatatccttttacaagtggctttacatttcctaaaatgccataagaaaatgcaatatctgggtactgtatggggaaaaaaatgtccaagtttgtgtaaaaccagtgcatttcagcttgcaagttactgaacacaataatgctgttttaattttgttttatatcagttaaaattcacaataatgtagatagaacaaattacagacaaggaaagaaaaaacttgaatgaaatggattttacagaaagctttatgataatttttgaatgcattatttattttttgtgccatgcattttttttctcaccaaatgaccttacctgtaatacagtcttgtttgtctgtttacaaccatgtatttattgcaatgtacatactgtaatgttaattgtaaattatctgttcttattaaaacatcatcccatgatgggatggtgttgatatatttggaaactcttggtgagagaatgaatggtgtgtatacatactctgtacatttttcttttctcctgtaatatagtcttgtcaccttagagcttgtttatggaagattcaagaaaactataaaatacttaaagatatataaatttaaaaaaacatagctgcaggtctttggtcccagggctgtgccttaactttaaccaatattttcttctgttttgctgcatttgaaaggtaacagtggagctagggctgggcattttacatccaggcttttaattgattagaattctgccaataggtggattttacaaaaccacagacaacctctgaaagattctgagacccttttgagacagaagctcttaagtacttcttgccagggagcagcactgcatgtgtgatggttgtttgccatctgttgatcaggaactacttcagctacttgcatttgattatttcctttttttttttttttaactcggaaacacaactggggaaatatattctttcccagtgattataaacaatctttttcttttttttaagtccttttggcttctagagctcataggaaaatggacttgatttgaaattggagccagagtttactcgtgttggttatctattcatcagcttcctgacatgttaagagaatacattaaagagaaaatactgttttttaatcctaaaatttttcttccactaagataaaccaaatgtccttacatatatgtaaacccatctatttaaacgcaaaggtgggttgatgtcagtttacatagcagaaagcattcactatcctctaagatttgtttctgcaaaactttcattgctttagaattttaaaatttcaccttgtacaatggccagcccctaaagcaggaaacatttataatggattatatggaaacatcctcccagtacttgcccagcccttgaatcatgtggcttttcagtgaaaggaaagattctttttctaggaaaaatgagcctattttattttattttattttattttttgacacaaactgtagattttagcagccctggcccaaaggaatttgattacttttgttttaaacagtacaaaggggacactataattacaaaaacatccttaactgatttgagttgtttttatttctttggatatattttcagagtggtaaattgtgtgtgagaattacaaatgattattcttttagtggtttcttagcctctcttacagcccacggggatagtactgtacatcaataccttcatatgaaatttttatatgcaatgaaaataaaagcatgggttgattctgcct

SEQ ID NO: 5153 - protein, 507 aa, Homo sapiens; identical to SEQ ID NO: 5139

SEQ ID NO: 5154 - DNA, 7170 bp, Homo sapiens
tgcggcgcattagttccaatagtttaacaggctgctttgtagcacggacaaagccgtgcgagcgcggtgctttccctccttgttcatttgctatgcgagcttgtcagtgatctttggcaggggcttgggagaggaggggtgacgtttaatacgcttccgcggaggagtgcgctcgcctcctctgcacccagccccaggctctacagagagactgaggcaggcgactgaatgcactaacagcagcaggctcagacctgcttccctggacatttccgggaccgtgagcgagggaaccacgttgccctggattcttgccagctgtacaaagttgaccaggaaaatggctcagcagacaagcccggacactttaacagtacctgaagtggataatccgcattgtccaaacccgtggctgaacgaagaccttgtgaaatccttgcgagaaaacctgttgcagcatgagaagtccaagacagcgaggaaatcggtttctcccaagctctctccagtgatctctccgagaaattcccccaggcttctgcgcagaatgcttctcagcagcaacatccccaaacagcggcgtttcacggtggcacatacatgttttgatgtggacaatggcacatctgcgggacggagtcccttggatcccatgaccagcccaggatccgggctaattctccaagcaaattttgtccacagtcaacgacgggagtccttcctgtatcgatccgacagcgattatgacctctctccaaagtctatgtcccggaactcctccattgccagtgatatacacggagatgacttgattgtgactccatttgctcaggtcttggccagtctgcgaactgtacgaaacaactttgctgcattaactaatttgcaagatcgagcacctagcaaaagatcacccatgtgcaaccaaccatccatcaacaaagccaccataacagaggaggcctaccagaaactggccagcgagaccctggaggagctggactggtgtctggaccagctagagaccctacagaccaggcactccgtcagtgagatggcctccaacaagtttaaaaggatgcttaatcgggagctcacccatctctctgaaatgagtcggtctggaaatcaagtgtcagagtttatatcaaacacattcttagataagcaacatgaagtggaaattccttctccaactcagaaggaaaaggagaaaaagaaaagaccaatgtctcagatcagtggagtcaagaaattgatgcacagctctagtctgactaattcaagtatcccaaggtttggagttaaaactgaacaagaagatgtccttgccaaggaactagaagatgtgaacaaatggggtcttcatgttttcagaatagcagagttgtctggtaaccggcccttgactgttatcatgcacaccatttttcaggaacgggatttattaaaaacatttaaaattccagtagatactttaattacatatcttatgactctcgaagaccattaccatgctgatgtggcctatcacaacaatatccatgctgcagatgttgtccagtctactcatgtgctattatctacacctgctttggaggctgtgtttacagatttggagattcttgcagcaatttttgccagtgcaatacatgatgtagatcatcctggtgtgtccaatcaatttctgatcaatacaaactctgaacttgccttgatgtacaatgattcctcagtcttagagaaccatcatttggctgtgggctttaaattgcttcaggaagaaaactgtgacattttccagaatttgaccaaaaaacaaagacaatctttaaggaaaatggtcattgacatcgtacttgcaacagatatgtcaaaacacatgaatctactggctgatttgaagactatggttgaaactaagaaagtgacaagctctggagttcttcttcttgataattattccgataggattcaggttcttcagaatatggtgcactgtgcagatctgagcaacccaacaaagcctctccagctgtaccgccagtggacggaccggataatggaggagttcttccgccaaggagaccgagagagggaacgtggcatggagataagccccatgtgtgacaagcacaatgcttccgtggaaaaatcacaggtgggcttcatagactatattgttcatcccctctgggagacatgggcagacctcgtccaccctgacgcccaggatattttggacactttggaggacaatcgtgaatggtaccagagcacaatccctcagagcccctctcctgcacctgatgacccagaggagggccggcagggtcaaactgagaaattccagtttgaactaactttagaggaagatggtgagtcagacacggaaaaggacagtggcagtcaagtggaagaagacactagctgcagtgactccaagactctttgtactcaagactcagagtctactgaaattccccttgatgaacaggttgaagaggaggcagtaggggaagaagaggaaagccagcctgaagcctgtgtcatagatgatcgttctcctgacacgtaacagtgcaaaaactttcatgccttttttttttttaagtagaaaaattgtttccaaagtgcatgtcacatgccacaaccacggtcacacctcactgtcatctgccaggacgtttgttgaacaaaactgaccttgactactcagtccagcgctcaggaatatcgtaaccagttttttcacctccatgtcatccgagcaaggtggacatcttcacgaacagcgtttttaacaagatttcagcttggtagagctgacaaagcagataaaatctactccaaattattttcaagagagtgtgactcatcaggcagcccaaaagtttattggacttggggtttctattcctttttatttgtttgcaatattttcagaagaaaggcattgcacagagtgaacttaatggacgaagcaacaaatatgtcaagaacaggacatagcacgaatctgttaccagtaggaggaggatgagccacagaaattgcataattttctaatttcaagtcttcctgatacatgactgaatagtgtggttcagtgagctgcactgacctctacattttgtatgatatgtaaaacagattttttgtagagcttacttttattattaaatgtattgaggtattatatttaaaaaaaactatgttcagaacttcatctgccactggttatttttttctaaggagtaacttgcaagttttcagtacaaatctgtgctacactggataaaaatctaatttatgaattttacttgcaccttatagttcatagcaattaactgatttgtagtgattcattgtttgttttatataccaatgacttccatattttaaaagagaaaaacaactttatgttgcaggaaaccctttttgtaagtctttattatttactttgcattttgtttcactctttccagataagcagagttgctcttcaccagtgtttttcttcatgtgcaaagtgactatttgttctataatacttttatgtgtgttatatcaaatgtgtcttaagcttcatgcaaactcagtcatcagttcgtgttgtctgaagcaagtgggagatatataaatacccagtagctaaaatggtcagtcttttttagatgttttcctacttagtatctcctaataacgttttgctgtgtcactagatgttcatttcacaagtgcatgtctttctaataatccacacatttcatgctctaataatccacacatttcatgctcatttttattgtttttacagccagttatagtaagaaaaaggtttttccccttgtgctgctttataatttagcgtgtgtctgaaccttatccatgtttgctagatgaggtcttgtcaaatatatcactaccattgtcaccggtgaaaagaaacaggtagttaagttagggttaacattcatttcaaccacgaggttgtatatcatgactagcttttactcttggtttacagagaaaagttaaacagccaactaggcagtttttaagaatattaacaatatattaacaaacaccaatacaactaatcctatttggttttaatgatttcaccatgggattaagaactatatcaggaacatccctgagaaacggttttaagtgtagcaactactcttccttaatggacagccacataacgtgtaggaagtcctttatcacttatcctcgatccataagcatatcttgcagaggggaactacttctttaaacacatggagggaaagaagatgatgccactggcaccagagggttagtactgtgatgcatcctaaaatatttattatattggtaaaaattctggttaaataaaaaattagagatcactcttggctgatttcagcaccaggaactgtattacagttttagagattaattcctagtgtttacctgattatagcagttggcatcatggggcatttaattctgactttatccccacgtcagccttaataaagtcttctttaccttctctatgaagactttaaagcccaaataatcatttttcacattgatattcaagaattgagatagatagaagccaaagtgggtatctgacaagtggaaaatcaaacgtttaagaagaattacaactctgaaaagcatttatatgtggaacttctcaaggagcctcctggggactggaaagtaagtcatcagccaggcaaatgactcatgctgaagagagtccccatttcagtcccctgagatctagctgatgcttagatcctttgaaataaaaattatgtctttataactctgatcttttacataaagcagaagaggaatcaactagttaattgcaaggtttctactctgtttcctctgtaaagatcagatggtaatctttcaaataagaaaaaaataaagacgtatgtttgaccaagtagtttcacaagaatatttgggaacttgtttcttttaattttatttgtccctgagtgaagtctagaaagaaaggtaaagagtctagagtttattcctctttccaaaacattctcattcctctcctccctacacttagtatttcccccacagagtgcctagaatcttaataatgaataaaataaaaagcagcaatatgtcattaacaaatccagacctgaaagggtaaagggtttataactgcactaataaagagaggctctttttttttcttccagtttgttggtttttaatggtaccgtgttgtaaagatacccactaatggacaatcaaattgcagaaaaggctcaatatccaagagacagggactaatgcactgtacaatctgcttatccttgcccttctctcttgccaaagtgtgcttcagaaatatatactgctttaaaaaagaataaaagaatatccttttacaagtggctttacatttcctaaaatgccataagaaaatgcaatatctgggtactgtatggggaaaaaaatgtccaagtttgtgtaaaaccagtgcatttcagcttgcaagttactgaacacaataatgctgttttaattttgttttatatcagttaaaattcacaataatgtagatagaacaaattacagacaaggaaagaaaaaacttgaatgaaatggattttacagaaagctttatgataatttttgaatgcattatttattttttgtgccatgcattttttttctcaccaaatgaccttacctgtaatacagtcttgtttgtctgtttacaaccatgtatttattgcaatgtacatactgtaatgttaattgtaaattatctgttcttattaaaacatcatcccatgatgggatggtgttgatatatttggaaactcttggtgagagaatgaatggtgtgtatacatactctgtacatttttcttttctcctgtaatatagtcttgtcaccttagagcttgtttatggaagattcaagaaaactataaaatacttaaagatatataaatttaaaaaaacatagctgcaggtctttggtcccagggctgtgccttaactttaaccaatattttcttctgttttgctgcatttgaaaggtaacagtggagctagggctgggcattttacatccaggcttttaattgattagaattctgccaataggtggattttacaaaaccacagacaacctctgaaagattctgagacccttttgagacagaagctcttaagtacttcttgccagggagcagcactgcatgtgtgatggttgtttgccatctgttgatcaggaactacttcagctacttgcatttgattatttcctttttttttttttttaactcggaaacacaactggggaaatatattctttcccagtgattataaacaatctttttcttttttttaagtccttttggcttctagagctcataggaaaatggacttgatttgaaattggagccagagtttactcgtgttggttatctattcatcagcttcctgacatgttaagagaatacattaaagagaaaatactgttttttaatcctaaaatttttcttccactaagataaaccaaatgtccttacatatatgtaaacccatctatttaaacgcaaaggtgggttgatgtcagtttacatagcagaaagcattcactatcctctaagatttgtttctgcaaaactttcattgctttagaattttaaaatttcaccttgtacaatggccagcccctaaagcaggaaacatttataatggattatatggaaacatcctcccagtacttgcccagcccttgaatcatgtggcttttcagtgaaaggaaagattctttttctaggaaaaatgagcctattttattttattttattttattttttgacacaaactgtagattttagcagccctggcccaaaggaatttgattacttttgttttaaacagtacaaaggggacactataattacaaaaacatccttaactgatttgagttgtttttatttctttggatatattttcagagtggtaaattgtgtgtgagaattacaaatgattattcttttagtggtttcttagcctctcttacagcccacggggatagtactgtacatcaataccttcatatgaaatttttatatgcaatgaaaataaaagcatgggttgattctgcct

SEQ ID NO: 5155 - protein, 745 aa, Homo sapiens; identical to SEQ ID NO: 5145

SEQ ID NO: 5156 - DNA, 7194 bp, Homo sapiens
cccctctcggtagccctgaggctctggcgccttcaagtgagaagctaagcaccagcctctgctgggctgcagaagcggcggcggcggcagcagcagcagcagcatcaggaaggcgctcgggccagcgcggtgaacccgggctgggcagcaggtcgcggagccgcgagccaggatggaggcagagggcagcagcgcgccggcccgggcgggcagcggagagggcagcgacagcgccggcggggccacgctcaaagcccccaagcatctctggaggcacgagcagcaccaccagtacccgctccggcagccccagttccgcctcctgcatccccatcaccacctgcccccgccgccgccaccctcgccccagccccagccccagtgtccgctacagccgccgccgccgccccccctgccgccgcccccgccgccgcccggggctgcccgcggccgctacgcctcgagcggggccaccggccgcgtccggcatcgcggctactcggacaccgagcgctacctgtactgtcgcgccatggaccgcacctcctacgcggtggagaccggccaccggcccggcctgaagaaatccaggatgtcctggccctcctcgttccagggactcaggcgttttgatgtggacaatggcacatctgcgggacggagtcccttggatcccatgaccagcccaggatccgggctaattctccaagcaaattttgtccacagtcaacgacgggagtccttcctgtatcgatccgacagcgattatgacctctctccaaagtctatgtcccggaactcctccattgccagtgatatacacggagatgacttgattgtgactccatttgctcaggtcttggccagtctgcgaactgtacgaaacaactttgctgcattaactaatttgcaagatcgagcacctagcaaaagatcacccatgtgcaaccaaccatccatcaacaaagccaccataacagaggaggcctaccagaaactggccagcgagaccctggaggagctggactggtgtctggaccagctagagaccctacagaccaggcactccgtcagtgagatggcctccaacaagtttaaaaggatgcttaatcgggagctcacccatctctctgaaatgagtcggtctggaaatcaagtgtcagagtttatatcaaacacattcttagataagcaacatgaagtggaaattccttctccaactcagaaggaaaaggagaaaaagaaaagaccaatgtctcagatcagtggagtcaagaaattgatgcacagctctagtctgactaattcaagtatcccaaggtttggagttaaaactgaacaagaagatgtccttgccaaggaactagaagatgtgaacaaatggggtcttcatgttttcagaatagcagagttgtctggtaaccggcccttgactgttatcatgcacaccatttttcaggaacgggatttattaaaaacatttaaaattccagtagatactttaattacatatcttatgactctcgaagaccattaccatgctgatgtggcctatcacaacaatatccatgctgcagatgttgtccagtctactcatgtgctattatctacacctgctttggaggctgtgtttacagatttggagattcttgcagcaatttttgccagtgcaatacatgatgtagatcatcctggtgtgtccaatcaatttctgatcaatacaaactctgaacttgccttgatgtacaatgattcctcagtcttagagaaccatcatttggctgtgggctttaaattgcttcaggaagaaaactgtgacattttccagaatttgaccaaaaaacaaagacaatctttaaggaaaatggtcattgacatcgtacttgcaacagatatgtcaaaacacatgaatctactggctgatttgaagactatggttgaaactaagaaagtgacaagctctggagttcttcttcttgataattattccgataggattcaggttcttcagaatatggtgcactgtgcagatctgagcaacccaacaaagcctctccagctgtaccgccagtggacggaccggataatggaggagttcttccgccaaggagaccgagagagggaacgtggcatggagataagccccatgtgtgacaagcacaatgcttccgtggaaaaatcacaggtgggcttcatagactatattgttcatcccctctgggagacatgggcagacctcgtccaccctgacgcccaggatattttggacactttggaggacaatcgtgaatggtaccagagcacaatccctcagagcccctctcctgcacctgatgacccagaggagggccggcagggtcaaactgagaaattccagtttgaactaactttagaggaagatggtgagtcagacacggaaaaggacagtggcagtcaagtggaagaagacactagctgcagtgactccaagactctttgtactcaagactcagagtctactgaaattccccttgatgaacaggttgaagaggaggcagtaggggaagaagaggaaagccagcctgaagcctgtgtcatagatgatcgttctcctgacacgtaacagtgcaaaaactttcatgccttttttttttttaagtagaaaaattgtttccaaagtgcatgtcacatgccacaaccacggtcacacctcactgtcatctgccaggacgtttgttgaacaaaactgaccttgactactcagtccagcgctcaggaatatcgtaaccagttttttcacctccatgtcatccgagcaaggtggacatcttcacgaacagcgtttttaacaagatttcagcttggtagagctgacaaagcagataaaatctactccaaattattttcaagagagtgtgactcatcaggcagcccaaaagtttattggacttggggtttctattcctttttatttgtttgcaatattttcagaagaaaggcattgcacagagtgaacttaatggacgaagcaacaaatatgtcaagaacaggacatagcacgaatctgttaccagtaggaggaggatgagccacagaaattgcataattttctaatttcaagtcttcctgatacatgactgaatagtgtggttcagtgagctgcactgacctctacattttgtatgatatgtaaaacagattttttgtagagcttacttttattattaaatgtattgaggtattatatttaaaaaaaactatgttcagaacttcatctgccactggttatttttttctaaggagtaacttgcaagttttcagtacaaatctgtgctacactggataaaaatctaatttatgaattttacttgcaccttatagttcatagcaattaactgatttgtagtgattcattgtttgttttatataccaatgacttccatattttaaaagagaaaaacaactttatgttgcaggaaaccctttttgtaagtctttattatttactttgcattttgtttcactctttccagataagcagagttgctcttcaccagtgtttttcttcatgtgcaaagtgactatttgttctataatacttttatgtgtgttatatcaaatgtgtcttaagcttcatgcaaactcagtcatcagttcgtgttgtctgaagcaagtgggagatatataaatacccagtagctaaaatggtcagtcttttttagatgttttcctacttagtatctcctaataacgttttgctgtgtcactagatgttcatttcacaagtgcatgtctttctaataatccacacatttcatgctctaataatccacacatttcatgctcatttttattgtttttacagccagttatagtaagaaaaaggtttttccccttgtgctgctttataatttagcgtgtgtctgaaccttatccatgtttgctagatgaggtcttgtcaaatatatcactaccattgtcaccggtgaaaagaaacaggtagttaagttagggttaacattcatttcaaccacgaggttgtatatcatgactagcttttactcttggtttacagagaaaagttaaacagccaactaggcagtttttaagaatattaacaatatattaacaaacaccaatacaactaatcctatttggttttaatgatttcaccatgggattaagaactatatcaggaacatccctgagaaacggttttaagtgtagcaactactcttccttaatggacagccacataacgtgtaggaagtcctttatcacttatcctcgatccataagcatatcttgcagaggggaactacttctttaaacacatggagggaaagaagatgatgccactggcaccagagggttagtactgtgatgcatcctaaaatatttattatattggtaaaaattctggttaaataaaaaattagagatcactcttggctgatttcagcaccaggaactgtattacagttttagagattaattcctagtgtttacctgattatagcagttggcatcatggggcatttaattctgactttatccccacgtcagccttaataaagtcttctttaccttctctatgaagactttaaagcccaaataatcatttttcacattgatattcaagaattgagatagatagaagccaaagtgggtatctgacaagtggaaaatcaaacgtttaagaagaattacaactctgaaaagcatttatatgtggaacttctcaaggagcctcctggggactggaaagtaagtcatcagccaggcaaatgactcatgctgaagagagtccccatttcagtcccctgagatctagctgatgcttagatcctttgaaataaaaattatgtctttataactctgatcttttacataaagcagaagaggaatcaactagttaattgcaaggtttctactctgtttcctctgtaaagatcagatggtaatctttcaaataagaaaaaaataaagacgtatgtttgaccaagtagtttcacaagaatatttgggaacttgtttcttttaattttatttgtccctgagtgaagtctagaaagaaaggtaaagagtctagagtttattcctctttccaaaacattctcattcctctcctccctacacttagtatttcccccacagagtgcctagaatcttaataatgaataaaataaaaagcagcaatatgtcattaacaaatccagacctgaaagggtaaagggtttataactgcactaataaagagaggctctttttttttcttccagtttgttggtttttaatggtaccgtgttgtaaagatacccactaatggacaatcaaattgcagaaaaggctcaatatccaagagacagggactaatgcactgtacaatctgcttatccttgcccttctctcttgccaaagtgtgcttcagaaatatatactgctttaaaaaagaataaaagaatatccttttacaagtggctttacatttcctaaaatgccataagaaaatgcaatatctgggtactgtatggggaaaaaaatgtccaagtttgtgtaaaaccagtgcatttcagcttgcaagttactgaacacaataatgctgttttaattttgttttatatcagttaaaattcacaataatgtagatagaacaaattacagacaaggaaagaaaaaacttgaatgaaatggattttacagaaagctttatgataatttttgaatgcattatttattttttgtgccatgcattttttttctcaccaaatgaccttacctgtaatacagtcttgtttgtctgtttacaaccatgtatttattgcaatgtacatactgtaatgttaattgtaaattatctgttcttattaaaacatcatcccatgatgggatggtgttgatatatttggaaactcttggtgagagaatgaatggtgtgtatacatactctgtacatttttcttttctcctgtaatatagtcttgtcaccttagagcttgtttatggaagattcaagaaaactataaaatacttaaagatatataaatttaaaaaaacatagctgcaggtctttggtcccagggctgtgccttaactttaaccaatattttcttctgttttgctgcatttgaaaggtaacagtggagctagggctgggcattttacatccaggcttttaattgattagaattctgccaataggtggattttacaaaaccacagacaacctctgaaagattctgagacccttttgagacagaagctcttaagtacttcttgccagggagcagcactgcatgtgtgatggttgtttgccatctgttgatcaggaactacttcagctacttgcatttgattatttcctttttttttttttttaactcggaaacacaactggggaaatatattctttcccagtgattataaacaatctttttcttttttttaagtccttttggcttctagagctcataggaaaatggacttgatttgaaattggagccagagtttactcgtgttggttatctattcatcagcttcctgacatgttaagagaatacattaaagagaaaatactgttttttaatcctaaaatttttcttccactaagataaaccaaatgtccttacatatatgtaaacccatctatttaaacgcaaaggtgggttgatgtcagtttacatagcagaaagcattcactatcctctaagatttgtttctgcaaaactttcattgctttagaattttaaaatttcaccttgtacaatggccagcccctaaagcaggaaacatttataatggattatatggaaacatcctcccagtacttgcccagcccttgaatcatgtggcttttcagtgaaaggaaagattctttttctaggaaaaatgagcctattttattttattttattttattttttgacacaaactgtagattttagcagccctggcccaaaggaatttgattacttttgttttaaacagtacaaaggggacactataattacaaaaacatccttaactgatttgagttgtttttatttctttggatatattttcagagtggtaaattgtgtgtgagaattacaaatgattattcttttagtggtttcttagcctctcttacagcccacggggatagtactgtacatcaataccttcatatgaaatttttatatgcaatgaaaataaaagcatgggttgattctgcct

SEQ ID NO: 5157 - protein, 809 aa, Homo sapiens; identical to SEQ ID NO: 5147

SEQ ID NO: 5158 - DNA, 2331 bp, Homo sapiens
gacagaagatctgcgaacatgatgcacgtgaataattttccctttagaaggcattcctggatatgaggaggcctaccagaaactggccagcgagaccctggaggagctggactggtgtctggaccagctagagaccctacagaccaggcactccgtcagtgagatggcctccaacaagtttaaaaggatgcttaatcgggagctcacccatctctctgaaatgagtcggtctggaaatcaagtgtcagagtttatatcaaacacattcttagataagcaacatgaagtggaaattccttctccaactcagaaggaaaaggagaaaaagaaaagaccaatgtctcagatcagtggagtcaagaaattgatgcacagctctagtctgactaattcaagtatcccaaggtttggagttaaaactgaacaagaagatgtccttgccaaggaactagaagatgtgaacaaatggggtcttcatgttttcagaatagcagagttgtctggtaaccggcccttgactgttatcatgcacaccatttttcaggaacgggatttattaaaaacatttaaaattccagtagatactttaattacatatcttatgactctcgaagaccattaccatgctgatgtggcctatcacaacaatatccatgctgcagatgttgtccagtctactcatgtgctattatctacacctgctttggaggctgtgtttacagatttggagattcttgcagcaatttttgccagtgcaatacatgatgtagatcatcctggtgtgtccaatcaatttctgatcaatacaaactctgaacttgccttgatgtacaatgattcctcagtcttagagaaccatcatttggctgtgggctttaaattgcttcaggaagaaaactgtgacattttccagaatttgaccaaaaaacaaagacaatctttaaggaaaatggtcattgacatcgtacttgcaacagatatgtcaaaacacatgaatctactggctgatttgaagactatggttgaaactaagaaagtgacaagctctggagttcttcttcttgataattattccgataggattcaggttcttcagaatatggtgcactgtgcagatctgagcaacccaacaaagcctctccagctgtaccgccagtggacggaccggataatggaggagttcttccgccaaggagaccgagagagggaacgtggcatggagataagccccatgtgtgacaagcacaatgcttccgtggaaaaatcacaggtgggcttcatagactatattgttcatcccctctgggagacatgggcagacctcgtccaccctgacgcccaggatattttggacactttggaggacaatcgtgaatggtaccagagcacaatccctcagagcccctctcctgcacctgatgacccagaggagggccggcagggtcaaactgagaaattccagtttgaactaactttagaggaagatggtgagtcagacacggaaaaggacagtggcagtcaagtggaagaagacactagctgcagtgactccaagactctttgtactcaagactcagagtctactgaaattccccttgatgaacaggttgaagaggaggcagtaggggaagaagaggaaagccagcctgaagcctgtgtcatagatgatcgttctcctgacacgtaacagtgcaaaaactttcatgccttttttttttttaagtagaaaaattgtttccaaagtgcatgtcacatgccacaaccacggtcacacctcactgtcatctgccaggacgtttgttgaacaaaactgaccttgactactcagtccagcgctcaggaatatcgtaaccagttttttcacctccatgtcatccgagcaaggtggacatcttcacgaacagcgtttttaacaagatttcagcttggtagagctgacaaagcagataaaatctactccaaattattttcaagagagtgtgactcatcaggcagcccaaaagtttattggacttggggtttctattcctttttatttgtttgcaatattttcagaagaaaggcattgcacagagtgaacttaatggacgaagcaacaaatatgtcaagaacaggacatagcacgaatctgttaccagtaggaggaggatgagccacagaaattgcataattttctaatttcaagtcttcctgatacatgactgaatagtgtggttcagtgagctgcactgacctctacattttgtatgatatgtaaaacagattttttgtagagcttacttttattattaaatgtattgaggtattatatttaaaaaaaactatgttcag

SEQ ID NO: 5159 - protein, 507 aa, Homo sapiens; identical to SEQ ID NO: 5139

SEQ ID NO: 5160 - DNA, 2740 bp, Homo sapiens
ggaattcatctgtaaaaatcactacatgtaacgtaggagacaagaaaaatattaatgacagaagatctgcgaacatgatgcacgtgaataattttccctttagaaggcattcctggatatgttttgatgtggacaatggcacatctgcgggacggagtcccttggatcccatgaccagcccaggatccgggctaattctccaagcaaattttgtccacagtcaacgacgggagtccttcctgtatcgatccgacagcgattatgacctctctccaaagtctatgtcccggaactcctccattgccagtgatatacacggagatgacttgattgtgactccatttgctcaggtcttggccagtctgcgaactgtacgaaacaactttgctgcattaactaatttgcaagatcgagcacctagcaaaagatcacccatgtgcaaccaaccatccatcaacaaagccaccataacagaggaggcctaccagaaactggccagcgagaccctggaggagctggactggtgtctggaccagctagagaccctacagaccaggcactccgtcagtgagatggcctccaacaagtttaaaaggatgcttaatcgggagctcacccatctctctgaaatgagtcggtctggaaatcaagtgtcagagtttatatcaaacacattcttagataagcaacatgaagtggaaattccttctccaactcagaaggaaaaggagaaaaagaaaagaccaatgtctcagatcagtggagtcaagaaattgatgcacagctctagtctgactaattcaagtatcccaaggtttggagttaaaactgaacaagaagatgtccttgccaaggaactagaagatgtgaacaaatggggtcttcatgttttcagaatagcagagttgtctggtaaccggcccttgactgttatcatgcacaccatttttcaggaacgggatttattaaaaacatttaaaattccagtagatactttaattacatatcttatgactctcgaagaccattaccatgctgatgtggcctatcacaacaatatccatgctgcagatgttgtccagtctactcatgtgctattatctacacctgctttggaggctgtgtttacagatttggagattcttgcagcaatttttgccagtgcaatacatgatgtagatcatcctggtgtgtccaatcaatttctgatcaatacaaactctgaacttgccttgatgtacaatgattcctcagtcttagagaaccatcatttggctgtgggctttaaattgcttcaggaagaaaactgtgacattttccagaatttgaccaaaaaacaaagacaatctttaaggaaaatggtcattgacatcgtacttgcaacagatatgtcaaaacacatgaatctactggctgatttgaagactatggttgaaactaagaaagtgacaagctctggagttcttcttcttgataattattccgataggattcaggttcttcagaatatggtgcactgtgcagatctgagcaacccaacaaagcctctccagctgtaccgccagtggacggaccggataatggaggagttcttccgccaaggagaccgagagagggaacgtggcatggagataagccccatgtgtgacaagcacaatgcttccgtggaaaaatcacaggtgggcttcatagactatattgttcatcccctctgggagacatgggcagacctcgtccaccctgacgcccaggatattttggacactttggaggacaatcgtgaatggtaccagagcacaatccctcagagcccctctcctgcacctgatgacccagaggagggccggcagggtcaaactgagaaattccagtttgaactaactttagaggaagatggtgagtcagacacggaaaaggacagtggcagtcaagtggaagaagacactagctgcagtgactccaagactctttgtactcaagactcagagtctactgaaattccccttgatgaacaggttgaagaggaggcagtaggggaagaagaggaaagccagcctgaagcctgtgtcatagatgatcgttctcctgacacgtaacagtgcaaaaactttcatgccttttttttttttaagtagaaaaattgtttccaaagtgcatgtcacatgccacaaccacggtcacacctcactgtcatctgccaggacgtttgttgaacaaaactgaccttgactactcagtccagcgctcaggaatatcgtaaccagttttttcacctccatgtcatccgagcaaggtggacatcttcacgaacagcgtttttaacaagatttcagcttggtagagctgacaaagcagataaaatctactccaaattattttcaagagagtgtgactcatcaggcagcccaaaagtttattggacttggggtttctattcctttttatttgtttgcaatattttcagaagaaaggcattgcacagagtgaacttaatggacgaagcaacaaatatgtcaagaacaggacatagcacgaatctgttaccagtaggaggaggatgagccacagaaattgcataattttctaatttcaagtcttcctgatacatgactgaatagtgtggttcagtgagctgcactgacctctacattttgtatgatatgtaaaacagattttttgtagagcttacttttattattaaatgtattgaggtattatatttaaaaaaaactatgttcag

SEQ ID NO: 5161 - protein, 673 aa, Homo sapiens; identical to SEQ ID NO: 650

SEQ ID NO: 5162 - DNA, 3266 bp, Homo sapiens
tgcggcgcattagttccaatagtttaacaggctgctttgtagcacggacaaagccgtgcgagcgcggtgctttccctccttgttcatttgctatgcgagcttgtcagtgatctttggcaggggcttgggagaggaggggtgacgtttaatacgcttccgcggaggagtgcgctcgcctcctctgcacccagccccaggctctacagagagactgaggcaggcgactgaatgcactaacagcagcaggctcagacctgcttccctggacatttccgggaccgtgagcgagggaaccacgttgccctggattcttgccagctgtacaaagttgaccaggaaaatggctcagcagacaagcccggacactttaacagtacctgaagtggataatccgcattgtccaaacccgtggctgaacgaagaccttgtgaaatccttgcgagaaaacctgttgcagcatgagaagtccaagacagcgaggaaatcggtttctcccaagctctctccagtgatctctccgagaaattcccccaggcttctgcgcagaatgcttctcagcagcaacatccccaaacagcggcgtttcacggtggcacatacatgttttgatgtggacaatggcacatctgcgggacggagtcccttggatcccatgaccagcccaggatccgggctaattctccaagcaaattttgtccacagtcaacgacgggagtccttcctgtatcgatccgacagcgattatgacctctctccaaagtctatgtcccggaactcctccattgccagtgatatacacggagatgacttgattgtgactccatttgctcaggtcttggccagtctgcgaactgtacgaaacaactttgctgcattaactaatttgcaagatcgagcacctagcaaaagatcacccatgtgcaaccaaccatccatcaacaaagccaccataacagggctctataatgggatcattgcatttctctgattactaatgagaaggaggcctaccagaaactggccagcgagaccctggaggagctggactggtgtctggaccagctagagaccctacagaccaggcactccgtcagtgagatggcctccaacaagtttaaaaggatgcttaatcgggagctcacccatctctctgaaatgagtcggtctggaaatcaagtgtcagagtttatatcaaacacattcttagataagcaacatgaagtggaaattccttctccaactcagaaggaaaaggagaaaaagaaaagaccaatgtctcagatcagtggagtcaagaaattgatgcacagctctagtctgactaattcaagtatcccaaggtttggagttaaaactgaacaagaagatgtccttgccaaggaactagaagatgtgaacaaatggggtcttcatgttttcagaatagcagagttgtctggtaaccggcccttgactgttatcatgcacaccatttttcaggaacgggatttattaaaaacatttaaaattccagtagatactttaattacatatcttatgactctcgaagaccattaccatgctgatgtggcctatcacaacaatatccatgctgcagatgttgtccagtctactcatgtgctattatctacacctgctttggaggctgtgtttacagatttggagattcttgcagcaatttttgccagtgcaatacatgatgtagatcatcctggtgtgtccaatcaatttctgatcaatacaaactctgaacttgccttgatgtacaatgattcctcagtcttagagaaccatcatttggctgtgggctttaaattgcttcaggaagaaaactgtgacattttccagaatttgaccaaaaaacaaagacaatctttaaggaaaatggtcattgacatcgtacttgcaacagatatgtcaaaacacatgaatctactggctgatttgaagactatggttgaaactaagaaagtgacaagctctggagttcttcttcttgataattattccgataggattcaggttcttcagaatatggtgcactgtgcagatctgagcaacccaacaaagcctctccagctgtaccgccagtggacggaccggataatggaggagttcttccgccaaggagaccgagagagggaacgtggcatggagataagccccatgtgtgacaagcacaatgcttccgtggaaaaatcacaggtgggcttcatagactatattgttcatcccctctgggagacatgggcagacctcgtccaccctgacgcccaggatattttggacactttggaggacaatcgtgaatggtaccagagcacaatccctcagagcccctctcctgcacctgatgacccagaggagggccggcagggtcaaactgagaaattccagtttgaactaactttagaggaagatggtgagtcagacacggaaaaggacagtggcagtcaagtggaagaagacactagctgcagtgactccaagactctttgtactcaagactcagagtctactgaaattccccttgatgaacaggttgaagaggaggcagtaggggaagaagaggaaagccagcctgaagcctgtgtcatagatgatcgttctcctgacacgtaacagtgcaaaaactttcatgccttttttttttttaagtagaaaaattgtttccaaagtgcatgtcacatgccacaaccacggtcacacctcactgtcatctgccaggacgtttgttgaacaaaactgaccttgactactcagtccagcgctcaggaatatcgtaaccagttttttcacctccatgtcatccgagcaaggtggacatcttcacgaacagcgtttttaacaagatttcagcttggtagagctgacaaagcagataaaatctactccaaattattttcaagagagtgtgactcatcaggcagcccaaaagtttattggacttggggtttctattcctttttatttgtttgcaatattttcagaagaaaggcattgcacagagtgaacttaatggacgaagcaacaaatatgtcaagaacaggacatagcacgaatctgttaccagtaggaggaggatgagccacagaaattgcataattttctaatttcaagtcttcctgatacatgactgaatagtgtggttcagtgagctgcactgacctctacattttgtatgatatgtaaaacagattttttgtagagcttacttttattattaaatgtattgaggtattatatttaaaaaaaactatgttcag

SEQ ID NO: 5163 - protein, 507 aa, Homo sapiens; identical to SEQ ID NO: 5139

SEQ ID NO: 5164 - DNA, 574 bp, Homo sapiens
cggccgctacgcctcgagcggggccaccggccgcgtccggcatcgcggctactcggacaccgagcgctacctgtactgtcgcgccatggaccgcacctcctacgcggtggagaccggccaccggcccggcctgaagaaatccaggatgtcctggccctcctcgttccagggactcaggcgttttgatgtggacaatggcacatctgcgggacggagtcccttggatcccatgaccagcccaggatccgggctaattctccaagcaaattttgtccacagtcaacgacgggagtccttcctgtatcgatccgacagcgattatgacctctctccaaagtctatgtcccggaactcctccattgccagtgatatacacggagatgacttgattgtgactccatttgctcaggtcttggccagtctgcgaactgtacgaaacaactttgctgcattaactaatttgcaagatcgagcacctagcaaaagatcacccatgtgcaaccaaccatccatcaacaaagccaccataacagtttaaaaggatgcttaatcgggagctcacccatctctctga

SEQ ID NO: 5165 - protein, 150 aa, Homo sapiens
MDRTSYAVETGHRPGLKKSRMSWPSSFQGLRRFDVDNGTSAGRSPLDPMTSPGSGLILQANFVHSQRRESFLYRSDSDYDLSPKSMSRNSSIASDIHGDDLIVTPFAQVLASLRTVRNNFAALTNLQDRAPSKRSPMCNQPSINKATITV

SEQ ID NO: 5166 - DNA, 1230 bp, Homo sapiens
tgcggcgcattagttccaatagtttaacaggctgctttgtagcacggacaaagccgtgcgagcgcggtgctttccctccttgttcatttgctatgcgagcttgtcagtgatctttggcaggggcttgggagaggaggggtgacgtttaatacgcttccgcggaggagtgcgctcgcctcctctgcacccagccccaggctctacagagagactgaggcaggcgactgaatgcactaacagcagcaggctcagacctgcttccctggacatttccgggaccgtgagcgagggaaccacgttgccctggattcttgccagctgtacaaagttgaccaggaaaatggctcagcagacaagcccggacactttaacagtacctgaagtggataatccgcattgtccaaacccgtggctgaacgaagaccttgtgaaatccttgcgagaaaacctgttgcagcatgagaagtccaagacagcgaggaaatcggtttctcccaagctctctccagtgatctctccgagaaattcccccaggcttctgcgcagaatgcttctcagcagcaacatccccaaacagcggcgtttcacggtggcacatacatgttttgatgtggacaatggcacatctgcgggacggagtcccttggatcccatgaccagcccaggatccgggctaattctccaagcaaattttgtccacagtcaacgacgggagtccttcctgtatcgatccgacagcgattatgacctctctccaaagtctatgtcccggaactcctccattgccagtgatatacacggagatgacttgattgtgactccatttgctcaggtcttggccagtctgcgaactgtacgaaacaactttgctgcattaactaatttgcaagatcgagcacctagcaaaagatcacccatgtgcaaccaaccatccatcaacaaagccaccataacaggatcctggatggaattgaacccatatacgttacttgacatgtgaaacacgtgtgaccctggcagatgatttggctgaccttgaaaactacagctgtttagtcactttgaaaacaatgcaatacaagtgatttactaggcttcagttttaaccattttatgctgactggtggaaattctaacccttcagaaagaaaaaaaaattgtgaagcaatggaaatgtaccatcctgggtattaatgtcattaattttcaatacattttctcacaaaaagt

SEQ ID NO: 5167 - protein, 219 aa, Homo sapiens
MAQQTSPDTLTVPEVDNPHCPNPWLNEDLVKSLRENLLQHEKSKTARKSVSPKLSPVISPRNSPRLLRRMLLSSNIPKQRRFTVAHTCFDVDNGTSAGRSPLDPMTSPGSGLILQANFVHSQRRESFLYRSDSDYDLSPKSMSRNSSIASDIHGDDLIVTPFAQVLASLRTVRNNFAALTNLQDRAPSKRSPMCNQPSINKATITGSWMELNPYTLLDM

SEQ ID NO: 5168 - DNA, 589 bp, Homo sapiens
gagagaatgtctctcctccatctgcgaagtgctgcattttaggtttgatctgacaatttgatgcaacggctcagttttgatgtggacaatggcacatctgcgggacggagtcccttggatcccatgaccagcccaggatccgggctaattctccaagcaaattttgtccacagtcaacgacgggagtccttcctgtatcgatccgacagcgattatgacctctctccaaagtctatgtcccggaactcctccattgccagtgatatgtaagtacaagggcaggcaaagagagagaaaaccgagtaaatttatatctagagctgatgacataataaaactaatgacttttgttcaactgtatcactctcctccaatgtagaaagaatatgaataaaattatacaagctagaaatgaatggtagatttaacctgagtgcactgtcactcttgattaacacacacacacacacacacacacacacacacacacgcatgtatttattttcccagaaaatactttataggaaaactgagaattaaatttttaatggaaactaacacttaaatcattagcttatatttatgtaga

SEQ ID NO: 5169 - protein, 69 aa, Homo sapiens
MQRLSFDVDNGTSAGRSPLDPMTSPGSGLILQANFVHSQRRESFLYRSDSDYDLSPKSMSRNSSIASDM

SEQ ID NO: 5170 - DNA, 292 bp, Homo sapiens
aaagtcgcagagatagcggagaacaagaaccagatctcacagtcatggtgccaaaagactgttaccctagcatgactgcttcagcgaagagataagagcttctttgactttttccactggaatttttcatgccagaagaaattgaacatgtgagcctggtgtctggaagagtagcctggatttatggtatcagatgcacatttttaacaccttcagttttctctttaaaatatctcttcaatcccttacttttctctatttgtttcaacattaaaatatgttatttttcttc

SEQ ID NO: 5171 - protein, 53 aa, Homo sapiens
MPEEIEHVSLVSGRVAWIYGIRCTFLTPSVFSLKYLFNPLLFSICFNIKICYF

SEQ ID NO: 5172 - DNA, 323 bp, Homo sapiens
caaggctttccagatccctgaagataaaatacaaactctccaacaagaccttttggccatcaggaacgcagcacctggctctctcactactgttaccctagcatgactgcttcagcgaagagataagagcttctttgactttttccactggaatttttcatgccagaagaaattgaacatgtgagcctggtgtctggaagagtagcctggatttatggtatcagatgcacatttttaacaccttcagttttctctttaaaatatctcttcaatcccttacttttctctatttgtttcaacattaaaatatgttatttttcttc

SEQ ID NO: 5173 - protein, 53 aa, Homo sapiens; identical to SEQ ID NO: 5171

SEQ ID NO: 5174 - DNA, 535 bp, Homo sapiens
acaatgctccctcacatggggcacagagaggaaggaattttttttttaagccaattccagtccctggagctgcaaactgccctcagggcaaagaagcctgcagaataattgggaggagtctggcaggaaggaagccaagaaagcacaagcaagaatgtgtgagaagatcacagagacctaaagaaggggaagggaagaacccacatgtgagagagaagagattgtctgacttggtctcttagggctcctcatctcaagaagccagcaggcaagggaaggacaaaccatccttgcaggaataattcgtactgatcatttggaggagattcggctagtatagctgctgttacataatgaagaaaaggaagaatatgtttcaaactcagatgaaccactggggagtctcttgatactctgttgcctaatttggatggttaatgggtgttgcgccttaaagcactatccaataaacctcctacatgcaaatctccatctcagaatctgtatccaagagattctactcaagacatcatct

SEQ ID NO: 5175 - protein, 34 aa, Homo sapiens
MVNGCCALKHYPINLLHANLHLRICIQEILLKTS

SEQ ID NO: 5176 - DNA, 1018 bp, Homo sapiens
aaactgccctcagggcaaagaagcctgcagaataattgggaggagtctggcaggaaggaagccaagagctgcctcctgcccctgaggggaggagtccatcctcttctataggatacacctgttggcttgtttgtccttccttcccctttctgggaattgttctccatcaacatgtttatggggacagccatttctatacaatgtgacctgtattgatctattttgtgttgctataaataaatacctgaggctggtaatttttaaagaagagaggttaatttggcccataattctgcaggctgtacaagaagcatggcaccagcatctgcttctggtgaggccgcaggaagcttccactcatggtggaaggtggaggaggagcaggcgtgttatatggcaagagcgagagcaagagagagagcagaaggtgtcaggcaaccagctctcatgtgaactaatgagcaaggactcactcatcaccaaggggatggccccagccattcctgagagatccgccccctaacccaaacacctcccaccaagccccacctccaagactggcggtcaaattttaacatgagaccttcattatcaatgtttgtgtatctacacatccaaagtagatcatcatctttggtctttgggagatacaccagagaaaaacaactcctctggcctgggagattttgactttctgcttttcatgtgtgtttgcttttatcgaagagggaatctgctacttgcctgatgcaactgcatttggatactgaactggggcccaaagagtctcaaatcactgcctgggaatgccaatttctcatcatgaattagaaatcaattctagcagcctccctgctaagtaaaaaaattacataattctttctgcactactgcattaggctgattttttttttccttttcctgaatgtacagtaaatctctagtggtttaagccatggtgcctctgcttaaacacaatatgaaatcgctaccaaatttaaataaaaaataaattctg

SEQ ID NO: 5177 - protein, 46 aa, Homo sapiens
MAPASASGEAAGSFHSWWKVEEEQACYMARARARERAEGVRQPALM

SEQ ID NO: 5178 - DNA, 1249 bp, Homo sapiens
gcttttggccaatctccatgagagaaagttctcaacctctgattgcaagtttattttgaccatttaccataacttcaacttcaatgctcgtcttgaagggcatgacttgtcatcctaatataattagcccctcttccagcagatcagacccacaatacgccccagcctctggaggacacagagagaatggaagtcgtggagaagaaaagagaaaagtctcagaggaccaggatataccctcaggactagcactgtgcctgccgtagaacggggcctgctcagtgttttttgggttgagctgcatcttagaatgaaatcctacaactgagatggctaaaggaattaaaaatggtatctgtaatgttaaatttcagactgctgcacaatatgtcagttttaggtactttttaaaagatgaacaagtacaagacttcaaagaagtctctcccttgtgaagggtcccttccggcttcactttagagtctctgcacttttagttcatctcatttgggtgtttcaagggaacagagaagccctggtttagatgatgcagggttttctgatgccaaagtgagaatgataaaatgtctgaaggaagaacacgatgctatgcattccaggcagaatctggacttgaaaacaatgaagcacaaatacttttagatgaactgattcacttttattttgtaaacatcctagaagaattccatttgcactgaactgtttgaatcactgcagagctcttgctccttctaatccccaaggaaagtcgatccatcgcgtcctgctacactgtatttcttcactttgccccttttctcaattctttgtgatcagcataaagtttgaaccgtgcctcttctcgccttcctgcctggccacctgtccagccctgcggtcagctgtaccgaccagcagacggtgcctctcttgccaagtggagccgatgctctgtgaccattgttcgtggggccacactgccatccccatcgttgccccttcaggacactcgtcaacagctgtaagaggcttcccatcctcgcccatataaaaggaaggcctgaaaacacttctcggagcatcagttcataggtcaccgcaaccggccgaacaatacgcgattattcaacgggctccaattcattttcctctgctcctcccccaccgttacccttgagagaaaactaatttgcagaaaaatagcccctgccagccaacttcttctcctaaatgtatgctgaccccgaac

SEQ ID NO: 5179 - protein, 60 aa, Homo sapiens
MLVLKGMTCHPNIISPSSSRSDPQYAPASGGHRENGSRGEEKRKVSEDQDIPSGLALCLP

SEQ ID NO: 5180 - DNA, 7447 bp, Homo sapiens
agtgtgctctgcctccgaggaaaagctgccaaaattttctcctgctgcaattcaagttggctgggggccggtagtgagatctagggctacttcaacaaaactttgctgcccttcctgctcctcttgtcttcttttctcctgataccttttgatgctctgcacatgttatttgcatagcaaaggcactaagctttccaggaagagagggcaccacttccacccccaataagtcttttttcccgtcttttctttcttttcctttccttttttggggggtggggagggagagaaagggggtttgcaaaggcagcatctcagagtgatagcctagatgtattgaaggcatctcttattctgccaaatcggaaagtcagttctctaaagcccgggttagccagaccatagggttttattctggctgcagaataactggctggtgtggctttgcaaaggggggcaaaaaataaaaaaataaaaaaaattaaaaaaagttagagaggagagggagtacgtgagtcgtccagtgcaatctctattgtctgaaacttactttttatcagaatttgaagatgaaaacggttaaaaaatggccatactttagtaactaatcagcctaatgctttgcttatgaaaacttttaccatcattatttttttcattttggattgagaaaatgaatccagatatagaagaaagtgcaggatgttggataaaagtggctcttaaacagtggaacatccaataactaatttgcaagaagttttaaagaaataaaattgttatgcttcgattttggtatggtattgactctttagcacataggtagccctcaaaaaaatcatccagttttctaaattatggaaattttgtggaagacgttgacctggattttgagcctcatcatggcttcatcggaatttcatagtgaccacaggctttcatacagttctcaagaggaattcctgacttatcttgaacactaccagctaactattccaataagggttgatcaaaatggagcatttctcagctttactgtgaaaaatgataaacactcaaggagaagacggagtatggaccctattgatccacagcaggcagtatctaagttattttttaaactttcagcctatggcaagcactttcatctaaacttgactctcaacacagattttgtgtccaaacattttacagtagaatattgggggaaagatggaccccagtggaaacatgattttttagacaactgtcattacacaggatatttgcaagatcaacgtagtacaactaaagtggctttaagcaactgtgttgggttgcatggtgttattgctacagaagatgaagagtattttatcgaacctttaaagaataccacagaggattccaagcattttagttatgaaaatggccaccctcatgttatttacaaaaagtctgcccttcaacaacgacatctgtatgatcactctcattgtggggtttcggatttcacaagaagtggcaaaccttggtggctgaatgacacatccactgtttcttattcactaccaattaacaacacacatatccaccacagacagaagagatcagtgagcattgaacggtttgtggagacattggtagtggcagacaaaatgatggtgggctaccatggccgcaaagacattgaacattacattttgagtgtgatgaatattgttgccaaactttaccgtgattccagcctaggaaacgttgtgaatattatagtggcccgcttaattgttctcacagaagatcagccaaacttggagataaaccaccatgcagacaagtccctcgatagcttctgtaaatggcagaaatccattctctcccaccaaagtgatggaaacaccattccagaaaatgggattgcccaccacgataatgcagttcttattactagatatgatatctgcacttataaaaataagccctgtggaacactgggcttggcctctgtggctggaatgtgtgagcctgaaaggagctgcagcattaatgaagacattggcctgggttcagcttttaccattgcacatgagattggtcacaattttggtatgaaccatgatggaattggaaattcttgtgggacgaaaggtcatgaagcagcaaaacttatggcagctcacattactgcgaataccaatcctttttcctggtctgcttgcagtcgagactacatcaccagctttctagaatttcttaaactcggtgattcaataagtggttcatgaatcgcccagaagccgtcctgattaaataataaagaacccatttccgttaaaatggacgtgttatgccagcttctgatgttttccggcgacggctttgcagttcaggccgtggtacttgccttgataatgagcctcccaagcgtgactttctttatccagctgtggccccaggtcaggtgtatgatgctgatgagcaatgtcgtttccagtatggagcaacctcccgccaatgtaaatatggggaagtgtgtagagagctctggtgtctcagcaaaagcaaccgctgtgtcaccaacagtattccagcagctgaggggacactgtgtcaaactgggaatattgaaaaagggtggtgttatcagggagattgtgttccttttggcacttggccccagagcatagatgggggctggggtccctggtcactatggggagagtgcagcaggacctgcgggggaggcgtctcctcatccctaagacactgtgacagtccagcaccttcaggaggtggaaaatattgccttggggaaaggaaacggtatcgctcctgtaacacagatccatgccctttgggttcccgagattttcgagagaaacagtgtgcagactttgacaatatgcctttccgaggaaagtattataactggaaaccctatactggaggtggggtaaaaccttgtgcattaaactgcttggctgaaggttataatttctacactgaacgtgctcctgcggtgatcgatgggacccagtgcaatgcggattcactggatatctgcatcaatggagaatgcaagcacgtaggctgtgataatattttgggatctgatgctagggaagatagatgtcgagtctgtggaggggacggaagcacatgtgatgccattgaagggttcttcaatgattcactgcccaggggaggctacatggaagtggtgcagataccaagaggctctgttcacattgaagttagagaagttgccatgtcaaagaactatattgctttaaaatctgaaggagatgattactatattaatggtgcctggactattgactggcctaggaaatttgatgttgctgggacagcttttcattacaagagaccaactgatgaaccagaatccttggaagctctaggtcctacctcagaaaatctcatcgtcatggttctgcttcaagaacagaatttgggaattaggtataagttcaatgttcccatcactcgaactggcagtggagataatgaagttggctttacatggaatcatcagccttggtcagaatgctcagctacttgtgctggaggtgtccaaagacaggaggtggtctgtaaaaggttggatgacaactccattgtccagaacaattactgtgatcctgacagtaagccacctgaaaatcaaagagcctgcaacactgagccctgcccacctgagtggttcattggggattggttggaatgcagcaagacttgtgatggtgggatgcgcacaagggcagtgctctgcatcaggaagatcggaccttctgaggaggagacgctggactacagtggttgtttaacacaccggcctgtcgaaaaagagccctgcaacaaccagtcatgtccaccacagtgggtggctttggactggtctgagtgtactccaaaatgtggtccaggattcaagcatcggattgttctgtgcaagagcagtgacctttctaagacattcccagctgcacaatgtccagaggaaagcaaacctcctgtccgcatccgctgcagtttgggccgctgccctcctcctcgctgggtcacaggagactggggccagtgttctgctcagtgtggccttggacagcagatgagaactgtgcagtgtctctcctacaccggacaggcatctagtgactgtctagaaactgttcggcctccatcaatgcagcagtgtgaaagcaaatgtgacagtacccccatttctaatactgaagagtgcaaagatgtgaataaagtggcttattgcccactggtgctgaagttcaagttctgcagtcgagcatacttcagacagatgtgttgtaagacctgccaaggacactgacccacagaaagccagagagagtgccttgtcatttcatcatggaaatgcatccatcaaagagagccacccagaggaagaggattgatgtccttgcaaatgcattaccctgtggaaaacgtaaccactggtcagccctagctgacaaaatttcaatattattttagcttctgtgaagtgggatttattgatccaaagtgctggacacggtattaggagggaatgccagattggagagatccaaacaacacagggagacttgcttactgtggagcgtttgtgttctttcgagtaaatccaatagcctgtttacctccttggaccattaagataatttttattatggacttagcaatgacactgaatccatttgtatttaaaactgtttaaaatgtagctgttatgacttggtcaactatggaagtgaagaaggttcagaattcttaagtcatagcttaaaaatatttactgtactttatctcactacaacagcaccacaatttaaattataaaacgggctttgaactataatttaaggagcaattataaatcaaaagtaatgaaagtttgtattatttttcttcattccacttaatttccttaggaataatcccctggttctgaacactgctgtgagccatatataaaactatattaaactgaacaataatgaggggcatagtttaaagcagtgcatcagttactgcagctgtgcaagtctataaactcagtgctgaaagactgtggccaacttgccattgtgcaagtaaagctgagatttccattaaaactttaagagaaaaacatttcaatttcatgcagaaaccagacctggggtatggtacagaccaaaggaccaggccctttgctgccaccacacaggatgccttagttcttatttgagtccctccaactcacttgtgtttacatcctccccagccacagcacggcttctgccctttggattgctgcacgtgtgttgagcttactgagatgataccatgcaaaagatagactggctcggtaaccaggcagacccttttgcagtttgttgacaattacgatgagttccagatgtcccttctttgatatggtagaagggcatttatttatatgagagcaaatgtgtgtgtgtgtttgcgggcgcttttaagtgtgtggatagatgagtgtgcttgcacataatgtgctatttctgtgagttttaaagtaggcaagggataataaccaaagaagaaaatttcatgaagactagacatcataaagcataattttaatagtcactcaaccaagtattttttattttttatggatactctgaatggcaattaaatgtgaaacccagtttcttgggcaagtcaaattctggaatcacatccacctaaattaaaatgactagctcgtattttccccatcttcaagtttcacatcctggtcatcaaaagactcgacagcaagacttagaatgaaaaagggtacttgtttatattaatattttttacttgaacacgtgtagcttgcagcaggttcttgatgaatgtgctttgtgtccaaaatgcctccccattgtacacaggtgtacaccatgcatgcaccaacacctaaaactcaaaactaaatggctattttgtaaggttaatactttcagttaaacagcatgtttgacttgattccatcatggtgctcttaaattacatgtcagtgcatcacatatatcatgatctaatgcagatgactaggctttttccaaaaggaagacagaccctcagacaccaaaagccaatctaaacaactcccaggtttgctgtggacaatcagcatggaatgttttctgcactctcagtcatgaccatctgtatcttgttacctgctttctctctcaacaccacagttctcaaccctgagccttccagagagagctattgatgatacaagaggaatcaccagggcccggatctaagatgcccttagaagaccagcccaagtgccgtcttagccattcagtgaagggcaaacagcccatgggtagtatggcccgagcactgaattcccttgcgccttttcaaagaacagttaacttggtgctaatgtgccctggtgaaataaataaaagatgggcagtttctgtggcattttaggcataggtttgcaatccagatctgattttctccaacataaatatcagctcatgttcttatttcaaaaagatttcttattaccgactaaaagctattttttacctcacctggaaactaccattgtgagggccatcccccaggcactgcacagcaccttggctgatgctggaagaggagggcagtcagtgtcacttctgggatgtgccccagcactgagaacaaaatgcaggcatcccccggggcagcatcagagtgcctttctagagggagccacgcacagaatgtaacaggatgaaacagtttcaagtaagccttgaattgaaacctgagtaggttaaaacaattctatttcatagcacatcacaatactgctgctactctgtagccacccccatggctacatgatgccctattcctaaataataacaatagcattgtcagtggaggctgggccaccatggcagaccttccaaaagtagtgagctacatagactacttagggaaccccagggaaactggtaccctacacctgggagcagtatctgccactgggataaagtcctactaaaaaaggaacggtaaatgtaccctaatgattaaaccccgtgagatacatatgatttccaaatagtccatttcattaggaacttttttgtttgaatgaatgtcacataggtatcctcagtaacacagaacgaaattacctttgtattattgtgattagttgttgcttattattttatactcagtaataatgtggtacactgttaatttttttgcttttgtaaattatattctaatttattgccatgtttcctaacacttgtcctacattcattctcctgcttgtaatgaaaatgaaaaaatcattgtaacacttgatggagtgaaattccacgccaggcacagaatttttttgacatagataatttagtaaaataaaaattcagcttataataatgat

SEQ ID NO: 5181 - protein, 673 aa, Homo sapiens
MPASDVFRRRLCSSGRGTCLDNEPPKRDFLYPAVAPGQVYDADEQCRFQYGATSRQCKYGEVCRELWCLSKSNRCVTNSIPAAEGTLCQTGNIEKGWCYQGDCVPFGTWPQSIDGGWGPWSLWGECSRTCGGGVSSSLRHCDSPAPSGGGKYCLGERKRYRSCNTDPCPLGSRDFREKQCADFDNMPFRGKYYNWKPYTGGGVKPCALNCLAEGYNFYTERAPAVIDGTQCNADSLDICINGECKHVGCDNILGSDAREDRCRVCGGDGSTCDAIEGFFNDSLPRGGYMEVVQIPRGSVHIEVREVAMSKNYIALKSEGDDYYINGAWTIDWPRKFDVAGTAFHYKRPTDEPESLEALGPTSENLIVMVLLQEQNLGIRYKFNVPITRTGSGDNEVGFTWNHQPWSECSATCAGGVQRQEVVCKRLDDNSIVQNNYCDPDSKPPENQRACNTEPCPPEWFIGDWLECSKTCDGGMRTRAVLCIRKIGPSEEETLDYSGCLTHRPVEKEPCNNQSCPPQWVALDWSECTPKCGPGFKHRIVLCKSSDLSKTFPAAQCPEESKPPVRIRCSLGRCPPPRWVTGDWGQCSAQCGLGQQMRTVQCLSYTGQASSDCLETVRPPSMQQCESKCDSTPISNTEECKDVNKVAYCPLVLKFKFCSRAYFRQMCCKTCQGH

SEQ ID NO: 5182 - DNA, 7310 bp, Homo sapiens
agtgtgctctgcctccgaggaaaagctgccaaaattttctcctgctgcaattcaagttggctgggggccggtagtgagatctagggctacttcaacaaaactttgctgcccttcctgctcctcttgtcttcttttctcctgataccttttgatgctctgcacatgttatttgcatagcaaaggcactaagctttccaggaagagagggcaccacttccacccccaataagtcttttttcccgtcttttctttcttttcctttccttttttggggggtggggagggagagaaagggggtttgcaaaggcagcatctcagagtgatagcctagatgtattgaaggcatctcttattctgccaaatcggaaagtcagttctctaaagcccgggttagccagaccatagggttttattctggctgcagaataactggctggtgtggctttgcaaaggggggcaaaaaataaaaaaataaaaaaaattaaaaaaagttagagaggagagggagtacgtgagtcgtccagtgcaatctctattgtctgaaacttactttttatcagaatttgaagatgaaaacggttaaaaaatggccatactttagtaactaatcagcctaatgctttgcttatgaaaacttttaccatcattatttttttcattttggattgagaaaatgaatccagatatagaagaaagtgcaggatgttggataaaagtggctcttaaacagtggaacatccaataactaatttgcaagaagttttaaagaaataaaattgttatgcttcgattttggtatggtattgactctttagcacataggtagccctcaaaaaaatcatccagttttctaaattatggaaattttgtggaagacgttgacctggattttgagcctcatcatggcttcatcggaatttcatagtgaccacaggctttcatacagttctcaagaggaattcctgacttatcttgaacactaccagctaactattccaataagggttgatcaaaatggagcatttctcagctttactgtgaaaaatgataaacactcaaggagaagacggagtatggaccctattgatccacagcaggcagtatctaagttattttttaaactttcagcctatggcaagcactttcatctaaacttgactctcaacacagattttgtgtccaaacattttacagtagaatattgggggaaagatggaccccagtggaaacatgattttttagacaactgtcattacacaggatatttgcaagatcaacgtagtacaactaaagtggctttaagcaactgtgttgggttgcatggtgttattgctacagaagatgaagagtattttatcgaacctttaaagaataccacagaggattccaagcattttagttatgaaaatggccaccctcatgttatttacaaaaagtctgcccttcaacaacgacatctgtatgatcactctcattgtggggtttcggatttcacaagaagtggcaaaccttggtggctgaatgacacatccactgtttcttattcactaccaattaacaacacacatatccaccacagacagaagagatcagtgagcattgaacggtttgtggagacattggtagtggcagacaaaatgatggtgggctaccatggccgcaaagacattgaacattacattttgagtgtgatgaatattgttgccaaactttaccgtgattccagcctaggaaacgttgtgaatattatagtggcccgcttaattgttctcacagaagatcagccaaacttggagataaaccaccatgcagacaagtccctcgatagcttctgtaaatggcagaaatccattctctcccaccaaagtgatggaaacaccattccagaaaatgggattgcccaccacgataatgcagttcttattactagatatgatatctgcacttataaaaataagccctgtggaacactgggcttggcctctgtggctggaatgtgtgagcctgaaaggagctgcagcattaatgaagacattggcctgggttcagcttttaccattgcacatgagattggtcacaattttggtatgaaccatgatggaattggaaattcttgtgggacgaaaggtcatgaagcagcaaaacttatggcagctcacattactgcgaataccaatcctttttcctggtctgcttgcagtcgagactacatcaccagctttctagattcaggccgtggtacttgccttgataatgagcctcccaagcgtgactttctttatccagctgtggccccaggtcaggtgtatgatgctgatgagcaatgtcgtttccagtatggagcaacctcccgccaatgtaaatatggggaagtgtgtagagagctctggtgtctcagcaaaagcaaccgctgtgtcaccaacagtattccagcagctgaggggacactgtgtcaaactgggaatattgaaaaagggtggtgttatcagggagattgtgttccttttggcacttggccccagagcatagatgggggctggggtccctggtcactatggggagagtgcagcaggacctgcgggggaggcgtctcctcatccctaagacactgtgacagtccagcaccttcaggaggtggaaaatattgccttggggaaaggaaacggtatcgctcctgtaacacagatccatgccctttgggttcccgagattttcgagagaaacagtgtgcagactttgacaatatgcctttccgaggaaagtattataactggaaaccctatactggaggtggggtaaaaccttgtgcattaaactgcttggctgaaggttataatttctacactgaacgtgctcctgcggtgatcgatgggacccagtgcaatgcggattcactggatatctgcatcaatggagaatgcaagcacgtaggctgtgataatattttgggatctgatgctagggaagatagatgtcgagtctgtggaggggacggaagcacatgtgatgccattgaagggttcttcaatgattcactgcccaggggaggctacatggaagtggtgcagataccaagaggctctgttcacattgaagttagagaagttgccatgtcaaagaactatattgctttaaaatctgaaggagatgattactatattaatggtgcctggactattgactggcctaggaaatttgatgttgctgggacagcttttcattacaagagaccaactgatgaaccagaatccttggaagctctaggtcctacctcagaaaatctcatcgtcatggttctgcttcaagaacagaatttgggaattaggtataagttcaatgttcccatcactcgaactggcagtggagataatgaagttggctttacatggaatcatcagccttggtcagaatgctcagctacttgtgctggaggtgtccaaagacaggaggtggtctgtaaaaggttggatgacaactccattgtccagaacaattactgtgatcctgacagtaagccacctgaaaatcaaagagcctgcaacactgagccctgcccacctgagtggttcattggggattggttggaatgcagcaagacttgtgatggtgggatgcgcacaagggcagtgctctgcatcaggaagatcggaccttctgaggaggagacgctggactacagtggttgtttaacacaccggcctgtcgaaaaagagccctgcaacaaccagtcatgtccaccacagtgggtggctttggactggtctgagtgtactccaaaatgtggtccaggattcaagcatcggattgttctgtgcaagagcagtgacctttctaagacattcccagctgcacaatgtccagaggaaagcaaacctcctgtccgcatccgctgcagtttgggccgctgccctcctcctcgctgggtcacaggagactggggccagtgttctgctcagtgtggccttggacagcagatgagaactgtgcagtgtctctcctacaccggacaggcatctagtgactgtctagaaactgttcggcctccatcaatgcagcagtgtgaaagcaaatgtgacagtacccccatttctaatactgaagagtgcaaagatgtgaataaagtggcttattgcccactggtgctgaagttcaagttctgcagtcgagcatacttcagacagatgtgttgtaagacctgccaaggacactgacccacagaaagccagagagagtgccttgtcatttcatcatggaaatgcatccatcaaagagagccacccagaggaagaggattgatgtccttgcaaatgcattaccctgtggaaaacgtaaccactggtcagccctagctgacaaaatttcaatattattttagcttctgtgaagtgggatttattgatccaaagtgctggacacggtattaggagggaatgccagattggagagatccaaacaacacagggagacttgcttactgtggagcgtttgtgttctttcgagtaaatccaatagcctgtttacctccttggaccattaagataatttttattatggacttagcaatgacactgaatccatttgtatttaaaactgtttaaaatgtagctgttatgacttggtcaactatggaagtgaagaaggttcagaattcttaagtcatagcttaaaaatatttactgtactttatctcactacaacagcaccacaatttaaattataaaacgggctttgaactataatttaaggagcaattataaatcaaaagtaatgaaagtttgtattatttttcttcattccacttaatttccttaggaataatcccctggttctgaacactgctgtgagccatatataaaactatattaaactgaacaataatgaggggcatagtttaaagcagtgcatcagttactgcagctgtgcaagtctataaactcagtgctgaaagactgtggccaacttgccattgtgcaagtaaagctgagatttccattaaaactttaagagaaaaacatttcaatttcatgcagaaaccagacctggggtatggtacagaccaaaggaccaggccctttgctgccaccacacaggatgccttagttcttatttgagtccctccaactcacttgtgtttacatcctccccagccacagcacggcttctgccctttggattgctgcacgtgtgttgagcttactgagatgataccatgcaaaagatagactggctcggtaaccaggcagacccttttgcagtttgttgacaattacgatgagttccagatgtcccttctttgatatggtagaagggcatttatttatatgagagcaaatgtgtgtgtgtgtttgcgggcgcttttaagtgtgtggatagatgagtgtgcttgcacataatgtgctatttctgtgagttttaaagtaggcaagggataataaccaaagaagaaaatttcatgaagactagacatcataaagcataattttaatagtcactcaaccaagtattttttattttttatggatactctgaatggcaattaaatgtgaaacccagtttcttgggcaagtcaaattctggaatcacatccacctaaattaaaatgactagctcgtattttccccatcttcaagtttcacatcctggtcatcaaaagactcgacagcaagacttagaatgaaaaagggtacttgtttatattaatattttttacttgaacacgtgtagcttgcagcaggttcttgatgaatgtgctttgtgtccaaaatgcctccccattgtacacaggtgtacaccatgcatgcaccaacacctaaaactcaaaactaaatggctattttgtaaggttaatactttcagttaaacagcatgtttgacttgattccatcatggtgctcttaaattacatgtcagtgcatcacatatatcatgatctaatgcagatgactaggctttttccaaaaggaagacagaccctcagacaccaaaagccaatctaaacaactcccaggtttgctgtggacaatcagcatggaatgttttctgcactctcagtcatgaccatctgtatcttgttacctgctttctctctcaacaccacagttctcaaccctgagccttccagagagagctattgatgatacaagaggaatcaccagggcccggatctaagatgcccttagaagaccagcccaagtgccgtcttagccattcagtgaagggcaaacagcccatgggtagtatggcccgagcactgaattcccttgcgccttttcaaagaacagttaacttggtgctaatgtgccctggtgaaataaataaaagatgggcagtttctgtggcattttaggcataggtttgcaatccagatctgattttctccaacataaatatcagctcatgttcttatttcaaaaagatttcttattaccgactaaaagctattttttacctcacctggaaactaccattgtgagggccatcccccaggcactgcacagcaccttggctgatgctggaagaggagggcagtcagtgtcacttctgggatgtgccccagcactgagaacaaaatgcaggcatcccccggggcagcatcagagtgcctttctagagggagccacgcacagaatgtaacaggatgaaacagtttcaagtaagccttgaattgaaacctgagtaggttaaaacaattctatttcatagcacatcacaatactgctgctactctgtagccacccccatggctacatgatgccctattcctaaataataacaatagcattgtcagtggaggctgggccaccatggcagaccttccaaaagtagtgagctacatagactacttagggaaccccagggaaactggtaccctacacctgggagcagtatctgccactgggataaagtcctactaaaaaaggaacggtaaatgtaccctaatgattaaaccccgtgagatacatatgatttccaaatagtccatttcattaggaacttttttgtttgaatgaatgtcacataggtatcctcagtaacacagaacgaaattacctttgtattattgtgattagttgttgcttattattttatactcagtaataatgtggtacactgttaatttttttgcttttgtaaattatattctaatttattgccatgtttcctaacacttgtcctacattcattctcctgcttgtaatgaaaatgaaaaaatcattgtaacacttgatggagtgaaattccacgccaggcacagaatttttttgacatagataatttagtaaaataaaaattcagcttataataatgat

SEQ ID NO: 5183 - protein, 1117 aa, Homo sapiens; identical to SEQ ID NO: 652

SEQ ID NO: 5184 - DNA, 365 bp, Homo sapiens
cctacaccagtagtttgccagaggcccttggacctttggtcaaaggctgaaggctgcactgttggcttcgctacttttgaagttttgggacttcaactggcttccttgcttctcagcttgcagatggcctattgtggaatttcaccttatgatcgtatgtgacgaaggagtttcctgtcaactctattctgcccataatcttcatttcttaaacgaagaaggaaaagaaaagctggagtgaaaagttttgaaagagaaaaaattgatctctgtaataattttcaagaatttttactgcaactaaaattcagtgtttagtttatgaagaaaaaaatgaatggctatagtacatacatttccatggt

SEQ ID NO: 5185 - protein, 30 aa, Homo sapiens
MIVCDEGVSCQLYSAHNLHFLNEEGKEKLE

SEQ ID NO: 5186 - DNA, 2110 bp, Homo sapiens
ttagcaataaggttttttttaaaataagcaattcccttgactgaagacgttctcataacattaggaaaagaagagttccaaaagctgagacaagatcttgaaatggtactgtccactaaggagtcaaagaatgaaaagttaaaggaagacttagaaagggaacaacggtggttggatgaacagcaacagataatggaatctcttaatgtactacacagtgaattgaaaaataaggttgaaacattttctgaatcaagaatctttaatgaactgaaaactaaaatgcttaatataaaagaatataaggagaaactcttgagtaccttgggcgagtttctagaagaccattttcctctgcctgatagaagtgttaaaaagaaaaagaaaaacattcaagaatcatctgtaaacctgataacactgcatgaaatgttagagattcttataaatagattatttgatgttccacatgatccatatgtcaaaattagtgattccttttggccaccttatgttgagctgctgctgcgtaatggaattgccttgagacatccagaagatccaacccgaataagattagaagctttccatcagtaaaaggatgttttcttttttcacacagtaaaaattcttatcattcaaggatattggaaccacaggactatttggataaaaaacattatttgcaaattaatgcgcataggccatcttacttttattgcaaaatggcatgtgctgccatctattattcatttttaaatggtcatttcttattcagtgagtgctttagtgttttaaactatatggataagaatgcaggtagataatattctaggcataaaacatttaatgtaccttacctcatgcaatattctttggattctttgttgatttatgatattgctaatataatattttcttaaaatatataacaatatcttttatgcattttgagttccagctggtgcttctttatatttagaaattataatgggaaggtcatttaatttacagatggttttaaaattgaggtaatatctgaggtggcataatttaaaaatatttagcaaatttgtttcatatatactgtcttatttctagatttgtttaaaattggaatatgaaaaactaatggataaagctagcataaaattgatattttagtttgtattattaatatatcatgttaccttatatattaatctactcttgattctgctaattattaccaacaaaattgtattcatgacattttattaatcctctgtgaattttctgtaaataaaattatttctgaaaatctctagctattagtgatgtgggatatttttataagtagcaaatgttttttaaaggccgataaactaagatataggactcatttagtattacataacaagctaaactagagaatcctaaatccatttagtatcattagttttctaagataaatttgtttatttttttacttgaaagcgctttctactgtatattatccaagtctctggcttaccttaattacttcatattttctaaagtaaacaaatatttgaagtataccaaatccctctgtagaaaatacaaatactattatattttagggaacgtaactcttttaggggaggataatatataaagtacctcctagaatactgcagttggatattgaagaagtgagcaactttttactctttgaagttactggagagggaagaaatggcagtgtaggtctgacaagaattcttcagagcaggtagtactgttgtccgtgaagtactagcaaaacacttttggtgtttgctaattaaaacattaaaaatatgtaattgagccagacacggtggctcatgcctataattctagcactttgggaggccgaggtgggcggatcacttgaggtcaggagttcgagaccagccaggccaacatggtgaaaccctgtctttactaaaaataccaaaaattagctgggtgtggtggtgcacacctgtaatcccagctacttgaaggctgaggcaggggaatcgcttgaacctgggaggtagaagttgcagtgagccaagattgcgccactgcactccagcctgggtgacgagcaaaactccgtctc

SEQ ID NO: 5187 - protein, 164 aa, Homo sapiens
MVLSTKESKNEKLKEDLEREQRWLDEQQQIMESLNVLHSELKNKVETFSESRIFNELKTKMLNIKEYKEKLLSTLGEFLEDHFPLPDRSVKKKKKNIQESSVNLITLHEMLEILINRLFDVPHDPYVKISDSFWPPYVELLLRNGIALRHPEDPTRIRLEAFHQ

SEQ ID NO: 5188 - DNA, 2501 bp, Homo sapiens
gcagaagtccggggctggcaagcgcttcctgcgcagcgcctaggcgacctggagtttgtgacgctgtgatggtctagaggctggagattcaagatctgggtgccatcattttctggttctgttgatgaccctcttccagtttttcttataaggctaaaaattcacaaagcatatatcaatgaatcaggaggatctagatccggatagtactacagatgtgggagatgttacaaatactgaagaagaacttattagagaatgtgaagaaatgtggaaagatatggaagaatgtcagaataaattatcacttattggaactgaaacactcaccgattcaaatgctcagctatcattgttaattatgcaagtaaaatgtttaaccgctgaactcagtcaatggcagaaaaaaacacctgaaacaattcccttgactgaagacgttctcataacattaggaaaagaagagttccaaaagctgagacaagatcttgaaatggtactgtccactaaggagtcaaagaatgaaaagttaaaggaagacttagaaagggaacaacggtggttggatgaacagcaacagataatggaatctcttaatgtactacacagtgaattgaaaaataaggttgaaacattttctgaatcaagaatctttaatgaactgaaaactaaaatgcttaatataaaagaatataaggagaaactcttgagtaccttgggcgagtttctagaagaccattttcctctgcctgatagaagtgttaaaaagaaaaagaaaaacattcaagaatcatctgtaaacctgataacactgcatgaaatgttagagattcttataaatagattatttgatgttccacatgatccatatgtcaaaattagtgattccttttggccaccttatgttgagctgctgctgcgtaatggaattgccttgagacatccagaagatccaacccgaataagattagaagctttccatcagtaaaaggatgttttcttttttcacacagtaaaaattcttatcattcaaggatattggaaccacaggactatttggataaaaaacattatttgcaaattaatgcgcataggccatcttacttttattgcaaaatggcatgtgctgccatctattattcatttttaaatggtcatttcttattcagtgagtgctttagtgttttaaactatatggataagaatgcaggtagataatattctaggcataaaacatttaatgtaccttacctcatgcaatattctttggattctttgttgatttatgatattgctaatataatattttcttaaaatatataacaatatcttttatgcattttgagttccagctggtgcttctttatatttagaaattataatgggaaggtcatttaatttacagatggttttaaaattgaggtaatatctgaggtggcataatttaaaaatatttagcaaatttgtttcatatatactgtcttatttctagatttgtttaaaattggaatatgaaaaactaatggataaagctagcataaaattgatattttagtttgtattattaatatatcatgttaccttatatattaatctactcttgattctgctaattattaccaacaaaattgtattcatgacattttattaatcctctgtgaattttctgtaaataaaattatttctgaaaatctctagctattagtgatgtgggatatttttataagtagcaaatgttttttaaaggccgataaactaagatataggactcatttagtattacataacaagctaaactagagaatcctaaatccatttagtatcattagttttctaagataaatttgtttatttttttacttgaaagcgctttctactgtatattatccaagtctctggcttaccttaattacttcatattttctaaagtaaacaaatatttgaagtataccaaatccctctgtagaaaatacaaatactattatattttagggaacgtaactcttttaggggaggataatatataaagtacctcctagaatactgcagttggatattgaagaagtgagcaactttttactctttgaagttactggagagggaagaaatggcagtgtaggtctgacaagaattcttcagagcaggtagtactgttgtccgtgaagtactagcaaaacacttttggtgtttgctaattaaaacattaaaaatatgtaattgagccagacacggtggctcatgcctataattctagcactttgggaggccgaggtgggcggatcacttgaggtcaggagttcgagaccagccaggccaacatggtgaaaccctgtctttactaaaaataccaaaaattagctgggtgtggtggtgcacacctgtaatcccagctacttgaaggctgaggcaggggaatcgcttgaacctgggaggtagaagttgcagtgagccaagattgcgccactgcactccagcctgggtgacgagcaaaactccgtctc

SEQ ID NO: 5189 - protein, 269 aa, Homo sapiens; identical to SEQ ID NO: 654

SEQ ID NO: 5190 - DNA, 1305 bp, Homo sapiens
ttagcaataaggttttttttaaaataagcaattcccttgactgaagacgttctcataacattaggaaaagaagagttccaaaagctgagacaagatcttgaaatggtactgtccactaaggagtcaaagaatgaaaagttaaaggaagacttagaaagggaacaacggtggttggatgaacagcaacagataatggaatctcttaatgtactacacagtgaattgaaaaataaggttgaaacattttctgaatcaagaatctttaatgaactgaaaactaaaatgcttaatataaaagaatataaggagaaactcttgagtaccttgggcgagtttctagaagaccattttcctctgcctgatagaagtgttaaaaagaaaaagaaaaacattcaagaatcatctgtaaacctgataacactgcatgaaatgttagagattcttataaatagattatttgatgttccacatgatccatatgtcaaaattagtgattccttttggccaccttatgttgagctgctgctgcgtaatggaattgccttgagacatccagaagatccaacccgaataagattagaagctttccatcagtaaaaggatgttttcttttttcacacagtaaaaattcttatcattcaaggatattggaaccacaggactatttggataaaaaacattatttgcaaattaatgcgcataggccatcttacttttattgcaaaatggcatgtgctgccatctattattcatttttaaatggtcatttcttattcagtgagtgctttagtgttttaaactatatggataagaatgcaggtagataatattctaggcataaaacatttaatgtaccttacctcatgcaatattctttggattctttgttgatttatgatattgctaatataatattttcttaaaatatataacaatatcttttatgcattttgagttccagctggtgcttctttatatttagaaattataatgggaaggtcatttaatttacagatggttttaaaattgaggtaatatctgaggtggcataatttaaaaatatttagcaaatttgtttcatatatactgtcttatttctagatttgtttaaaattggaatatgaaaaactaatggataaagctagcataaaattgatattttagtttgtattattaatatatcatgttaccttatatattaatctactcttgattctgctaattattaccaacaaaattgtattcatgacattttattaatcctctgtgaattttctgtaaataaaattatttctgaaaatctct

SEQ ID NO: 5191 - protein, 164 aa, Homo sapiens; identical to SEQ ID NO: 5187

SEQ ID NO: 5192 - DNA, 1696 bp, Homo sapiens
gcagaagtccggggctggcaagcgcttcctgcgcagcgcctaggcgacctggagtttgtgacgctgtgatggtctagaggctggagattcaagatctgggtgccatcattttctggttctgttgatgaccctcttccagtttttcttataaggctaaaaattcacaaagcatatatcaatgaatcaggaggatctagatccggatagtactacagatgtgggagatgttacaaatactgaagaagaacttattagagaatgtgaagaaatgtggaaagatatggaagaatgtcagaataaattatcacttattggaactgaaacactcaccgattcaaatgctcagctatcattgttaattatgcaagtaaaatgtttaaccgctgaactcagtcaatggcagaaaaaaacacctgaaacaattcccttgactgaagacgttctcataacattaggaaaagaagagttccaaaagctgagacaagatcttgaaatggtactgtccactaaggagtcaaagaatgaaaagttaaaggaagacttagaaagggaacaacggtggttggatgaacagcaacagataatggaatctcttaatgtactacacagtgaattgaaaaataaggttgaaacattttctgaatcaagaatctttaatgaactgaaaactaaaatgcttaatataaaagaatataaggagaaactcttgagtaccttgggcgagtttctagaagaccattttcctctgcctgatagaagtgttaaaaagaaaaagaaaaacattcaagaatcatctgtaaacctgataacactgcatgaaatgttagagattcttataaatagattatttgatgttccacatgatccatatgtcaaaattagtgattccttttggccaccttatgttgagctgctgctgcgtaatggaattgccttgagacatccagaagatccaacccgaataagattagaagctttccatcagtaaaaggatgttttcttttttcacacagtaaaaattcttatcattcaaggatattggaaccacaggactatttggataaaaaacattatttgcaaattaatgcgcataggccatcttacttttattgcaaaatggcatgtgctgccatctattattcatttttaaatggtcatttcttattcagtgagtgctttagtgttttaaactatatggataagaatgcaggtagataatattctaggcataaaacatttaatgtaccttacctcatgcaatattctttggattctttgttgatttatgatattgctaatataatattttcttaaaatatataacaatatcttttatgcattttgagttccagctggtgcttctttatatttagaaattataatgggaaggtcatttaatttacagatggttttaaaattgaggtaatatctgaggtggcataatttaaaaatatttagcaaatttgtttcatatatactgtcttatttctagatttgtttaaaattggaatatgaaaaactaatggataaagctagcataaaattgatattttagtttgtattattaatatatcatgttaccttatatattaatctactcttgattctgctaattattaccaacaaaattgtattcatgacattttattaatcctctgtgaattttctgtaaataaaattatttctgaaaatctct

SEQ ID NO: 5193 - protein, 269 aa, Homo sapiens; identical to SEQ ID NO: 654

SEQ ID NO: 5194 - DNA, 1733 bp, Homo sapiens
cgcgcagaagtccggggctggcaagcgcttcctgcgcagcgcctaggcgacctggagtttgtgacgctgtgatggtctagaggctggagattcaagatctgggtgccatcattttctggttctgttgatgaccctcttccaggttacatacagcttacatcttgcatcctcaagcgtttttcttataaggctaaaaattcacaaagcatatatcaatgaatcaggaggatctagatccggatagtactacagatgtgggagatgttacaaatactgaagaagaacttattagagaatgtgaagaaatgtggaaagatatggaagaatgtcagaataaattatcacttattggaactgaaacactcaccgattcaaatgctcagctatcattgttaattatgcaagtaaaatgtttaaccgctgaactcagtcaatggcagaaaaaaacacctgaaacaattcccttgactgaagacgttctcataacattaggaaaagaagagttccaaaagctgagacaagatcttgaaatggtactgtccactaaggagtcaaagaatgaaaagttaaaggaagacttagaaagggaacaacggtggttggatgaacagcaacagataatggaatctcttaatgtactacacagtgaattgaaaaataaggttgaaacattttctgaatcaagaatctttaatgaactgaaaactaaaatgcttaatataaaagaatataaggagaaactcttgagtaccttgggcgagtttctagaagaccattttcctctgcctgatagaagtgttaaaaagaaaaagaaaaacattcaagaatcatctgtaaacctgataacactgcatgaaatgttagagattcttataaatagattatttgatgttccacatgatccatatgtcaaaattagtgattccttttggccaccttatgttgagctgctgctgcgtaatggaattgccttgagacatccagaagatccaacccgaataagattagaagctttccatcagtaaaaggatgttttcttttttcacacagtaaaaattcttatcattcaaggatattggaaccacaggactatttggataaaaaacattatttgcaaattaatgcgcataggccatcttacttttattgcaaaatggcatgtgctgccatctattattcatttttaaatggtcatttcttattcagtgagtgctttagtgttttaaactatatggataagaatgcaggtagataatattctaggcataaaacatttaatgtaccttacctcatgcaatattctttggattctttgttgatttatgatattgctaatataatattttcttaaaatatataacaatatcttttatgcattttgagttccagctggtgcttctttatatttagaaattataatgggaaggtcatttaatttacagatggttttaaaattgaggtaatatctgaggtggcataatttaaaaatatttagcaaatttgtttcatatatactgtcttatttctagatttgtttaaaattggaatatgaaaaactaatggataaagctagcataaaattgatattttagtttgtattattaatatatcatgttaccttatatattaatctactcttgattctgctaattattaccaacaaaattgtattcatgacattttattaatcctctgtgaattttctgtaaataaaattatttctgaaaatctct

SEQ ID NO: 5195 - protein, 269 aa, Homo sapiens; identical to SEQ ID NO: 654

SEQ ID NO: 5196 - DNA, 391 bp, Homo sapiens
ggtacctactctcttattactgaaaacacaccattattttgcctttcaatatgatattaaaatttactgctcaaaacctcttgtattttttaatttaaccatagaatattaccacaaatttagcgcctactgtatatttaccttttcaaatgctttctgctaggctttttcactactgatgtctgaatggaagtatcctggaccactgtgtaaatttgactatcgttcagaaataaaactgggattaaagaccaagcaattaatttgaattattttattctagttccaaaagctgagacaagatcttgaaatggtactgtccactaaggagtcaaagaatgaaaagttaaaggaagacttagaaagggaacaacggtggttggatgaacag

SEQ ID NO: 5197 - protein, 53 aa, Homo sapiens
VPTLLLLKTHHYFAFQYDIKIYCSKPLVFFNLTIEYYHKFSAYCIFTFSNAFC

SEQ ID NO: 5198 - DNA, 582 bp, Homo sapiens
gcagaagtccggggctggcaagcgcttcctgcgcagcgcctaggcgacctggagtttgtgacgctgtgatggtctagaggctggagattcaagatctgggtgccatcattttctggttctgttgatgaccctcttccaggttacatacagcttacatcttgcatcctcaagcgtttttcttataaggctaaaaattcacaaagcatatatcaatgaatcaggaggatctagatccggatagtactacagatgtgggagatgttacaaatactgaagaagaacttattagagaatgtgaagaaatgtggaaagatatggaagaatgtcagaataaattatcacttattggaactgaaacactcaccgattcaaatgctcagctatcattgttaattatgcaagtaaaatgtttaaccgctgaactcagtcaatggcagaaaaaaacacctgaaacaattcccttgactgaagacgttctcataacattaggaaaagaagagattctgcagatgatgattctctcctacaaaccagttgggtgtcctcttaattcacttcagttctgacataatctacttggag

SEQ ID NO: 5199 - protein, 117 aa, Homo sapiens
MNQEDLDPDSTTDVGDVTNTEEELIRECEEMWKDMEECQNKLSLIGTETLTDSNAQLSLLIMQVKCLTAELSQWQKKTPETIPLTEDVLITLGKEEILQMMILSYKPVGCPLNSLQF

SEQ ID NO: 5200 - DNA, 1125 bp, Homo sapiens
ggtctagaggctggagattcaagatctgggtgccatcattttctggttctgttgatgaccctcttccagtttttcttataaggctaaaaattcacaaagcatatatcaatgaatcaggaggatctagatccggatagtactacagatgtgggagatgttacaaatactgaagaagaacttattagagaatgtgaagaaatgtggaaagatatggaagaatgtcagaataaattatcacttattggaactgaaacactcaccgattcaaatgctcagctatcattgttaattatgcaagtaaaatgtttaaccgctgaactcagtcaatggcagaaaaaaacacctgaaaggtctcatcgtgttgtccaggctggagtacagtggcacaatcatggctcattgcagccccgatctcccgggttcaagtgatcctcctacctcagcctcctgagtagctaggactacaagtgtgtgccaccatgcttggttagtggttggtttttgtatttttttgtagagacggggtttcaccatgttacccaggctggtcttgaactcctgggctcaagggatcctcctgccttggcctctcaaagtgcctggattactggcgtgccagtgatttgtttcttaatgaatgcaatttacctagtggaagagaaaagttataatttattttagatacttacacaaaagggacacatagtttgtatgtcttctgtcttgtccagctggtgccaactatgtttttgtcttcagttaggaagtagaagacagcataaaaatttataattgtgatactccactagtacatcttttttttttaaatgtgagagcttaagtttctctatgcaatatacatctatacaggcacatctcattttattgtgcttcactttattgcactttgcagacactctatgtttaacaaattcagtttgtggcgagcctgtgtcacattttggtaatctcacagtattttagacttttaagtcattattacatctggttgggggatctgtgatcagtggtctttgatcttactattttaattgttttgaggaaccacaagctgcacctgtgtaagacagtaaatttaaccaataaatgttgtgtgtattctga

SEQ ID NO: 5201 - protein, 106 aa, Homo sapiens
MNQEDLDPDSTTDVGDVTNTEEELIRECEEMWKDMEECQNKLSLIGTETLTDSNAQLSLLIMQVKCLTAELSQWQKKTPERSHRVVQAGVQWHNHGSLQPRSPGFK

SEQ ID NO: 5202 - DNA, 634 bp, Homo sapiens
gcagcgcctaggcgacctggagtttgtgacgctgtgatggtctagaggctggagattcaagatctgggtgccatcattttctggttctgttgatgaccctcttccaggttacatacagcttacatcttgcatcctcaagcggtagagagcaaactcttaaatgtttctatatgtttttattctactgccacattaaatcgccaagccagataatttgttgaatatttatccctcaccctccgcccccaccacatgtgcagagttttgcattacttttgcatattgataatgtattttggtggtcagtaaagaaatatttatgtttgactttttcgcttaaaaatattctaaaattcatgatgactgattttggctttgtgaacttaaactgtatcttatgggtatagcaggtgagattttcagccttctactagttgacattcaaattgttaatagctaacactgataaagctctttatatgctagctacagtacttatatatatatatttatatactcatttaattgtcataaccctagggagtatttaatattatcttcattttataggaaaggaaactgaggcatagaaagtttaagtgacttgcccaagtctcatagcttttaaatatca

SEQ ID NO: 5203 - protein, 42 aa, Homo sapiens
MTLFQVTYSLHLASSSGREQTLKCFYMFLFYCHIKSPSQIIC

SEQ ID NO: 5204 - DNA, 681 bp, Homo sapiens
gacctggagtttgtgacgctgtgatgatacctgacttcccagccgggctttgagtcccgttcttctcggcttcccgcgcgccaacgcaagctccataacctcaccaatatttagagaaagatggaagggtggggacagaaggaagtggttaactcgcgggtttcctttcagatgcactaaacatgttttctctcctgacctttattctctcacacactctctgaagaaggtggtctagaggctggagattcaagatctgggtgccatcattttctggttctgttgatgaccctcttccaggttacatacagcttacatcttgcatcctcaagcggtagagagcaaactcttaaatgtttctatatgtttttattctactgccacattaaatcgccaagccagataatttgttgaatatttatccctcaccctccgcccccaccacatgtgcagagttttgcattacttttgcatattgataatgtattttggtggtcagtaaagaaatatttatgtttgactttttcgcttaaaaatattctaaaattcatgatgactgattttggctttgtgaacttaaactgtatcttatgggtatagcaggtgagattttcagccttctactagttgacattcaaattgttaatagctaacactgataaagctctttatatgctagct

SEQ ID NO: 5205 - protein, 42 aa, Homo sapiens; identical to SEQ ID NO: 5203

SEQ ID NO: 5206 - DNA, 828 bp, Homo sapiens
gactgcgccgctgctttgggattggtagctgagttttgtgtcgcgccttttctgacgatgcgaacaacatggcggcggaaagtggtagcgattttcagcagagacgtagaaggcgccgggacccggaggaaccggaaaaaacagaactcagcgaaagagagctggcagtagcagtggcggtgtcccaggagaacgatgaggagaacgaagagcgctgggttggacctttacctgtggaggcaacactggccaagaagaggaaagtcttagagtttgaaagagtctatcttgataatctccccagtgcatccatgtatgagcgcagttacatgcatagagatgttatcacccatgtggtatgcaccaagtaagtctatcacatcttttttactttgttctgagtttatttaaaaaaaaaaaaagcttcaattttgaggtagatttatagagataattttaagattttgtagatttttaatttcttaagttctgaaataaaggcctacatgttctttcctatatcgtacaaataatgcattctctaagatagaacccctgagtttatatgtatgtctttggagataaatgccaagaggggagtgaaccaggtagtgtctgagcttccctgaagaagagggtacattagttaagatatgagtaactggtacctggcctctttggcactagtggagaaaatgtgggctaacataccctaggaatagcaaaggaccttcaaaacagatgagtaggttcgtgtagaaggataataatagtacaagttgagcaccccaaatataaaatgctccaaaatccaatagtttttgagtg

SEQ ID NO: 5207 - protein, 100 aa, Homo sapiens
MAAESGSDFQQRRRRRRDPEEPEKTELSERELAVAVAVSQENDEENEERWVGPLPVEATLAKKRKVLEFERVYLDNLPSASMYERSYMHRDVITHVVCTK

SEQ ID NO: 5208 - DNA, 2132 bp, Homo sapiens
gagttttgtgtcgcgccttttctgacgatgcgaacaacatggcggcggaaagtggtagcgattttcagcagagacgtagaaggcgccgggacccggaggaaccggaaaaaacagaactcagcgaaagagagctggcagtagcagtggcggtgtcccaggagaacgatgaggagaacgaagagcgctgggttggacctttacctgtggaggcaacactggccaagaagaggaaagtcttagagtttgaaagagtctatcttgataatctccccagtgcatccatgtatgagcgcagttacatgcatagagatgttatcacccatgtggtatgcaccaaaacagattttattattactgccagtcatgatggacatgtcaagttctggaaaaaaatagaagagggaattgaatttgttaaacattttcgtagtcacctgggagttattgagagtattgcagttagctctgagggagcattgttctgttctgtgggtgatgataaagcaatgaaggtgtttgatgtagtgaactttgacatgatcaacatgctgaaacttggctattttcctggacagtgtgagtggatctattgcccaggggatgcaatttcttcagttgctgcttccgaaaagagtacaggaaaaattttcatttatgatggccgaggagataaccagccacttcatatttttgacaaactccatacatcacctcttactcagatacggctaaacccagtttacaaagcagtagtgtcttctgacaaatctgggatgattgaatactggactgggcctcctcatgaatataaattccccaaaaatgtgaactgggaatataaaactgacactgatttatatgaatttgccaagtgtaaggcttatccaaccagcgtatgtttttcaccagatgggaagaaaatagctactattggttctgatagaaaagttagaattttcagatttgtaactggaaaactcatgagagtctttgatgaatcactaagcatgtttactgaactgcaacagatgaggcaacagttaccagacatggaatttggccgacgaatggctgtagaacgtgagttggagaaggttgatgctgtaagattaattaatatagtttttgatgaaactggacacttcgtgctgtatggaacaatgctgggcattaaagttataaatgtagagacaaaccggtgtgtgcggattttaggcaaacaagaaaatattagagtgatgcaattggctttgttccaggggatagccaaaaagcatcgtgctgcaactactatagaaatgaaagcttctgaaaatcctgttcttcagaatattcaagctgacccaacaatagtctgtacatcattcaaaaagaatagattttatatgtttaccaaacgagaaccagaagatacgaaaagtgcagattctgatcgagatgtttttaatgagaaaccttctaaagaagaagtcatggcagctactcaagctgaaggacctaaacgagtttcggacagtgccattatccacaccagcatgggagacattcacaccaaactttttcctgttgagtgccctaagacagtggaaaacttctgtgttcacagcagaaatggttattataatgggcatacatttcaccgtataattaagggctttatgattcagactggagatccaacaggtactggtatgggaggagaaagcatatggggaggagaatttgaagatgaatttcattcaacattacgacatgacaggccatacacactcagcatggctaacgcgggatcaaatactaatggatcccagtttttcataacggtagtaccaacgccttggcttgataataagcatacagtatttggacgagtgactaaaggaatggaagttgtacagaggatctccaacgtcaaagtcaatcccaaaacagataagccctatgaggatgtcagcatcataaatattactgtcaagtaaaataagatttgttttaatgtacttgcaaataaaaatacaatattaaacagattattttacattaggaagcttaggacttgctgaatatacagatcatgtttcaaagatacagtatttttgtattttttattaaaggctattttttaaaaatta

SEQ ID NO: 5209 - protein, 646 aa, Homo sapiens; identical to SEQ ID NO: 656

SEQ ID NO: 5210 - DNA, 551 bp, Homo sapiens
gccttttctgacgatgcgaacaacatggcggcggaaagtggtagcgattttcagcagagacgtagaaggcgccgggacccggaggaaccggaaaaaacagaactcagcgaaagagagctggcagtagcagtggcggtgtcccaggagaacgatgaggagaacgaagagcgctgggttggacctttacctgtggaggcaacactggccaagaagaggaaagtcttagagtttgaaagagtctatcttgataatctccccagtgcatccatgtatgagcgcagttacatgcatagagatgttatcacccatgtggtatgcaccaaaacagattttattattactgccagtcatgatggacatgtcaagttctggaaaaaaatagaagagggaattgaatttgttaaacattttcgtagtcacctgggagttattgagagtattgcagttagctctgagggagcattgttctgttctgtgggtgatgataaagcaatgaaggtgtttgatgtagtgaactttgacatgatcaacatgctgaaacttggctattt

SEQ ID NO: 5211 - protein, 174 aa, Homo sapiens
MAAESGSDFQQRRRRRRDPEEPEKTELSERELAVAVAVSQENDEENEERWVGPLPVEATLAKKRKVLEFERVYLDNLPSASMYERSYMHRDVITHVVCTKTDFIITASHDGHVKFWKKIEEGIEFVKHFRSHLGVIESIAVSSEGALFCSVGDDKAMKVFDVVNFDMINMLKLG

SEQ ID NO: 5212 - DNA, 412 bp, Homo sapiens
tctgacgatgcgaacaacatggcggcggaaagtggtagcgattttcagcagagacgtagaaggcgccgggacccggaggaaccggaaaaaacagaactcagcgaaagagagctggcagtagcagtggcggtgtcccaggagaacgatgaggagaacgaagagcgctgggttggacctttacctgtggaggcaacactggccaagaagaggaaagtcttagagtttgaaagagtctatcttgataatctccccagtgcatccatgtatgagcgcagttacatgcatagagatgttatcacccatgtggtatgcaccaaaacagattttattattactgccagtcatgatggacatgtcaagttctggagttattgagagtattgcagttagctctgagggagcattgttctgt

SEQ ID NO: 5213 - protein, 118 aa, Homo sapiens
MAAESGSDFQQRRRRRRDPEEPEKTELSERELAVAVAVSQENDEENEERWVGPLPVEATLAKKRKVLEFERVYLDNLPSASMYERSYMHRDVITHVVCTKTDFIITASHDGHVKFWSY

SEQ ID NO: 5214 - DNA, 4458 bp, Homo sapiens
agatgcccgtaccccctcaccgccctcagttcacgccctggctggtttggattcgagaggaaaaatcattaaaggatctggagttttcaccccaaaactttaatcgttttgtcccttctttttttttcttgtctttcctccagcagctgcagactacataatgaaaaataacaaaagtgcccatgcgcgaggctgtgcaactaaccacccgacgattgcggggaggaggagtaagagtcggctaagcggcgcccagtgtcctactgcgcctgtgcgccggtggcgtgcgcagaggcctctgggtaggtggctcaaccccgcctctcagttgaggactctgaaggctgtttctgtggcgcttcccctgcgaggatggctaccctggttgtaaacaagctcggagcgggagtagacagtggccggcagggcagccgggggacagctgtagtgaaggtgctagagtgtggagtttgtgaagatgtcttttctttgcaaggagacaaagttccccgtcttttgctttgtggccataccgtctgtcatgactgtctcactcgcctacctcttcatggaagagcaatccgttgcccatttgatcgacaagtaacagacctaggtgattcaggtgtctggggattgaaaaaaaattttgctttattggagcttttggaacgactgcagaatgggcctattggtcagtatggagctgcagaagaatccattgggatatctggagagagcatcattcgttgtgatgaagatgaagctcaccttgcctctgtatattgcactgtgtgtgcaactcatttgtgctctgagtgttctcaagttactcattctacaaagacattagcaaagcacaggcgagttcctctagctgataaacctcatgagaaaactatgtgctctcagcaccaggtgcatgccattgagtttgtttgcttggaagaaggttgtcaaactagcccactcatgtgctgtgtctgcaaagaatatggaaaacaccagggtcacaagcattcagtattggaaccagaagctaatcagatccgagcatcaattttagatatggctcactgcatacggaccttcacagaggaaatctcagattattccagaaaattagttggaattgtgcagcacattgaaggaggagaacaaatcgtggaagatggaattggaatggctcacacagaacatgtaccagggactgcagagaatgcccggtcatgtattcgagcttatttttatgatctacatgaaactctgtgtcgtcaagaagaaatggctctaagtgttgttgatgctcatgttcgtgaaaaattgatttggctcaggcagcaacaagaagatatgactattttgttgtcagaggtttctgcagcctgcctccactgtgaaaagactttgcagcaggatgattgtagagttgtcttggcaaaacaggaaattacaaggttactggaaacattgcagaaacagcagcagcagtttacagaagttgcagatcacattcagttggatgccagcatccctgtcacttttacaaaggataatcgagttcacattggaccaaaaatggaaattcgggtcgttacgttaggattggatggtgctggaaaaactactatcttgtttaagttaaaacaggatgaattcatgcagcccattccaacaattggttttaacgtggaaactgtagaatataaaaatctaaaattcactatttgggatgtaggtggaaaacacaaattaagaccattgtggaaacattattacctcaatactcaagctgttgtgtttgttgtagatagcagtcatagagacagaattagtgaagcacacagcgaacttgcaaagttgttaacggaaaaagaactccgagatgctctgctcctgatttttgctaacaaacaggatgttgctggagcactgtcagtagaagaaatcactgaactactcagtctccataaattatgctgtggccgtagctggtatattcagggctgtgatgctcgaagtggtatgggactgtatgaagggttggactggctctcacggcaacttgtagctgctggagtattggatgttgcttgattttaaaggcagcagttgtttgaagttttgtggttaaaagtaactttgcacatagtatgttttaagaaattatacatctcaaaagatggtaatttaggatgcatatatatatatatatatataaaggaatcttggattgggaattcagtactttgctttaaaaaaattttgtggcagaattaaatttctaattgagcagattagattgaattaaatagaaacttattgaatatacattcttttaaaaagtatatttgttatttaagtttttcagataatatgtgaccaatatactgggaaagaggtagtcacagagaaagggtaagtgaaggtttattctttcagtgaaaaaagaatagccaattgagtgcctaatgagacctctgtgtgaagcaagtgaagtatagctgcttcttttaacctgccttttcactgaatgttggcagcatttagtagtagaaatgacagttgcttaatgaaatagaatccaaactacatatttggataataggattactttatgtttatgttcagagttaacagaacacctttaatgctaagaactataaggtacagaaaattaatactttatatagtgttttattaactttctcctacagcattttgtataaaacacaatgagggagtgaaatgttacccaattaggcttgtcaggttagtaataaactgaacagtaataaaactgtggaagtaattggatctgaatttatgaaagacccatttccaggactgaacctaggtcagagctctaaattggtccttctatttttcaacaaatttaaagtaatatttctttctaatataatattgcatcctttgtgggaatgactataggtaaaatgtagtaagtaacgcagaaccagggttggctttatttaaaagctagtgacctaaatagaaagcgaacttcaagagaagttgtaagtacagtggcaaatgcttattacttacttcaaactgtttcccaaaataagtgcatttattttgacaataaaacttaaggctgttcatgagaaggccttgaaaagttactctagaggaaaaatgtctaaagaaaaaaaaaattcaaaaagtttacattaattattcagtgttgtgagtaaataaaaatgtgtgctctttactgtttttcatttttaaagaatattattatggaagcacgatttatttaaataggtacattgagacttttttttttttaatgttctgatacattaggatgaagttaaatcttaaatcttattagttgaattgttgtaaggacagtgatgtctggtaacaagatgtgactttttggtagcactgttgtggttcattcttttcaaatctatttttgtttaaaaacaatacaagttttagaaaacaaagcattaaaaaaaaagcctatcagtattatgggcaatatgtaaataaataaatgtaatatttcatcctttatttttcaggtaaaaggtcatgctgttacaggtgtagtttgtgtgcataaataatacttccgaattaaattatttaatatttgactgatttcaataactgtgaaaaataaaaaaggtgttgtattgcttgtgagaacttgaactgtttactagttaattgaagaaaaagtgtaacactaaggtgaacttgcttcccttttcactaattttgctaaactttgtaatgcacattcttagcatataactgaacacagttgaaaaattgtgcctgattataatgtatgtataatggtaggtgtttgtgtgtgattcatttttaaagaaatatttttctcaagctcctattactatttgtggttgtattatttcactaatcattagttaagactgtgctagtcttccctgggaaactaagaagagagcttttttatatacagtatattagaattttcctagtagctgaatttctgtattaggtctaaatattactgtatgttatataaagcaggtatgtcaagtgtatagccgtagtctataattcaggaatgctttataaccatcagaagccattatttgcactacatatatgataagtatagacagcaataaaatgttaagatcatttttaagaagtcccatcattattcttgaaagtctctttcttgaaccatctacctaatattattgctagttgtaaccaatttaagaagtcattatttgtgctgtggttaggagagaaaataaaacaaaatgggtatgggttggcatgcctgtcaaatttgagatgtagtttatttgatacagcaaaattttagaaataacgttttgaatttgcaacataggccacatttactgatgagaacagatactaaacttgatcttaactacacctgatcttagccaa

SEQ ID NO: 5215 - protein, 574 aa, Homo sapiens; identical to SEQ ID NO: 658

SEQ ID NO: 5216 - DNA, 2944 bp, Homo sapiens
agatgcccgtaccccctcaccgccctcagttcacgccctggctggtttggattcgagaggaaaaatcattaaaggatctggagttttcaccccaaaactttaatcgttttgtcccttctttttttttcttgtctttcctccagcagctgcagactacataatgaaaaataacaaaagtgcccatgcgcgaggctgtgcaactaaccacccgacgattgcggggaggaggagtaagagtcggctaagcggcgcccagtgtcctactgcgcctgtgcgccggtggcgtgcgcagaggcctctgggtaggtggctcaaccccgcctctcagttgaggactctgaaggctgtttctgtggcgcttcccctgcgaggatggctaccctggttgtaaacaagctcggagcgggagtagacagtggccggcagggcagccgggggacagctgtagtgaaggtgctagagtgtggagtttgtgaagatgtcttttctttgcaaggagacaaagttccccgtcttttgctttgtggccataccgtctgtcatgactgtctcactcgcctacctcttcatggaagagcaatccgttgcccatttgatcgacaagtaacagacctaggtgattcaggtgtctggggattgaaaaaaaattttgctttattggagcttttggaacgactgcagaatgggcctattggtcagtatggagctgcagaagaatccattgggatatctggagagagcatcattcgttgtgatgaagatgaagctcaccttgcctctgtatattgcactgtgtgtgcaactcatttgtgctctgagtgttctcaagttactcattctacaaagacattagcaaagcacaggcgagttcctctagctgataaacctcatgagaaaactatgtgctctcagcaccaggtgcatgccattgagtttgtttgcttggaagaaggttgtcaaactagcccactcatgtgctgtgtctgcaaagaatatggaaaacaccagggtcacaagcattcagtattggaaccagaagctaatcagatccgagcatcaattttagatatggctcactgcatacggaccttcacagaggaaatctcagattattccagaaaattagttggaattgtgcagcacattgaaggaggagaacaaatcgtggaagatggaattggaatggctcacacagaacatgtaccagggactgcagagaatgcccggtcatgtattcgagcttatttttatgatctacatgaaactctgtgtcgtcaagaagaaatggctctaagtgttgttgatgctcatgttcgtgaaaaattgatttggctcaggcagcaacaagaagatatgactattttgttgtcagaggtttctgcagcctgcctccactgtgaaaagactttgcagcaggatgattgtagagttgtcttggcaaaacaggaaattacaaggttactggaaacattgcagaaacagcagcagcagtttacagaagttgcagatcacattcagttggatgccagcatccctgtcacttttacaaaggataatcgagttcacattggaccaaaaatggaaattcgggtcgttacgttaggattggatggtgctggaaaaactactatcttgtttaagttaaaacaggatgaattcatgcagcccattccaacaattggttttaacgtggaaactgtagaatataaaaatctaaaattcactatttgggatgtaggtggaaaacacaaattaagaccattgtggaaacattattacctcaatactcaagctgttgtgtttgttgtagatagcagtcatagagacagaattagtgaagcacacagcgaacttgcaaagttgttaacggaaaaagaactccgagatgctctgctcctgatttttgctaacaaacaggatgttgctggagcactgtcagtagaagaaatcactgaactactcagtctccataaattatgctgtggccgtagctgtttttcagataatatgtgaccaatatactgggaaagaggtagtcacagagaaagggtaaaaggtcatgctgttacaggtgtagtttgtgtgcataaataatacttccgaattaaattatttaatatttgactgatttcaataactgtgaaaaataaaaaaggtgttgtattgcttgtgagaacttgaactgtttactagttaattgaagaaaaagtgtaacactaaggtgaacttgcttcccttttcactaattttgctaaactttgtaatgcacattcttagcatataactgaacacagttgaaaaattgtgcctgattataatgtatgtataatggtaggtgtttgtgtgtgattcatttttaaagaaatatttttctcaagctcctattactatttgtggttgtattatttcactaatcattagttaagactgtgctagtcttccctgggaaactaagaagagagcttttttatatacagtatattagaattttcctagtagctgaatttctgtattaggtctaaatattactgtatgttatataaagcaggtatgtcaagtgtatagccgtagtctataattcaggaatgctttataaccatcagaagccattatttgcactacatatatgataagtatagacagcaataaaatgttaagatcatttttaagaagtcccatcattattcttgaaagtctctttcttgaaccatctacctaatattattgctagttgtaaccaatttaagaagtcattatttgtgctgtggttaggagagaaaataaaacaaaatgggtatgggttggcatgcctgtcaaatttgagatgtagtttatttgatacagcaaaattttagaaataacgttttgaatttgcaacataggccacatttactgatgagaacagatactaaacttgatcttaactacacctgatcttagccaa

SEQ ID NO: 5217 - protein, 546 aa, Homo sapiens; identical to SEQ ID NO: 662

SEQ ID NO: 5218 - DNA, 4184 bp, Homo sapiens
agatgcccgtaccccctcaccgccctcagttcacgccctggctggtttggattcgagaggaaaaatcattaaaggatctggagttttcaccccaaaactttaatcgttttgtcccttctttttttttcttgtctttcctccagcagctgcagactacataatgaaaaataacaaaagtgcccatgcgcgaggctgtgcaactaaccacccgacgattgcggggaggaggagtaagagtcggctaagcggcgcccagtgtcctactgcgcctgtgcgccggtggcgtgcgcagaggcctctgggtaggtggctcaaccccgcctctcagttgaggactctgaaggctgtttctgtggcgcttcccctgcgaggatggctaccctggttgtaaacaagctcggagcgggagtagacagtggccggcagggcagccgggggacagctgtagtgaaggtgctagagtgtggagtttgtgaagatgtcttttctttgcaaggagacaaagttccccgtcttttgctttgtggccataccgtctgtcatgactgtctcactcgcctacctcttcatggaagagcaatccgttgcccatttgatcgacaagtaacagacctaggtgattcaggtgtctggggattgaaaaaaaattttgctttattggagcttttggaacgactgcagaatgggcctattggtcagtatggagctgcagaagaatccattgggatatctggagagagcatcattcgttgtgatgaagatgaagctcaccttgcctctgtatattgcactgtgtgtgcaactcatttgtgctctgagtgttctcaagttactcattctacaaagacattagcaaagcacaggcgagttcctctagctgataaacctcatgagaaaactatgtgctctcagcaccaggtgcatgccattgagtttgtttgcttggaagaaggttgtcaaactagcccactcatgtgctgtgtctgcaaagaatatggaaaacaccagggtcacaagcattcagtattggaaccagaagctaatcagatccgagcatcaattttagatatggctcactgcatacggaccttcacagaggaaatctcagattattccagaaaattagttggaattgtgcagcacattgaaggaggagaacaaatcgtggaagatggaattggaatggctcacacagaacatgtaccagggactgcagagaatgcccggtcatgtattcgagcttatttttatgatctacatgaaactctgtgtcgtcaagaagaaatggctctaagtgttgttgatgctcatgttcgtgaaaaattgatttggctcaggcagcaacaagaagatatgactattttgttgtcagaggtttctgcagcctgcctccactgtgaaaagactttgcagcaggatgattgtagagttgtcttggcaaaacaggaaattacaaggttactggaaacattgcagaaacagcagcagcagtttacagaagttgcagatcacattcagttggatgccagcatccctgtcacttttacaaaggataatcgagttcacattggaccaaaaatggaaattcgggtcgttacgttaggattggatggtgctggaaaaactactatcttgtttaagttaaaacaggatgaattcatgcagcccattccaacaattggttttaacgtggaaactgtagaatataaaaatctaaaattcactatttgggatgtaggtggaaaacacaaattaagaccattgtggaaacattattacctcaatactcaagctgttgtgtttgttgtagatagcagtcatagagacagaattagtgaagcacacagcgaacttgcaaagttgttaacggaaaaagaactccgagatgctctgctcctgatttttgctaacaaacaggatgttgctggagcactgtcagtagaagaaatcactgaactactcagtctccataaattatgctgtggccgtagctggtatattcagggctgtgatgctcgaagtggtatgggactgtatgaagggttggactggctctcacggcaacttgtagctgctggagtattggatgttgcttgattttaaaggcagcagttgtttgaagttttgtggttaaaagtaactttgcacatagtatgttttaagaaattatacatctcaaaagatggtaatttaggatgcatatatatatatatatatataaaggaatcttggattgggaattcagtactttgctttaaaaaaattttgtggcagaattaaatttctaattgagcagattagattgaattaaatagaaacttattgaatatacattcttttaaaaagtatatttgttatttaagtttttcagataatatgtgaccaatatactgggaaagaggtagtcacagagaaagggtaagtgaaggtttattctttcagtgaaaaaagaatagccaattgagtgcctaatgagacctctgtgtgaagcaagtgaagtatagctgcttcttttaacctgccttttcactgaatgttggcagcatttagtagtagaaatgacagttgcttaatgaaatagaatccaaactacatatttggataataggattactttatgtttatgttcagagttaacagaacacctttaatgctaagaactataaggtacagaaaattaatactttatatagtgttttattaactttctcctacagcattttgtataaaacacaatgagggagtgaaatgttacccaattaggcttgtcaggttagtaataaactgaacagtaataaaactgtggaagtaattggatctgaatttatgaaagacccatttccaggactgaacctaggtcagagctctaaattggtccttctatttttcaacaaatttaaagtaatatttctttctaatataatattgcatcctttgtgggaatgactataggtaaaatgtagtaagtaacgcagaaccagggttggctttatttaaaagctagtgacctaaatagaaagcgaacttcaagagaagttgtaagtacagtggcaaatgcttattacttacttcaaactgtttcccaaaataagtgcatttattttgacaataaaacttaaggctgttcatgagaaggccttgaaaagttactctagaggaaaaatgtctaaagaaaaaaaaaattcaaaaagtttacattaattattcagtgttgtgagtaaataaaaatgtgtgctctttactgtttttcatttttaaagaatattattatggaagcacgatttatttaaataggtacattgagacttttttttttttaatgttctgatacattaggatgaagttaaatcttaaatcttattagttgaattgttgtaaggacagtgatgtctggtaacaagatgtgactttttggtagcactgttgtggttcattcttttcaaatctatttttgtttaaaaacaatacaagttttagaaaacaaagcattaaaaaaaaagcctatcagtattatgggcaatatgtaaataaataaatgtaatatttcatcctttatttttcaggtaaaaggtcatgctgttacaggtgtagtttgtgtgcataaataatacttccgaattaaattatttaatatttgactgatttcaataactgtgaaaaataaaaaaggtgttgtattgcttgtgagaacttgaactgtttactagttaattgaagaaaaagtgtaacactaaggtgaacttgcttcccttttcactaattttgctaaactttgtaatgcacattcttagcatataactgaacacagttgaaaaattgtgcctgattataatgtatgtataatggtaggtgtttgtgtgtgattcatttttaaagaaatatttttctcaagctcctattactatttgtggttgtattatttcactaatcattagttaagactgtgctagtcttccctgggaaactaagaagagagcttttttatatacagtatattagaattttcctagtagctgaatttctgtattaggtctaaatattactgtatgttatataaagcaggtatgtcaagtgtatagccgtagtctataattcaggaatgctttataaccatcagaagccattatttgcactacatatatgataagtatagacagcaataaaatgttaagatcatttttaag

SEQ ID NO: 5219 - protein, 574 aa, Homo sapiens; identical to SEQ ID NO: 658

SEQ ID NO: 5220 - DNA, 2670 bp, Homo sapiens
agatgcccgtaccccctcaccgccctcagttcacgccctggctggtttggattcgagaggaaaaatcattaaaggatctggagttttcaccccaaaactttaatcgttttgtcccttctttttttttcttgtctttcctccagcagctgcagactacataatgaaaaataacaaaagtgcccatgcgcgaggctgtgcaactaaccacccgacgattgcggggaggaggagtaagagtcggctaagcggcgcccagtgtcctactgcgcctgtgcgccggtggcgtgcgcagaggcctctgggtaggtggctcaaccccgcctctcagttgaggactctgaaggctgtttctgtggcgcttcccctgcgaggatggctaccctggttgtaaacaagctcggagcgggagtagacagtggccggcagggcagccgggggacagctgtagtgaaggtgctagagtgtggagtttgtgaagatgtcttttctttgcaaggagacaaagttccccgtcttttgctttgtggccataccgtctgtcatgactgtctcactcgcctacctcttcatggaagagcaatccgttgcccatttgatcgacaagtaacagacctaggtgattcaggtgtctggggattgaaaaaaaattttgctttattggagcttttggaacgactgcagaatgggcctattggtcagtatggagctgcagaagaatccattgggatatctggagagagcatcattcgttgtgatgaagatgaagctcaccttgcctctgtatattgcactgtgtgtgcaactcatttgtgctctgagtgttctcaagttactcattctacaaagacattagcaaagcacaggcgagttcctctagctgataaacctcatgagaaaactatgtgctctcagcaccaggtgcatgccattgagtttgtttgcttggaagaaggttgtcaaactagcccactcatgtgctgtgtctgcaaagaatatggaaaacaccagggtcacaagcattcagtattggaaccagaagctaatcagatccgagcatcaattttagatatggctcactgcatacggaccttcacagaggaaatctcagattattccagaaaattagttggaattgtgcagcacattgaaggaggagaacaaatcgtggaagatggaattggaatggctcacacagaacatgtaccagggactgcagagaatgcccggtcatgtattcgagcttatttttatgatctacatgaaactctgtgtcgtcaagaagaaatggctctaagtgttgttgatgctcatgttcgtgaaaaattgatttggctcaggcagcaacaagaagatatgactattttgttgtcagaggtttctgcagcctgcctccactgtgaaaagactttgcagcaggatgattgtagagttgtcttggcaaaacaggaaattacaaggttactggaaacattgcagaaacagcagcagcagtttacagaagttgcagatcacattcagttggatgccagcatccctgtcacttttacaaaggataatcgagttcacattggaccaaaaatggaaattcgggtcgttacgttaggattggatggtgctggaaaaactactatcttgtttaagttaaaacaggatgaattcatgcagcccattccaacaattggttttaacgtggaaactgtagaatataaaaatctaaaattcactatttgggatgtaggtggaaaacacaaattaagaccattgtggaaacattattacctcaatactcaagctgttgtgtttgttgtagatagcagtcatagagacagaattagtgaagcacacagcgaacttgcaaagttgttaacggaaaaagaactccgagatgctctgctcctgatttttgctaacaaacaggatgttgctggagcactgtcagtagaagaaatcactgaactactcagtctccataaattatgctgtggccgtagctgtttttcagataatatgtgaccaatatactgggaaagaggtagtcacagagaaagggtaaaaggtcatgctgttacaggtgtagtttgtgtgcataaataatacttccgaattaaattatttaatatttgactgatttcaataactgtgaaaaataaaaaaggtgttgtattgcttgtgagaacttgaactgtttactagttaattgaagaaaaagtgtaacactaaggtgaacttgcttcccttttcactaattttgctaaactttgtaatgcacattcttagcatataactgaacacagttgaaaaattgtgcctgattataatgtatgtataatggtaggtgtttgtgtgtgattcatttttaaagaaatatttttctcaagctcctattactatttgtggttgtattatttcactaatcattagttaagactgtgctagtcttccctgggaaactaagaagagagcttttttatatacagtatattagaattttcctagtagctgaatttctgtattaggtctaaatattactgtatgttatataaagcaggtatgtcaagtgtatagccgtagtctataattcaggaatgctttataaccatcagaagccattatttgcactacatatatgataagtatagacagcaataaaatgttaagatcatttttaag

SEQ ID NO: 5221 - protein, 546 aa, Homo sapiens; identical to SEQ ID NO: 662

SEQ ID NO: 5222 - DNA, 858 bp, Homo sapiens
agatgcccgtaccccctcaccgccctcagttcacgccctggctggtttggattcgagaggaaaaatcattaaaggatctggagttttcaccccaaaactttaatcgttttgtcccttctttttttttcttgtctttcctccagcagctgcagactacataatgaaaaataacaaaagtgcccatgcgcgaggctgtgcaactaaccacccgacgattgcggggaggaggagtaagagtcggctaagcggcgcccagtgtcctactgcgcctgtgcgccggtggcgtgcgcagaggcctctgggtaggtggctcaaccccgcctctcagttgaggactctgaaggctgtttctgtggcgcttcccctgcgaggatggctaccctggttgtaaacaagctcggagcgggagtagacagtggccggcagggcagccgggggacagctgtagtgaaggtgctagagtgtggagtttgtgaagatgtcttttctttgcaaggagacaaagttccccgtcttttgctttgtggccataccgtctgtcatgactgtctcactcgcctacctcttcatggaagagcaatccgttgcccatttgatcgacaagtaacagacctaggtgattcaggtgtctggggattgaaaaaaaattttgctttattggagcttttggaacgactgcagaatgggcctattggtcagtatggagctgcagaagaatccattgggatatctggagagagcatcattcgttgtgatgaagatgaagctcaccttgcctctgtatattgcactgtgtgtgcaactcatttgtgctctgagtgttctcaagttactcattctacaaagacattagcaaag

SEQ ID NO: 5223 - protein, 161 aa, Homo sapiens
MATLVVNKLGAGVDSGRQGSRGTAVVKVLECGVCEDVFSLQGDKVPRLLLCGHTVCHDCLTRLPLHGRAIRCPFDRQVTDLGDSGVWGLKKNFALLELLERLQNGPIGQYGAAEESIGISGESIIRCDEDEAHLASVYCTVCATHLCSECSQVTHSTKTLA

SEQ ID NO: 5224 - DNA, 553 bp, Homo sapiens
gatgactacatcataatgggaaggataaggcgttcctcaaaatggatgccataagtaaagggaagctgaagcctgattaacttcgtcagtgccacaggaagaaacaagagacagaaggaaaaagcactttggatgcccgctgtaattcacagagatctccacggtaggagcgggacgtcagcttctgcggctaaaatctcgtgactgaagcagcacagatcagaaagaacgatttaccagcagctgcagactacataatgaaaaataacaaaagtgcccatgcgcgaggctgtgcaactaaccacccgacgattgcggggaggaggagtaagagtcggctaagcggcgcccagtgtcctactgcgcctgtgcgccggtggcgtgcgcagaggcctctgggtaggtggctcaaccccgcctctcagttgaggactctgaaggctgtttctgtggcgcttcccctgcgaggatggctaccctggttgtaaacaagctcggagcgggagtagacagtggccggcagggcagccgggggacagctgtagtgaaggtg

SEQ ID NO: 5225 - protein, 76 aa, Homo sapiens
MKNNKSAHARGCATNHPTIAGRRSKSRLSGAQCPTAPVRRWRAQRPLGRWLNPASQLRTLKAVSVALPLRGWLPWL

SEQ ID NO: 5226 - DNA, 1063 bp, Homo sapiens
aaaaaaaaaactccggcaacgttggcctttgggaggccgcgtattgttacctaggggtggtttcttttcctgcagtcgcgatgtgtgattgcagatggaaaacaaagtattttatgcctacgtttctaagatagaagaaatggacttgttgaaaagaagccagtttgtaaaggacacagtaggagaatttaaggtaccaccaccagagagaggttgagagtgcgtttgacttttggttttgccaaacgcgaggttttccgtttccttccggggcaagttgaacctgtccagcccccgtaggctgtgggtcaaaagtgccggtcaaaatggaagtgaatccccctaaacaggagcacctgctggcgctaaaagtgatgcggctgactaagcctactttattcaccaatatcccagtaacatgtgaagagaaagacttacctggagatctctttaaccagctgatgagagatgatccttcaaccgttaatggtgcagaagttttaatgttgggagaaatgctgactttaccacagaattttgggaatatatttttgggagagaccttttccagttatatcagcgttcataatgatagcaatcaagttgtaaaagacatattagtaaaagctgatcttcagacaagttctcagcgtttaaatctttcagcctccaatgctgcagtggctgaacttaaaccggattgttgtattgatgatgtcatacatcatgaagtcaaagaaattggaacacacatcttggtatgtgctgtgagttatacaactcaggctggagaaaaaatgtatttcagaaaattcttcaaatttcaggttctcaaaccattggatgtgaaaaccaaattttacaatgcagaggtaagtgttgagtgtttaatgggatttcatattaaacattaagatcgtatttgactaaaaatctcttatatacatttctaatactgaagcaaatcgccaacgtgactgtaaattatttgaaaaaatcacaaatttcagttaaaattgaataattttattataggtctcataatctttttcagcttacatgg

SEQ ID NO: 5227 - protein, 195 aa, Homo sapiens
MEVNPPKQEHLLALKVMRLTKPTLFTNIPVTCEEKDLPGDLFNQLMRDDPSTVNGAEVLMLGEMLTLPQNFGNIFLGETFSSYISVHNDSNQVVKDILVKADLQTSSQRLNLSASNAAVAELKPDCCIDDVIHHEVKEIGTHILVCAVSYTTQAGEKMYFRKFFKFQVLKPLDVKTKFYNAEVSVECLMGFHIKH

SEQ ID NO: 5228 - DNA, 907 bp, Homo sapiens
aaaaaaaaaactccggcaacgttggcctttgggaggccgcgtattgttacctaggggtggtttcttttcctgcagtcgcgatgtgtgattgcagatggaaaacaaagtattttatgcctacgtttctaagatagaagaaatggacttgttgaaaagaagccagtttgtaaaggacacagtaggagaatttaaggtaccaccaccagagagaggttgagagtgcgtttgacttttggttttgccaaacgcgaggttttccgtttccttccggggcaagttgaacctgtccagcccccgtaggctgtgggtcaaaagtgccggtcaaaatggaagtgaatccccctaaacaggagcacctgctggcgctaaaagtgatgcggctgactaagcctactttattcaccaatatcccagtaacatgtgaagagaaagacttacctggagatctctttaaccagctgatgagagatgatccttcaaccgttaatggtgcagaagttttaatgttgggagaaatgctgactttaccacagaattttgggaatatatttttgggagagaccttttccagttatatcagcgttcataatgatagcaatcaagttgtaaaagacatattagtaaaagctgatcttcagacaagttctcagcgtttaaatctttcagcctccaatgctgcagtggctgaacttaaaccggattgttgtattgatgatgtcatacatcatgaagtcaaagaaattggaacacacatcttggtatgtgctgtgagttatacaactcaggctggagaaaaaatgtatttcagaaaattcttcaaatttcaggttctcaaaccattggatgtgaaaaccaaattttacaatgcagagactgatgaagtatttctggaagcccagattcagaa

SEQ ID NO: 5229 - protein, 192 aa, Homo sapiens
MEVNPPKQEHLLALKVMRLTKPTLFTNIPVTCEEKDLPGDLFNQLMRDDPSTVNGAEVLMLGEMLTLPQNFGNIFLGETFSSYISVHNDSNQVVKDILVKADLQTSSQRLNLSASNAAVAELKPDCCIDDVIHHEVKEIGTHILVCAVSYTTQAGEKMYFRKFFKFQVLKPLDVKTKFYNAETDEVFLEAQI

SEQ ID NO: 5230 - DNA, 4948 bp, Homo sapiens
aaaaaaaaaactccggcaacgttggcctttgggaggccgcgtattgttacctaggggtggtttcttttcctgcagtcgcgatgtgtgattgcagatggaaaacaaagtattttatgcctacgtttctaagatagaagaaatggacttgttgaaaagaagccagtttgtaaaggacacagtaggagaatttaaggtaccaccaccagagagaggttgagagtgcgtttgacttttggttttgccaaacgcgaggttttccgtttccttccggggcaagttgaacctgtccagcccccgtaggctgtgggtcaaaagtgccggtcaaaatggaagtgaatccccctaaacaggagcacctgctggcgctaaaagtgatgcggctgactaagcctactttattcaccaatatcccagtaacatgtgaagagaaagacttacctggagatctctttaaccagctgatgagagatgatccttcaaccgttaatggtgcagaagttttaatgttgggagaaatgctgactttaccacagaattttgggaatatatttttgggagagaccttttccagttatatcagcgttcataatgatagcaatcaagttgtaaaagacatattagtaaaagctgatcttcagacaagttctcagcgtttaaatctttcagcctccaatgctgcagtggctgaacttaaaccggattgttgtattgatgatgtcatacatcatgaagtcaaagaaattggaacacacatcttggtatgtgctgtgagttatacaactcaggctggagaaaaaatgtatttcagaaaattcttcaaatttcaggttctcaaaccattggatgtgaaaaccaaattttacaatgcagagactgatgaagtatttctggaagcccagattcagaatatgacaacctcacctatgtttatggagaaggtttcactggagccatctattatgtacaatgtaacagaattaaattcagtcagccaagctggagaatgtgtgtctacgtttgggtcaagagcatatttgcaaccaatggatacacgccagtacttatactgcctaaagccaaagaatgaatttgcagaaaaagcaggcatcattaagggagtaacagtaattggaaaattggatatagtatggaaaacaaatctaggtgaaaggggaaggttacagaccagccaacttcaaagaatggtgagtctggaaaaaacttcgctggggttttggtgtgtgaaagacaggtagttagaacaacttaattttttctacatccagcagtaaaaaattggagcactataaaaggcattactactactggagcagaaaagattaatagtgtcactgataggtaggtcgaagactggtgttgccatgaatgaaaaatggtcaaatgttaatttatccttaatacacgtgttctttatcacacagaaattaaaataactgttattaagtgtctctcctttggtaacacatgctcactcttcttctgatttccaaacacattaaggttttctattttgcaatgtcctgaaactcttggacttacttcattcacctactcagttcctaccatttttaagatgttaaaaatctgaggcatctcctcagaaggtgagttctactaaagttatcttataagcattggttgcatattttacctaatttcttctctgagagtagggatagctaccaggcttctttttcttatgcttgtaagaatatacgacaggattctcctccctttatgctgaatattacctgttttgacatattccaaattttacttttctttccactgtttgaggcaataatttttaaaaaatgatgatgatgattcctgggcccacttaaatatagccgttagttatttttctgccatggcctgttccaagccttcgtgttgttataatccatcctcatctgtgcgtcttgtaaaaagtcatgattttcttcctggctcctttcaacatcatccccctctttctttagaaaataactttacctatttagagttacacacatagaagctacagcatctggaaagtgtcccttcaactccctgaaatttctttactgactacttacctgtgagattcatcttaactctactgaacatggaataattatataacaaaaacagtccaggtctgccaggctattccacaggcagtagctgcaaaagaatttaaaatgagagacaagtaaagtgaatcagaagtattttcttagaacatcagcttggaaacccaacagctgttgagtaaatgtgctgctgtggtgccttcattaaaatggaaaggttttgtgatagatatacattaactgtgttgcttgttttcttaggctccaggttatggagatgttaggttgtctttggaggcaataccagataccgtaaaccttgaagaaccttttcatattacctgtaaaataacaaactgcaggtaatgccactgtttgtagatggatgtcctttctacctcacctgcctagaagataattttaaaatctttttgttactatctccttttaagttttcctcttgacatacagccttctctgatgttgatattgagtactgtaaaattcttcatctggtagcagtataattacatatttttaagggcctattgtattatgcatcttctgtattttatttcattcatttgtcacaccctatgaggtaggtattcattgtttatacttccttcaccaaaacatgaactaataggttcttatgtattaatatattatgaattgaagtagcaagattttttgaggcatgcttgtacttgagctgtatcttgagtattaagaaaccaaacattgcttatggatttaatgtaaggggagatcattgattcgaaaactgggttttgacagtaaagagagagcataatctgaactgtcaggaagcaaagagcacagggctttgaaaccagaaaaaaatagaattaagttccagtcctatgccctctgctcctacttgtattaccacttggtttgtattattatttggggtatttttataatattgcagtgatgaatcctagtcctcttagtgtgaatgtataatccttttaattccatatttattctttttggtattagaaagataggaaatatttatccttcaaaattacagaaatacccacttcctctatgaagctacctagactttccaaagcacaggtattcatgccttctccatcatagaaaattttaacttagttttttagtgacactcatatattgtgtatttagtgacactcatatattactgtaagtattagtctctttctcactggactggaattattcaggagaagggacatggccttactcagtgtctgccacatcgtgagctcagtaaacaacaatacagggcaaagaccctgtgcttatagggtgttacagggtgttggggaatttttggttttttttttaagttttttcagcaaatcagtttattgaccagctcacaagtgttatttttttcaaaagttaacttctcttggtgttcactttaacttttggtgattcatacaagttttctaaaaagcacatgtctcttagatctttagtttcctctctatataaatgtcattccctgcccctacacaccagggacatgcacagacacatgcacacaacatatataagtcttactggatttttgtgaaattaacaatattcatgtagtgcatccaccttggtctctggcacatagtagccatctcaaatgcttgttagggagattcaggcatatacaagttaatattataaagtcaatatgtctaaaaaaaataaaatttaaataagcaatttaaaatttggagccaagtataagaataaacagctaaaagccataagtagccgtgaatggtggtaggagactatttttcattatgagccttttggttatttaaagaagaacaatgtgcatactttcattaaaagtttttttaacttatttaagctgaactggtgatatctattataagcagaagtagtcttttcttggtaaataatccagttagcaaacctgaatagtatttatgtcttatgaatcctgccagttgtttcccaagttatggtaaagtaacatagattaggtatcaaaaggactagaccagaatcagttgttttcttcttttcctgtagagtacctaacagaaatagtgagaatatatggcaacaagattagacacaaatgtgtggaagtctcccagaaaaatggtagcaccagatcagcaccaggaggccagtgttgagtaatagaaccagaaggccaacatccagacaggcagattagtctgaggctattttaagtgctagaaggtgtgacttcctttcatcttcctggttctatcttaagtgacataaaaaatgttataatagcttttctctttctggtttttattctcctggatatggagaaaacaagtttactgtcactagtagaaatattgcagtacctctttgtgaaatgaacaagatttattcctattattctgattcctccagcagtgaaaggactatggatctggttttggaaatgtgcaataccaattccatccactggtgtggaatttcaggaagacagctgggaaagctgcatccaagttcttcgctctgtcttgcccttactctgctttcttcagtacagggactgcaaagcatctctggcttaagactaacagacacattcttaaagagaacatatgaatatgatgacatcgcacaagtctgtgtggtatcttctgccattaaagtggaaagctgaaggaaacttccaatgttaggcttttcatttagtttcacagaactgctctttttgttacctttgtaaaatgatgacgtcaacaacgaagtaaatatgttacttaaattttctttcctgtaaaatggttaaaatattaaatatttgtttt

SEQ ID NO: 5231 - protein, 309 aa, Homo sapiens
MEVNPPKQEHLLALKVMRLTKPTLFTNIPVTCEEKDLPGDLFNQLMRDDPSTVNGAEVLMLGEMLTLPQNFGNIFLGETFSSYISVHNDSNQVVKDILVKADLQTSSQRLNLSASNAAVAELKPDCCIDDVIHHEVKEIGTHILVCAVSYTTQAGEKMYFRKFFKFQVLKPLDVKTKFYNAETDEVFLEAQIQNMTTSPMFMEKVSLEPSIMYNVTELNSVSQAGECVSTFGSRAYLQPMDTRQYLYCLKPKNEFAEKAGIIKGVTVIGKLDIVWKTNLGERGRLQTSQLQRMVSLEKTSLGFWCVKDR

SEQ ID NO: 5232 - DNA, 1732 bp, Homo sapiens
aaaaaaaaaactccggcaacgttggcctttgggaggccgcgtattgttacctaggggtggtttcttttcctgcagtcgcgatgtgtgattgcagatggaaaacaaagtattttatgcctacgtttctaagatagaagaaatggacttgttgaaaagaagccagtttgtaaaggacacagtaggagaatttaaggtaccaccaccagagagaggttgagagtgcgtttgacttttggttttgccaaacgcgaggttttccgtttccttccggggcaagttgaacctgtccagcccccgtaggctgtgggtcaaaagtgccggtcaaaatggaagtgaatccccctaaacaggagcacctgctggcgctaaaagtgatgcggctgactaagcctactttattcaccaatatcccagtaacatgtgaagagaaagacttacctggagatctctttaaccagctgatgagagatgatccttcaaccgttaatggtgcagaagttttaatgttgggagaaatgctgactttaccacagaattttgggaatatatttttgggagagaccttttccagttatatcagcgttcataatgatagcaatcaagttgtaaaagacatattagtaaaagctgatcttcagacaagttctcagcgtttaaatctttcagcctccaatgctgcagtggctgaacttaaaccggattgttgtattgatgatgtcatacatcatgaagtcaaagaaattggaacacacatcttggtatgtgctgtgagttatacaactcaggctggagaaaaaatgtatttcagaaaattcttcaaatttcaggttctcaaaccattggatgtgaaaaccaaattttacaatgcagagagtgacctcagttctgtgactgatgaagtatttctggaagcccagattcagaatatgacaacctcacctatgtttatggagaaggtttcactggagccatctattatgtacaatgtaacagaattaaattcagtcagccaagctggagaatgtgtgtctacgtttgggtcaagagcatatttgcaaccaatggatacacgccagtacttatactgcctaaagccaaagaatgaatttgcagaaaaagcaggcatcattaagggagtaacagtaattggaaaattggatatagtatggaaaacaaatctaggtgaaaggggaaggttacagaccagccaacttcaaagaatggctccaggttatggagatgttaggttgtctttggaggcaataccagataccgtaaaccttgaagaaccttttcatattacctgtaaaataacaaactgcagtgaaaggactatggatctggttttggaaatgtgcaataccaattccatccactggtgtggaatttcaggaagacagctgggaaagctgcatccaagttcttcgctctgtcttgcccttactctgctttcttcagtacagggactgcaaagcatctctggcttaagactaacagacacattcttaaagagaacatatgaatatgatgacatcgcacaagtctgtgtggtatcttctgccattaaagtggaaagctgaaggaaacttccaatgttaggcttttcatttagtttcacagaactgctctttttgttacctttgtaaaatgatgacgtcaacaacgaagtaaatatgttacttaaattttctttcctgtaaaatggttaaaatattaaatatttgttttgaag

SEQ ID NO: 5233 - protein, 417 aa, Homo sapiens; identical to SEQ ID NO: 664

SEQ ID NO: 5234 - DNA, 3041 bp, Homo sapiens
aaaaaaaaaactccggcaacgttggcctttgggaggccgcgtattgttacctaggggtggtttcttttcctgcagtcgcgatgtgtgattgcagatggaaaacaaagtattttatgcctacgtttctaagatagaagaaatggacttgttgaaaagaagccagtttgtaaaggacacagtaggagaatttaaggtaccaccaccagagagaggttgagagtgcgtttgacttttggttttgccaaacgcgaggttttccgtttccttccggggcaagttgaacctgtccagcccccgtaggctgtgggtcaaaagtgccggtcaaaatggaagtgaatccccctaaacaggagcacctgctggcgctaaaagtgatgcggctgactaagcctactttattcaccaatatcccagtaacatgtgaagagaaagacttacctggagatctctttaaccagctgatgagagatgatccttcaaccgttaatggtgcagaagttttaatgttgggagaaatgctgactttaccacagaattttgggaatatatttttgggagagaccttttccagttatatcagcgttcataatgatagcaatcaagttgtaaaagacatattagtaaaagctgatcttcagacaagttctcagcgtttaaatctttcagcctccaatgctgcagtggctgaacttaaaccggattgttgtattgatgatgtcatacatcatgaagtcaaagaaattggaacacacatcttggtatgtgctgtgagttatacaactcaggctggagaaaaaatgtatttcagaaaattcttcaaatttcaggttctcaaaccattggatgtgaaaaccaaattttacaatgcagagagtgacctcagttctgtgactgatgaagtatttctggaagcccagattcagaatatgacaacctcacctatgtttatggagaaggtttcactggagccatctattatgtacaatgtaacagaattaaattcagtcagccaagctggagaatgtgtgtctacgtttgggtcaagagcatatttgcaaccaatggatacacgccagtacttatactgcctaaagccaaagaatgaatttgcagaaaaagcaggcatcattaagggagtaacagtaattggaaaattggatatagtatggaaaacaaatctaggtgaaaggggaaggttacagaccagccaacttcaaagaatggctccaggttatggagatgttaggttgtctttggaggcaataccagataccgtaaaccttgaagaaccttttcatattacctgtaaaataacaaactgcagtgaaaggactatggatctggttttggaaatgtgcaataccaattccatccactggtgtggaatttcaggaagacagctgggaaagctgcatccaagttcttcgctctgtcttgcccttactctgctttcttcagtacagggactgcaaagcatctctggcttaagactaacagacacattcttaaagagaacatatgaatatgatgacatcgcacaagtctgtgtggtatcttctgccattaaagtggaaagctgaaggaaacttccaatgttaggcttttcatttagtttcacagaactgctctttttgttacctttgtaaaatgatgacgtcaacaacgaagtaaatatgttacttaaattttctttcctgtaaaatggttaaaatattaaatatttgttttgaagagatctgattttatcttgtaatttatatttgaaatgaacatgtgtatattttctacacctattatttaatttcatttcattttagatgaccattggactttgttctccaaaagctgtgtatctgagaccatttgtccctagcaagttatctagaacacgagtcagcacactttttatgtaaggtacaagatactaaatattttaggctttgcaggccgtaaggtttctgtcacaaatactgaactctgccatcgtacttcaagagcagccagtaggcaaaaaaagtacagtggtgtacacaaaaagaagcagttggactcgggaagctgaggcaggagaatcacttgaaccggggaggcagaggttgcagttaagccgagatcatgctactgcactctagcctgagcgacagagtgagactctgtctcaaaaaaaaagaggcagctgggcagatttggcctgcagggtatagttggctgacctcaatctagaagatagagttgtttcttagaactttgtaatattttggttagaaatatttcagttaactccagttttttcctagctattcggtcagcagaaaaagtttgcttaaaacaaagggggtagtcctcttataacctgatatttgtcaacacagtataagctttctagttgttttcaaaattactgtaatggtttgtgtctgtatttgtatattatacctacaaacatacatatctttcagctactgaacacatcagaattggttttactttttaggttgttgattttttttaattaactattaactaagaataatacttattttctaattataagccaaaaacccctgggtttttttctcattgattaagccacttatttttataaggtatatttaaataattcccatcttctgatatgattttaaactctaaatcatgtgttactgttacaaaactttctctctccatgtaatcacacttagttatgagcaaagcagtgagaaagttgaggtgataaacaactttgcagcattaatgtaacaaaaagtttcagtatttgtcaggaaaacaaaagcttaggctgttaaataaaagctattctattttggtaagttgaaattcaagaatgtatatataatttcttaaatgtaagagtgcattaaatcaaatacaaaaattggtttttcaatgcatcattatttattgccataacaaattgtttggtccaaaatgaaagctatattcagaaggtttgcacctcaaaattgagtaataattaatgaaatgtctgtacaaaataaagtgcaagcagtgtaaaattg

SEQ ID NO: 5235 - protein, 417 aa, Homo sapiens; identical to SEQ ID NO: 664

SEQ ID NO: 5236 - DNA, 3885 bp, Homo sapiens
aaaaaaaaaactccggcaacgttggcctttgggaggccgcgtattgttacctaggggtggtttcttttcctgcagtcgcgatgtgtgattgcagatggaaaacaaagtattttatgcctacgtttctaagatagaagaaatggacttgttgaaaagaagccagtttgtaaaggacacagtaggagaatttaaggtaccaccaccagagagaggttgagagtgcgtttgacttttggttttgccaaacgcgaggttttccgtttccttccggggcaagttgaacctgtccagcccccgtaggctgtgggtcaaaagtgccggtcaaaatggaagtgaatccccctaaacaggagcacctgctggcgctaaaagtgatgcggctgactaagcctactttattcaccaatatcccagtaacatgtgaagagaaagacttacctggagatctctttaaccagctgatgagagatgatccttcaaccgttaatggtgcagaagttttaatgttgggagaaatgctgactttaccacagaattttgggaatatatttttgggagagaccttttccagttatatcagcgttcataatgatagcaatcaagttgtaaaagacatattagtaaaagctgatcttcagacaagttctcagcgtttaaatctttcagcctccaatgctgcagtggctgaacttaaaccggattgttgtattgatgatgtcatacatcatgaagtcaaagaaattggaacacacatcttggtatgtgctgtgagttatacaactcaggctggagaaaaaatgtatttcagaaaattcttcaaatttcaggttctcaaaccattggatgtgaaaaccaaattttacaatgcagagagtgacctcagttctgtgactgatgaagtatttctggaagcccagattcagaatatgacaacctcacctatgtttatggagaaggtttcactggagccatctattatgtacaatgtaacagaattaaattcagtcagccaagctggagaatgtgtgtctacgtttgggtcaagagcatatttgcaaccaatggatacacgccagtacttatactgcctaaagccaaagaatgaatttgcagaaaaagcaggcatcattaagggagtaacagtaattggaaaattggatatagtatggaaaacaaatctaggtgaaaggggaaggttacagaccagccaacttcaaagaatggctccaggttatggagatgttaggttgtctttggaggcaataccagataccgtaaaccttgaagaaccttttcatattacctgtaaaataacaaactgcagtgaaaggactatggatctggttttggaaatgtgcaataccaattccatccactggtgtggaatttcaggaagacagctgggaaagctgcatccaagttcttcgctctgtcttgcccttactctgctttcttcagtacagggactgcaaagcatctctggcttaagactaacagacacattcttaaagagaacatatgaatatgatgacatcgcacaagtctgtgtggtatcttctgccattaaagtggaaagctgaaggaaacttccaatgttaggcttttcatttagtttcacagaactgctctttttgttacctttgtaaaatgatgacgtcaacaacgaagtaaatatgttacttaaattttctttcctgtaaaatggttaaaatattaaatatttgttttgaagagatctgattttatcttgtaatttatatttgaaatgaacatgtgtatattttctacacctattatttaatttcatttcattttagatgaccattggactttgttctccaaaagctgtgtatctgagaccatttgtccctagcaagttatctagaacacgagtcagcacactttttatgtaaggtacaagatactaaatattttaggctttgcaggccgtaaggtttctgtcacaaatactgaactctgccatcgtacttcaagagcagccagtaggcaaaaaaagtacagtggtgtacacaaaaagaagcagttggactcgggaagctgaggcaggagaatcacttgaaccggggaggcagaggttgcagttaagccgagatcatgctactgcactctagcctgagcgacagagtgagactctgtctcaaaaaaaaagaggcagctgggcagatttggcctgcagggtatagttggctgacctcaatctagaagatagagttgtttcttagaactttgtaatattttggttagaaatatttcagttaactccagttttttcctagctattcggtcagcagaaaaagtttgcttaaaacaaagggggtagtcctcttataacctgatatttgtcaacacagtataagctttctagttgttttcaaaattactgtaatggtttgtgtctgtatttgtatattatacctacaaacatacatatctttcagctactgaacacatcagaattggttttactttttaggttgttgattttttttaattaactattaactaagaataatacttattttctaattataagccaaaaacccctgggtttttttctcattgattaagccacttatttttataaggtatatttaaataattcccatcttctgatatgattttaaactctaaatcatgtgttactgttacaaaactttctctctccatgtaatcacacttagttatgagcaaagcagtgagaaagttgaggtgataaacaactttgcagcattaatgtaacaaaaagtttcagtatttgtcaggaaaacaaaagcttaggctgttaaataaaagctattctattttggtaagttgaaattcaagaatgtatatataatttcttaaatgtaagagtgcattaaatcaaatacaaaaattggtttttcaatgcatcattatttattgccataacaaattgtttggtccaaaatgaaagctatattcagaaggtttgcacctcaaaattgagtaataattaatgaaatgtctgtacaaaataaagtgcaagcagtgtaaaattgaagtctgtctttgtttcaaaatgattaagattaaatgatgaaataatattttatagccactgcattggatacttggattgtttttcaagcatcttcttatgactaaatcttctgtttcattctgttttaaatctaaaaagtaaaatgatggtcacttggaatctgctctatattttaattatagtctcttctgtttataaacaataacttacacatatttttcatagttttaagtaaagattaaataatgccatcttagaaaggatctgtttaacctatattataaaagttagatacacaatttggtacattaaatgaaaatgtcatttgcatatatagaacctgttctgttttacacagtatcataatagctacagctactacaagaaatatggttaatggaagtcaaacatttagtacgatgcttaaagagttactttaataatgccctcttatttttctagttagatagcaactatatttcccagacaagcaagaaaatatatggggcattttttataaatttaaaagtagctagcacaatccaaccacgcaactttttttgaaatagcttgcaatgctatgattccaaagtgatcaaggtacttgaagagcaaaaatggcttgaatagaatggaaatgtaggcaagtggacagatagcatctagattgaatttgttacaggtggtatattagcaaagaaatagaaaaatgaaatggaagaaatataccaattcccattatttcatgtaaaaagaatggctaatttaactacagatgttagcacatgaagacattgttttaaagttttttttcttatagtatctttgtctgggtaatactg

SEQ ID NO: 5237 - protein, 417 aa, Homo sapiens; identical to SEQ ID NO: 664

SEQ ID NO: 5238 - DNA, 1580 bp, Homo sapiens
gggaggccgcgtattgttacctaggggtggtttcttttcctgcagtcgcgatgtgtgattgcagatggaaaacaaagtattttatgcctacgtttctaagatagaagaaatggacttgttgaaaagaagccagtttgtaaaggacacagtaggagaatttaaggtaccaccaccagagagaggttgagagtgcgtttgacttttggttttgccaaacgcgaggttttccgtttccttccggggcaagttgaacctgtccagcccccgtaggctgtgggtcaaaagtgccggtcaaaatggaagtgaatccccctaaacaggagcacctgctggcgctaaaaggtcctgtttccctctgatttggcaagagagacaatcttgcaataataaattaacattctagctctgaggagttcaactaagaaattttctcatcactaagagtaactggattactgcagaatgactacagaagtaatattacattatcgaccatgtgagagtgatcccacacaactgccaaaaattgcagaaaaagcaattcaagactttcctactcgtccgctatcaagatttataccttggtttccatatgatgggtccaagcttccactcagacctaaaagatcaccacctgtgatttctgaagaggcagctgaagatgtgaaacagtacttaaccatttcagaacatgatgctaagtcacacagttatgattgcacagtagatctattggagtttcaacctagcttgaaaaagcagcatttaacctggtcacacacactgaaggaacagactaattctggaaatctgggtaaacaatcagaaaagggaaaacagcacaagaggagatcttggagtatttcccttcccagcaataattgtactaaaaacgtttctcctttgtctaaaaaattgcaagatagtttaaaggcactaaatttacactcactttatagagcaagatggacaatagaacacactatttgtaacagccaaactctggaagacatttggacaaaactcaatcaaattattaggcacaatgaacttccatcttgtaatgctacaattcagaggcatttaggccaaatatgggtgttctgtgatattatgtattgtgaatatgtgggaagtcttcttaaaggaagattagctcttactggaaaaattaatttatttgtgcataaatatggtgttatttttagtatgtaatgaattccactgattgtcaaaaagaatattctgaatgaaatgaatatggattgaaatagataaaataatttttacaggttttaaaatttttaatgactttttagaattcctaggcttgtcaattaagtcaagaaattgctgagttctgcttattggcagccttcttttaaatgtgataaattattgtttacactgaatttgaaggtaaaaatgttctgttccttttgttacaaactgtgattgaattagtcatgaattaagttgtatagtttggattttggttaatctctaaaatctaattttactgtatttttttccttacctcaagtgtaattttttaaaaaataaaactcgaaacaattctc

SEQ ID NO: 5239 - protein, 250 aa, Homo sapiens
MTTEVILHYRPCESDPTQLPKIAEKAIQDFPTRPLSRFIPWFPYDGSKLPLRPKRSPPVISEEAAEDVKQYLTISEHDAKSHSYDCTVDLLEFQPSLKKQHLTWSHTLKEQTNSGNLGKQSEKGKQHKRRSWSISLPSNNCTKNVSPLSKKLQDSLKALNLHSLYRARWTIEHTICNSQTLEDIWTKLNQIIRHNELPSCNATIQRHLGQIWVFCDIMYCEYVGSLLKGRLALTGKINLFVHKYGVIFSM

SEQ ID NO: 5240 - DNA, 920 bp, Homo sapiens
gtgtgattgcagatggaaaacaaagtattttatgctgaatattacctgttttgacatattccaaattttacttttctttccactgtttgaggcaataatttttaaaaaatgatgatgatgattcctgggcccacttaaatatagccgttagttatttttctgccatggcctgttccaagccttcgtgttgttataatccatcctcatctgtgcgtcttgtaaaaagtcatgattttcttcctggctcctttcaacatcatccccctctttctttagaaaataactttacctatttagagttacacacatagaagctacagcatctggaaagtgtcccttcaactccctgaaatttctttactgactacttacctgtgagattcatcttaactctactgaacatggaataattatataacaaaaacagtccaggtctgccaggctattccacaggcagtagctgcaaaagaatttaaaatgagagacaagtaaagtgaatcagaagtattttcttagaacatcagcttggaaacccaacagctgttgagtaaatgtgctgctgtggtgccttcattaaaatggaaaggttttgtgatagatatacattaactgtgttgcttgttttcttaggctccaggttatggagatgttaggttgtctttggaggcaataccagataccgtaaaccttgaagaaccttttcatattacctgtaaaataacaaactgcaggtaatgccactgtttgtagatggatgtcctttctacctcacctgcctagaagataattttaaaatctttttgttactatctccttttaagttttcctcttgacatacagccttctctgatgttgatattgagtactgtaaaattcttcatctggtagcagtataattacatatttttaagggcctattg

SEQ ID NO: 5241 - protein, 48 aa, Homo sapiens
MACSKPSCCYNPSSSVRLVKSHDFLPGSFQHHPPLSLENNFTYLELHT

SEQ ID NO: 5242 - DNA, 1436 bp, Homo sapiens
gatgcctgtgttagcgagattgtctcttactgtggaactttgtaatgtttagtgatacagtgatgggacctgtaagcttaacctgagcaaatgatctagactaaaatggagattaaaatggattgttactcgtggagaagagggaaaagaagaaaagcaactaattgtcgtgttctttatctcacaatctcacttcaagtcctgtttccctctgatttggcaagagagacaatcttgcaataataaattaacattctagctctgaggagttcaactaagaaattttctcatcactaagagtaactggattactgcagaatgactacagaagtaatattacattatcgaccatgtgagagtgatcccacacaactgccaaaaattgcagaaaaagcaattcaagactttcctactcgtccgctatcaagatttataccttggtttccatatgatgggtccaagcttccactcagacctaaaagatcaccacctgtgatttctgaagaggcagctgaagatgtgaaacagtacttaaccatttcagaacatgatgctaagtcacacagttatgattgcacagtagatctattggagtttcaacctagcttgaaaaagcagcatttaacctggtcacacacactgaaggaacagactaattctggaaatctgggtaaacaatcagaaaagggaaaacagcacaagaggagatcttggagtatttcccttcccagcaataattgtactaaaaacgtttctcctttgtctaaaaaattgcaagatagtttaaaggcactaaatttacactcactttatagagcaagatggacaatagaacacactatttgtaacagccaaactctggaagacatttggacaaaactcaatcaaattattaggcacaatgaacttccatcttgtaatgctacaattcagaggcatttaggccaaatatgggtgttctgtgatattatgtattgtgaatatgtgggaagtcttcttaaaggaagattagctcttactggaaaaattaatttatttgtgcataaatatggtgttatttttagtatgtaatgaattccactgattgtcaaaaagaatattctgaatgaaatgaatatggattgaaatagataaaataatttttacaggttttaaaatttttaatgactttttagaattcctaggcttgtcaattaagtcaagaaattgctgagttctgcttattggcagccttcttttaaatgtgataaattattgtttacactgaatttgaaggtaaaaatgttctgttccttttgttacaaactgtgattgaattagtcatgaattaagttgtatagtttggattttggttaatctctaaaatctaattttactgtatttttttccttacctcaagtgtaattttttaaaaaataaaactcgaaacaattctc

SEQ ID NO: 5243 - protein, 45 aa, Homo sapiens
MEIKMDCYSWRRGKRRKATNCRVLYLTISLQVLFPSDLARETILQ

SEQ ID NO: 5244 - DNA, 604 bp, Homo sapiens
atagttatcctccatccattgtttgacaaggtatcagttgactaacacttgactttgcccctgttaattatgatagggtgaagatttcttttcttgcattaattgtggtaactttgatttgcaggcatgaactaatcacatttgtggttaatattttttcttcatatagataagatatttttgttgagataaatattttaaatgccaccacaccttggtggatatttttttcatatcctcagactgatgaagtatttctggaagcccagattcagaatatgacaacctcacctatgtttatggagaaggtttcactggagccatctattatgtacaatgtaacagaattaaattcagtcagccaagctggagaatgtgtgtctacgtttgggtcaagagcatatttgcaaccaatggatacacgccagtacttatactgcctaaagccaaagaatgaatttgcagaaaaagcaggcatcattaagggagtaacagtaattggaaaattggatatagtatggaaaacaaatctaggtgaaaggggaaggttacagaccagccaacttcaaagaatggtgagtctggaaaaaacttcgctggggtt

SEQ ID NO: 5245 - protein, 107 aa, Homo sapiens
MTTSPMFMEKVSLEPSIMYNVTELNSVSQAGECVSTFGSRAYLQPMDTRQYLYCLKPKNEFAEKAGIIKGVTVIGKLDIVWKTNLGERGRLQTSQLQRMVSLEKTSL

SEQ ID NO: 5246 - DNA, 2681 bp, Homo sapiens
cttcttctgatttccaaacacattaaggttttctattttgcaatgtcctgaaactcttggacttacttcattcacctactcagttcctaccatttttaagatgttaaaaatctgaggcatctcctcagaaggtgagttctactaaagttatcttataagcattggttgcatattttacctaatttcttctctgagagtagggatagctaccaggcttctttttcttatgcttgtaagaatatacgacaggattctcctccctttatgctgaatattacctgttttgacatattccaaattttacttttctttccactgtttgaggcaataatttttaaaaaatgatgatgatgattcctgggcccacttaaatatagccgttagttatttttctgccatggcctgttccaagccttcgtgttgttataatccatcctcatctgtgcgtcttgtaaaaagtcatgattttcttcctggctcctttcaacatcatccccctctttctttagaaaataactttacctatttagagttacacacatagaagctacagcatctggaaagtgtcccttcaactccctgaaatttctttactgactacttacctgtgagattcatcttaactctactgaacatggaataattatataacaaaaacagtccaggtctgccaggctattccacaggcagtagctgcaaaagaatttaaaatgagagacaagtaaagtgaatcagaagtattttcttagaacatcagcttggaaacccaacagctgttgagtaaatgtgctgctgtggtgccttcattaaaatggaaaggttttgtgatagatatacattaactgtgttgcttgttttcttaggctccaggttatggagatgttaggttgtctttggaggcaataccagataccgtaaaccttgaagaaccttttcatattacctgtaaaataacaaactgcagtgaaaggactatggatctggttttggaaatgtgcaataccaattccatccactggtgtggaatttcaggaagacagctgggaaagctgcatccaagttcttcgctctgtcttgcccttactctgctttcttcagtacagggactgcaaagcatctctggcttaagactaacagacacattcttaaagagaacatatgaatatgatgacatcgcacaagtctgtgtggtatcttctgccattaaagtggaaagctgaaggaaacttccaatgttaggcttttcatttagtttcacagaactgctctttttgttacctttgtaaaatgatgacgtcaacaacgaagtaaatatgttacttaaattttctttcctgtaaaatggttaaaatattaaatatttgttttgaagagatctgattttatcttgtaatttatatttgaaatgaacatgtgtatattttctacacctattatttaatttcatttcattttagatgaccattggactttgttctccaaaagctgtgtatctgagaccatttgtccctagcaagttatctagaacacgagtcagcacactttttatgtaaggtacaagatactaaatattttaggctttgcaggccgtaaggtttctgtcacaaatactgaactctgccatcgtacttcaagagcagccagtaggcaaaaaaagtacagtggtgtacacaaaaagaagcagttggactcgggaagctgaggcaggagaatcacttgaaccggggaggcagaggttgcagttaagccgagatcatgctactgcactctagcctgagcgacagagtgagactctgtctcaaaaaaaaagaggcagctgggcagatttggcctgcagggtatagttggctgacctcaatctagaagatagagttgtttcttagaactttgtaatattttggttagaaatatttcagttaactccagttttttcctagctattcggtcagcagaaaaagtttgcttaaaacaaagggggtagtcctcttataacctgatatttgtcaacacagtataagctttctagttgttttcaaaattactgtaatggtttgtgtctgtatttgtatattatacctacaaacatacatatctttcagctactgaacacatcagaattggttttactttttaggttgttgattttttttaattaactattaactaagaataatacttattttctaattataagccaaaaacccctgggtttttttctcattgattaagccacttatttttataaggtatatttaaataattcccatcttctgatatgattttaaactctaaatcatgtgttactgttacaaaactttctctctccatgtaatcacacttagttatgagcaaagcagtgagaaagttgaggtgataaacaactttgcagcattaatgtaacaaaaagtttcagtatttgtcaggaaaacaaaagcttaggctgttaaataaaagctattctattttggtaagttgaaattcaagaatgtatatataatttcttaaatgtaagagtgcattaaatcaaatacaaaaattggtttttcaatgcatcattatttattgccataacaaattgtttggtccaaaatgaaagctatattcagaaggtttgcacctcaaaattgagtaataattaatgaaatgtctgtacaaaataaagtgcaagcagtgtaaaattg

SEQ ID NO: 5247 - protein, 81 aa, Homo sapiens [sequence omitted]

SEQ ID NO: 5248 - DNA, 3525 bp, Homo sapiens
cttcttctgatttccaaacacattaaggttttctattttgcaatgtcctgaaactcttggacttacttcattcacctactcagttcctaccatttttaagatgttaaaaatctgaggcatctcctcagaaggtgagttctactaaagttatcttataagcattggttgcatattttacctaatttcttctctgagagtagggatagctaccaggcttctttttcttatgcttgtaagaatatacgacaggattctcctccctttatgctgaatattacctgttttgacatattccaaattttacttttctttccactgtttgaggcaataatttttaaaaaatgatgatgatgattcctgggcccacttaaatatagccgttagttatttttctgccatggcctgttccaagccttcgtgttgttataatccatcctcatctgtgcgtcttgtaaaaagtcatgattttcttcctggctcctttcaacatcatccccctctttctttagaaaataactttacctatttagagttacacacatagaagctacagcatctggaaagtgtcccttcaactccctgaaatttctttactgactacttacctgtgagattcatcttaactctactgaacatggaataattatataacaaaaacagtccaggtctgccaggctattccacaggcagtagctgcaaaagaatttaaaatgagagacaagtaaagtgaatcagaagtattttcttagaacatcagcttggaaacccaacagctgttgagtaaatgtgctgctgtggtgccttcattaaaatggaaaggttttgtgatagatatacattaactgtgttgcttgttttcttaggctccaggttatggagatgttaggttgtctttggaggcaataccagataccgtaaaccttgaagaaccttttcatattacctgtaaaataacaaactgcagtgaaaggactatggatctggttttggaaatgtgcaataccaattccatccactggtgtggaatttcaggaagacagctgggaaagctgcatccaagttcttcgctctgtcttgcccttactctgctttcttcagtacagggactgcaaagcatctctggcttaagactaacagacacattcttaaagagaacatatgaatatgatgacatcgcacaagtctgtgtggtatcttctgccattaaagtggaaagctgaaggaaacttccaatgttaggcttttcatttagtttcacagaactgctctttttgttacctttgtaaaatgatgacgtcaacaacgaagtaaatatgttacttaaattttctttcctgtaaaatggttaaaatattaaatatttgttttgaagagatctgattttatcttgtaatttatatttgaaatgaacatgtgtatattttctacacctattatttaatttcatttcattttagatgaccattggactttgttctccaaaagctgtgtatctgagaccatttgtccctagcaagttatctagaacacgagtcagcacactttttatgtaaggtacaagatactaaatattttaggctttgcaggccgtaaggtttctgtcacaaatactgaactctgccatcgtacttcaagagcagccagtaggcaaaaaaagtacagtggtgtacacaaaaagaagcagttggactcgggaagctgaggcaggagaatcacttgaaccggggaggcagaggttgcagttaagccgagatcatgctactgcactctagcctgagcgacagagtgagactctgtctcaaaaaaaaagaggcagctgggcagatttggcctgcagggtatagttggctgacctcaatctagaagatagagttgtttcttagaactttgtaatattttggttagaaatatttcagttaactccagttttttcctagctattcggtcagcagaaaaagtttgcttaaaacaaagggggtagtcctcttataacctgatatttgtcaacacagtataagctttctagttgttttcaaaattactgtaatggtttgtgtctgtatttgtatattatacctacaaacatacatatctttcagctactgaacacatcagaattggttttactttttaggttgttgattttttttaattaactattaactaagaataatacttattttctaattataagccaaaaacccctgggtttttttctcattgattaagccacttatttttataaggtatatttaaataattcccatcttctgatatgattttaaactctaaatcatgtgttactgttacaaaactttctctctccatgtaatcacacttagttatgagcaaagcagtgagaaagttgaggtgataaacaactttgcagcattaatgtaacaaaaagtttcagtatttgtcaggaaaacaaaagcttaggctgttaaataaaagctattctattttggtaagttgaaattcaagaatgtatatataatttcttaaatgtaagagtgcattaaatcaaatacaaaaattggtttttcaatgcatcattatttattgccataacaaattgtttggtccaaaatgaaagctatattcagaaggtttgcacctcaaaattgagtaataattaatgaaatgtctgtacaaaataaagtgcaagcagtgtaaaattgaagtctgtctttgtttcaaaatgattaagattaaatgatgaaataatattttatagccactgcattggatacttggattgtttttcaagcatcttcttatgactaaatcttctgtttcattctgttttaaatctaaaaagtaaaatgatggtcacttggaatctgctctatattttaattatagtctcttctgtttataaacaataacttacacatatttttcatagttttaagtaaagattaaataatgccatcttagaaaggatctgtttaacctatattataaaagttagatacacaatttggtacattaaatgaaaatgtcatttgcatatatagaacctgttctgttttacacagtatcataatagctacagctactacaagaaatatggttaatggaagtcaaacatttagtacgatgcttaaagagttactttaataatgccctcttatttttctagttagatagcaactatatttcccagacaagcaagaaaatatatggggcattttttataaatttaaaagtagctagcacaatccaaccacgcaactttttttgaaatagcttgcaatgctatgattccaaagtgatcaaggtacttgaagagcaaaaatggcttgaatagaatggaaatgtaggcaagtggacagatagcatctagattgaatttgttacaggtggtatattagcaaagaaatagaaaaatgaaatggaagaaatataccaattcccattatttcatgtaaaaagaatggctaatttaactacagatgttagcacatgaagacattgttttaaagttttttttcttatagtatctttgtctgggtaatactg

SEQ ID NO: 5249 - protein, 81 aa, Homo sapiens [sequence omitted]

SEQ ID NO: 5250 - DNA, 1776 bp, Homo sapiens
ccagataccgtaaaccttgaagaaccttttcatattacctgtaaaataacaaactgcagtgaaaggactatggatctggttttggaaatgtgcaataccaattccatccactggtgtggaatttcaggaagacagctgggaaagctgcatccaagttcttcgctctgtcttgcccttactctgctttcttcagtacagggactgcaaagcatctctggcttaagactaacagacacattcttaaagagaacatatgaatatgatgacatcgcacaagtctgtgtggtatcttctgccattaaagtggaaagctgaaggaaacttccaatgttaggcttttcatttagtttcacagaactgctctttttgttacctttgtaaaatgatgacgtcaacaacgaagtaaatatgttacttaaattttctttcctgtaaaatggttaaaatattaaatatttgttttgaagagatctgattttatcttgtaatttatatttgaaatgaacatgtgtatattttctacacctattatttaatttcatttcattttagatgaccattggactttgttctccaaaagctgtgtatctgagaccatttgtccctagcaagttatctagaacacgagtcagcacactttttatgtaaggtacaagatactaaatattttaggctttgcaggccgtaaggtttctgtcacaaatactgaactctgccatcgtacttcaagagcagccagtaggcaaaaaaagtacagtggtgtacacaaaaagaagcagttggactcgggaagctgaggcaggagaatcacttgaaccggggaggcagaggttgcagttaagccgagatcatgctactgcactctagcctgagcgacagagtgagactctgtctcaaaaaaaaagaggcagctgggcagatttggcctgcagggtatagttggctgacctcaatctagaagatagagttgtttcttagaactttgtaatattttggttagaaatatttcagttaactccagttttttcctagctattcggtcagcagaaaaagtttgcttaaaacaaagggggtagtcctcttataacctgatatttgtcaacacagtataagctttctagttgttttcaaaattactgtaatggtttgtgtctgtatttgtatattatacctacaaacatacatatctttcagctactgaacacatcagaattggttttactttttaggttgttgattttttttaattaactattaactaagaataatacttattttctaattataagccaaaaacccctgggtttttttctcattgattaagccacttatttttataaggtatatttaaataattcccatcttctgatatgattttaaactctaaatcatgtgttactgttacaaaactttctctctccatgtaatcacacttagttatgagcaaagcagtgagaaagttgaggtgataaacaactttgcagcattaatgtaacaaaaagtttcagtatttgtcaggaaaacaaaagcttaggctgttaaataaaagctattctattttggtaagttgaaattcaagaatgtatatataatttcttaaatgtaagagtgcattaaatcaaatacaaaaattggtttttcaatgcatcattatttattgccataacaaattgtttggtccaaaatgaaagctatattcagaaggtttgcacctcaaaattgagtaataattaatgaaatgtctgtacaaaataaagtgcaagcagtgtaaaattg

SEQ ID NO: 5251 - protein, 81 aa, Homo sapiens [sequence omitted]

SEQ ID NO: 5252 - DNA, 2620 bp, Homo sapiens
ccagataccgtaaaccttgaagaaccttttcatattacctgtaaaataacaaactgcagtgaaaggactatggatctggttttggaaatgtgcaataccaattccatccactggtgtggaatttcaggaagacagctgggaaagctgcatccaagttcttcgctctgtcttgcccttactctgctttcttcagtacagggactgcaaagcatctctggcttaagactaacagacacattcttaaagagaacatatgaatatgatgacatcgcacaagtctgtgtggtatcttctgccattaaagtggaaagctgaaggaaacttccaatgttaggcttttcatttagtttcacagaactgctctttttgttacctttgtaaaatgatgacgtcaacaacgaagtaaatatgttacttaaattttctttcctgtaaaatggttaaaatattaaatatttgttttgaagagatctgattttatcttgtaatttatatttgaaatgaacatgtgtatattttctacacctattatttaatttcatttcattttagatgaccattggactttgttctccaaaagctgtgtatctgagaccatttgtccctagcaagttatctagaacacgagtcagcacactttttatgtaaggtacaagatactaaatattttaggctttgcaggccgtaaggtttctgtcacaaatactgaactctgccatcgtacttcaagagcagccagtaggcaaaaaaagtacagtggtgtacacaaaaagaagcagttggactcgggaagctgaggcaggagaatcacttgaaccggggaggcagaggttgcagttaagccgagatcatgctactgcactctagcctgagcgacagagtgagactctgtctcaaaaaaaaagaggcagctgggcagatttggcctgcagggtatagttggctgacctcaatctagaagatagagttgtttcttagaactttgtaatattttggttagaaatatttcagttaactccagttttttcctagctattcggtcagcagaaaaagtttgcttaaaacaaagggggtagtcctcttataacctgatatttgtcaacacagtataagctttctagttgttttcaaaattactgtaatggtttgtgtctgtatttgtatattatacctacaaacatacatatctttcagctactgaacacatcagaattggttttactttttaggttgttgattttttttaattaactattaactaagaataatacttattttctaattataagccaaaaacccctgggtttttttctcattgattaagccacttatttttataaggtatatttaaataattcccatcttctgatatgattttaaactctaaatcatgtgttactgttacaaaactttctctctccatgtaatcacacttagttatgagcaaagcagtgagaaagttgaggtgataaacaactttgcagcattaatgtaacaaaaagtttcagtatttgtcaggaaaacaaaagcttaggctgttaaataaaagctattctattttggtaagttgaaattcaagaatgtatatataatttcttaaatgtaagagtgcattaaatcaaatacaaaaattggtttttcaatgcatcattatttattgccataacaaattgtttggtccaaaatgaaagctatattcagaaggtttgcacctcaaaattgagtaataattaatgaaatgtctgtacaaaataaagtgcaagcagtgtaaaattgaagtctgtctttgtttcaaaatgattaagattaaatgatgaaataatattttatagccactgcattggatacttggattgtttttcaagcatcttcttatgactaaatcttctgtttcattctgttttaaatctaaaaagtaaaatgatggtcacttggaatctgctctatattttaattatagtctcttctgtttataaacaataacttacacatatttttcatagttttaagtaaagattaaataatgccatcttagaaaggatctgtttaacctatattataaaagttagatacacaatttggtacattaaatgaaaatgtcatttgcatatatagaacctgttctgttttacacagtatcataatagctacagctactacaagaaatatggttaatggaagtcaaacatttagtacgatgcttaaagagttactttaataatgccctcttatttttctagttagatagcaactatatttcccagacaagcaagaaaatatatggggcattttttataaatttaaaagtagctagcacaatccaaccacgcaactttttttgaaatagcttgcaatgctatgattccaaagtgatcaaggtacttgaagagcaaaaatggcttgaatagaatggaaatgtaggcaagtggacagatagcatctagattgaatttgttacaggtggtatattagcaaagaaatagaaaaatgaaatggaagaaatataccaattcccattatttcatgtaaaaagaatggctaatttaactacagatgttagcacatgaagacattgttttaaagttttttttcttatagtatctttgtctgggtaatactg

SEQ ID NO: 5253 - protein, 81 aa, Homo sapiens [sequence omitted]

SEQ ID NO: 5254 - DNA, 3144 bp, Homo sapiens
ggtattagaaagataggaaatatttatccttcaaaattacagaaatacccacttcctctatgaagctacctagactttccaaagcacaggtattcatgccttctccatcatagaaaattttaacttagttttttagtgacactcatatattgtgtatttagtgacactcatatattactgtaagtattagtctctttctcactggactggaattattcaggagaagggacatggccttactcagtgtctgccacatcgtgagctcagtaaacaacaatacagggcaaagaccctgtgcttatagggtgttacagggtgttggggaatttttggttttttttttaagttttttcagcaaatcagtttattgaccagctcacaagtgttatttttttcaaaagttaacttctcttggtgttcactttaacttttggtgattcatacaagttttctaaaaagcacatgtctcttagatctttagtttcctctctatataaatgtcattccctgcccctacacaccagggacatgcacagacacatgcacacaacatatataagtcttactggatttttgtgaaattaacaatattcatgtagtgcatccaccttggtctctggcacatagtagccatctcaaatgcttgttagggagattcaggcatatacaagttaatattataaagtcaatatgtctaaaaaaaataaaatttaaataagcaatttaaaatttggagccaagtataagaataaacagctaaaagccataagtagccgtgaatggtggtaggagactatttttcattatgagccttttggttatttaaagaagaacaatgtgcatactttcattaaaagtttttttaacttatttaagctgaactggtgatatctattataagcagaagtagtcttttcttggtaaataatccagttagcaaacctgaatagtatttatgtcttatgaatcctgccagttgtttcccaagttatggtaaagtaacatagattaggtatcaaaaggactagaccagaatcagttgttttcttcttttcctgtagagtacctaacagaaatagtgagaatatatggcaacaagattagacacaaatgtgtggaagtctcccagaaaaatggtagcaccagatcagcaccaggaggccagtgttgagtaatagaaccagaaggccaacatccagacaggcagattagtctgaggctattttaagtgctagaaggtgtgacttcctttcatcttcctggttctatcttaagtgacataaaaaatgttataatagcttttctctttctggtttttattctcctggatatggagaaaacaagtttactgtcactagtagaaatattgcagtacctctttgtgaaatgaacaagatttattcctattattctgattcctccagcagtgaaaggactatggatctggttttggaaatgtgcaataccaattccatccactggtgtggaatttcaggaagacagctgggaaagctgcatccaagttcttcgctctgtcttgcccttactctgctttcttcagtacagggactgcaaagcatctctggcttaagactaacagacacattcttaaagagaacatatgaatatgatgacatcgcacaagtctgtgtggtatcttctgccattaaagtggaaagctgaaggaaacttccaatgttaggcttttcatttagtttcacagaactgctctttttgttacctttgtaaaatgatgacgtcaacaacgaagtaaatatgttacttaaattttctttcctgtaaaatggttaaaatattaaatatttgttttgaagagatctgattttatcttgtaatttatatttgaaatgaacatgtgtatattttctacacctattatttaatttcatttcattttagatgaccattggactttgttctccaaaagctgtgtatctgagaccatttgtccctagcaagttatctagaacacgagtcagcacactttttatgtaaggtacaagatactaaatattttaggctttgcaggccgtaaggtttctgtcacaaatactgaactctgccatcgtacttcaagagcagccagtaggcaaaaaaagtacagtggtgtacacaaaaagaagcagttggactcgggaagctgaggcaggagaatcacttgaaccggggaggcagaggttgcagttaagccgagatcatgctactgcactctagcctgagcgacagagtgagactctgtctcaaaaaaaaagaggcagctgggcagatttggcctgcagggtatagttggctgacctcaatctagaagatagagttgtttcttagaactttgtaatattttggttagaaatatttcagttaactccagttttttcctagctattcggtcagcagaaaaagtttgcttaaaacaaagggggtagtcctcttataacctgatatttgtcaacacagtataagctttctagttgttttcaaaattactgtaatggtttgtgtctgtatttgtatattatacctacaaacatacatatctttcagctactgaacacatcagaattggttttactttttaggttgttgattttttttaattaactattaactaagaataatacttattttctaattataagccaaaaacccctgggtttttttctcattgattaagccacttatttttataaggtatatttaaataattcccatcttctgatatgattttaaactctaaatcatgtgttactgttacaaaactttctctctccatgtaatcacacttagttatgagcaaagcagtgagaaagttgaggtgataaacaactttgcagcattaatgtaacaaaaagtttcagtatttgtcaggaaaacaaaagcttaggctgttaaataaaagctattctattttggtaagttgaaattcaagaatgtatatataatttcttaaatgtaagagtgcattaaatcaaatacaaaaattggtttttcaatgcatcattatttattgccataacaaattgtttggtccaaaatgaaagctatattcagaaggtttgcacctcaaaattgagtaataattaatgaaatgtctgtacaaaataaagtgcaagcagtgtaaaattg

SEQ ID NO: 5255 - protein, 98 aa, Homo sapiens
MNKIYSYYSDSSSSERTMDLVLEMCNTNSIHWCGISGRQLGKLHPSSSLCLALTLLSSVQGLQSISGLRLTDTFLKRTYEYDDIAQVCVVSSAIKVES

SEQ ID NO: 5256 - DNA, 2679 bp, Homo sapiens
ctggtttttattctcctggatatggagaaaacaagtttactgtcactagtagaaatattgcagtacctctttgtgaaatgaacaagatttattcctattattctgattcctccagcagtgaaaggactatggatctggttttggaaatgtgcaataccaattccatccactggtgtggaatttcaggaagacagctgggaaagctgcatccaagttcttcgctctgtcttgcccttactctgctttcttcagtacagggactgcaaagcatctctggcttaagactaacagacacattcttaaagagaacatatgaatatgatgacatcgcacaagtctgtgtggtatcttctgccattaaagtggaaagctgaaggaaacttccaatgttaggcttttcatttagtttcacagaactgctctttttgttacctttgtaaaatgatgacgtcaacaacgaagtaaatatgttacttaaattttctttcctgtaaaatggttaaaatattaaatatttgttttgaagagatctgattttatcttgtaatttatatttgaaatgaacatgtgtatattttctacacctattatttaatttcatttcattttagatgaccattggactttgttctccaaaagctgtgtatctgagaccatttgtccctagcaagttatctagaacacgagtcagcacactttttatgtaaggtacaagatactaaatattttaggctttgcaggccgtaaggtttctgtcacaaatactgaactctgccatcgtacttcaagagcagccagtaggcaaaaaaagtacagtggtgtacacaaaaagaagcagttggactcgggaagctgaggcaggagaatcacttgaaccggggaggcagaggttgcagttaagccgagatcatgctactgcactctagcctgagcgacagagtgagactctgtctcaaaaaaaaagaggcagctgggcagatttggcctgcagggtatagttggctgacctcaatctagaagatagagttgtttcttagaactttgtaatattttggttagaaatatttcagttaactccagttttttcctagctattcggtcagcagaaaaagtttgcttaaaacaaagggggtagtcctcttataacctgatatttgtcaacacagtataagctttctagttgttttcaaaattactgtaatggtttgtgtctgtatttgtatattatacctacaaacatacatatctttcagctactgaacacatcagaattggttttactttttaggttgttgattttttttaattaactattaactaagaataatacttattttctaattataagccaaaaacccctgggtttttttctcattgattaagccacttatttttataaggtatatttaaataattcccatcttctgatatgattttaaactctaaatcatgtgttactgttacaaaactttctctctccatgtaatcacacttagttatgagcaaagcagtgagaaagttgaggtgataaacaactttgcagcattaatgtaacaaaaagtttcagtatttgtcaggaaaacaaaagcttaggctgttaaataaaagctattctattttggtaagttgaaattcaagaatgtatatataatttcttaaatgtaagagtgcattaaatcaaatacaaaaattggtttttcaatgcatcattatttattgccataacaaattgtttggtccaaaatgaaagctatattcagaaggtttgcacctcaaaattgagtaataattaatgaaatgtctgtacaaaataaagtgcaagcagtgtaaaattgaagtctgtctttgtttcaaaatgattaagattaaatgatgaaataatattttatagccactgcattggatacttggattgtttttcaagcatcttcttatgactaaatcttctgtttcattctgttttaaatctaaaaagtaaaatgatggtcacttggaatctgctctatattttaattatagtctcttctgtttataaacaataacttacacatatttttcatagttttaagtaaagattaaataatgccatcttagaaaggatctgtttaacctatattataaaagttagatacacaatttggtacattaaatgaaaatgtcatttgcatatatagaacctgttctgttttacacagtatcataatagctacagctactacaagaaatatggttaatggaagtcaaacatttagtacgatgcttaaagagttactttaataatgccctcttatttttctagttagatagcaactatatttcccagacaagcaagaaaatatatggggcattttttataaatttaaaagtagctagcacaatccaaccacgcaactttttttgaaatagcttgcaatgctatgattccaaagtgatcaaggtacttgaagagcaaaaatggcttgaatagaatggaaatgtaggcaagtggacagatagcatctagattgaatttgttacaggtggtatattagcaaagaaatagaaaaatgaaatggaagaaatataccaattcccattatttcatgtaaaaagaatggctaatttaactacagatgttagcacatgaagacattgttttaaagttttttttcttatagtatctttgtctgggtaatactg

SEQ ID NO: 5257 - protein, 98 aa, Homo sapiens; identical to SEQ ID NO: 5255

SEQ ID NO: 5258 - DNA, 2570 bp, Homo sapiens
aagagctgttagaaagtagcacttgatgcaagggatgttttgaaaagaaaaaattggtaatgcgaatgtatagaaagtaaaggtaggatgctcaggttttctgcatagttcttaactaatcttgtctgcagtttggtattgataatattagcatggccacttatgctaaatacacaataagatacatttagaaatccttaatgtactggttaggtcagtggtacaactgtttgacttaattatcacaatttccccaatggtaaccttaccttggaaactatcaaatataaatatactttaactaagccagtgacctggtcctaagttaaggattttctaaatggtatttaattgtgtgcccataaacactgattttttttaaaaagaaaacttagtaattatttgatggataacaaaaagcatctatcactaacattgcttgttcatgtaatcttctgtgataatttggcttggcatgccagtcttataattaacataatttaaatttgatgcaatttaaatataacaggagacttaaaatattttattataaattagatgccatattagttagtggagaaaaggggcattaggtattaattgcatgggtctaactacattgatgatgagagtttaattccaactagagtatattttttgtttattaataatgaaattggtgctgacatgtaatgacttcacaagttttacgagggaaaactgaaaaaggaagtaatataaattttgtgggggagactaagagactaattattttgtatcttgaagtttaaaatccaacttttctctttctcctttgtgacattagaaaggttagaggtttctcagacctgcaaacacctaagcacctgggccaaacaaagctacaacgaagatctgtatgaagatatatagttctgcagaatttaaaaagagcacaatttaagtcttcggccctcagaagttaaattcatattccatctaagccaactttgattttcattaagttagaatgaactcctagtattccagtattacacagaacgaagtactactactaacacatagaagtcattactgtgatataaaaagcaaaatagatccttaattaaaaattagtcactcatattcagtgttgaataagaagttaaagtttctagcataactatcttgagtgcattaaaaatgctttttgctaacatctgtagttaaattagccattctttttacatgaaataatgggaattggtatatttcttccatttcatttttctatttctttgctaatataccacctgtaacaaattcaatctagatgctatctgtccacttgcctacatttccattctattcaagccatttttgctcttcaagtaccttgatcactttggaatcatagcattgcaagctatttcaaaaaaagttgcgtggttggattgtgctagctacttttaaatttataaaaaatgccccatatattttcttgcttgtctgggaaatatagttgctatctaactagaaaaataagagggcattattaaagtaactctttaagcatcgtactaaatgtttgacttccattaaccatatttcttgtagtagctgtagctattatgatactgtgtaaaacagaacaggttctatatatgcaaatgacattttcatttaatgtaccaaattgtgtatctaacttttataatataggttaaacagatcctttctaagatggcattatttaatctttacttaaaactatgaaaaatatgtgtaagttattgtttataaacagaagagactataattaaaatatagagcagattccaagtgaccatcattttactttttagatttaaaacagaatgaaacagaagatttagtcataagaagatgcttgaaaaacaatccaagtatccaatgcagtggctataaaatattatttcatcatttaatcttaatcattttgaaacaaagacagacttcaattttacactgcttgcactttattttgtacagacatttcattaattattactcaattttgaggtgcaaaccttctgaatatagctttcattttggaccaaacaatttgttatggcaataaataatgatgcattgaaaaaccaatttttgtatttgatttaatgcactcttacatttaagaaattatatatacattcttgaatttcaacttaccaaaatagaatagcttttatttaacagcctaagcttttgttttcctgacaaatactgaaactttttgttacattaatgctgcaaagttgtttatcacctcaactttctcactgctttgctcataactaagtgtgattacatggagagagaaagttttgtaacagtaacacatgatttagagtttaaaatcatatcagaagatgggaattatttaaatataccttataaaaataagtggcttaatcaatgagaaaaaaacccaggggtttttggcttataattagaaaataagtattattcttagttaatagttaattaaaaaaaatcaacaacctaaaaagtaaaaccaattctgatgtgttcagtagctgaaagatatg

SEQ ID NO: 5259 - protein, 32 aa, Homo sapiens
MTSQVLRGKTEKGSNINFVGETKRLIILYLEV

SEQ ID NO: 5260 - DNA, 2657 bp, Homo sapiens
tggccagaccctgccgcctgagagagagcacagcctggtgggttctggggtctacggcctaggggccggggaagtttgcgccgccgcgaccagtgctgcgatcccgagccgggctccagccccgaggaccaggggtcgggcgggcctgcctacggaaccccgcgggccagcagcagtcgtctcgcgtcctcctgcttggaaaagtgtttaagcttctaaaatgtcatctatcaagcacctggtttatgcagttattcgtttcttacgggaacaaagtcagatggacacttacacctcggatgaacaagaaagtttggaagttgcaattcagtgcttggagacagtttttaagatcagcccagaagatacacacctagcagtttcacagcctttgacagaaatgtttaccagttccttctgtaagaatgacgttctgcccctttcaaactcagtgcctgaagatgtgggaaaagctgaccaattaaaagatgaaggcaataaccacatgaaagaagaaaattatgctgctgcagtggattgttacacacaggcaatagaattggatcccaataatgcagtttactattgcaacagggctgctgctcagagcaaattaggtcactacacagatgcgataaaggattgtgaaaaagcaatagcaattgattcaaagtacagcaaggcctatgggagaatggggctggccctcactgccttgaataaatttgaagaagcagttacaagttatcaaaaggcattagatcttgaccctgaaaatgattcctataagtcaaatctgaaaatagcagaacagaagttaagagaggtatccagtcctacaggaactggactgagctttgacatggctagcttgataaataatccagccttcattagtatggcggcaagtttaatgcagaaccctcaagttcaacagctaatgtcaggaatgatgacaaatgccattgggggacctgctgctggagttgggggcctaactgacctgtcaagcctcatccaagcgggacagcagtttgctcagcagatacagcaacaaaatcctgaacttatagagcaactgagaaatcacatccggagcagatcattcagcagcagcgctgaagagcattcctgatttaaccaggggctcaagcccaagatacaaatggtttatggctatgaatgaagtatttgttgtagatagtaccccctccctccttcaaaaaaccaaacaccatatctgatgtgtgaaaataatggaggaaaacctcttgtgtatattcttaaagaataaatctgtttagacaataggtttatcacaaacaaactcaaaacataacatgactccttttgaaatgatcactagccatgttacgtgccaatatagcactgggataaggttccattttcaaacttctatcatatttgtatattagacttaatagcaaagcatatttattgaactctagtagggctatttgttggtaagctctttagctccaatttcccttaagcaaagttttttgagaagggaaatgacccaaaggaaaggtttcctatgctggttgagaagaagtgtacttgccactgagcagtatgtcaggaaagaaggaatattatctaggtttagctttgataagtgctattagtaatgaatatataacatgggaaccaatgttatctttaatgttgcttgttctggtgaacagagaatcttaagagctgttagaaagtagcacttgatgcaagggatgttttgaaaagaaaaaattggtaatgcgaatgtatagaaagtaaaggtaggatgctcaggttttctgcatagttcttaactaatcttgtctgcagtttggtattgataatattagcatggccacttatgctaaatacacaataagatacatttagaaatccttaatgtactggttaggtcagtggtacaactgtttgacttaattatcacaatttccccaatggtaaccttaccttggaaactatcaaatataaatatactttaactaagccagtgacctggtcctaagttaaggattttctaaatggtatttaattgtgtgcccataaacactgattttttttaaaaagaaaacttagtaattatttgatggataacaaaaagcatctatcactaacattgcttgttcatgtaatcttctgtgataatttggcttggcatgccagtcttataattaacataatttaaatttgatgcaatttaaatataacaggagacttaaaatattttattataaattagatgccatattagttagtggagaaaaggggcattaggtattaattgcatgggtctaactacattgatgatgagagtttaattccaactagagtatattttttgtttattaataatgaaattggtgctgacatgtaatgacttcacaagttttacgagggaaaactgaaaaaggaagtaatataaattttgtggggtttttttgagatggagtcttactcttttgccaggctagagtggtgttgcaatgtcagctcactgcaacctccacctcctggattcaagtgattctcgagccttaagctcccaagtagctgggattacgggcgcccaccaccacgcccagctaattttttttttttttttcttgagatggagtctctct

SEQ ID NO: 5261 - protein, 304 aa, Homo sapiens; identical to SEQ ID NO: 666

SEQ ID NO: 5262 - DNA, 1324 bp, Homo sapiens
tggccagaccctgccgcctgagagagagcacagcctggtgggttctggggtctacggcctaggggccggggaagtttgcgccgccgcgaccagtgctgcgatcccgagccgggctccagccccgaggaccaggggtcgggcgggcctgcctacggaaccccgcgggccagcagcagtcgtctcgcgtcctcctgcttggaaaagtgtttaagcttctaaaatgtcatctatcaagcacctggtttatgcagttattcgtttcttacgggaacaaagtcagatggacacttacacctcggatgaacaagaaagtttggaagttgcaattcagtgcttggagacagtttttaagatcagcccagaagatacacacctagcagtttcacagcctttgacagaaatgtttaccagttccttctgtaagaatgacgttctgcccctttcaaactcagtgcctgaagatgtgggaaaagctgaccaattaaaagatgaaggcaataaccacatgaaagaagaaaattatgctgctgcagtggattgttacacacaggcaatagaattggatcccaataatgcagtttactattgcaacagggctgctgctcagagcaaattaggtcactacacagatgcgataaaggattgtgaaaaagcaatagcaattgattcaaagtacagcaaggcctatgggagaatggggctggccctcactgccttgaataaatttgaagaagcagttacaagttatcaaaaggcattagatcttgaccctgaaaatgattcctataagtcaaatctgaaaatagcagaacagaagttaagagaggtatccagtcctacaggaactggactgagctttgacatggctagcttgataaataatccagccttcattagtatggcggcaagtttaatgcagaaccctcaagttcaacagctaatgtcaggaatgatgacaaatgccattgggggacctgctgctggagttgggggcctaactgacctgtcaagcctcatccaagcgggacagcagtttgctcagcagatacagcaacaaaatcctgaacttatagagcaactgagaaatcacatccggagcagatcattcagcagcagcgctgaagagcattcctgatttaaccaggggctcaagcccaagatacaaatggtttatggctatgaatgaagtatttgttgtagatagtaccccctccctccttcaaaaaaccaaacaccatatctgatgtgtgaaaataatggaggaaaacctcttgtgtatattcttaaagaataaatctgtttagacaataggtttatcacaaac

SEQ ID NO: 5263 - protein, 304 aa, Homo sapiens; identical to SEQ ID NO: 666

SEQ ID NO: 5264 - DNA, 2683 bp, Homo sapiens
ggggctggtaggcgccggcgtggagctgccgcacgtgggagggcgctggccaggcagccactgtggcctctgcggctaggccggctcgagactcccgggcgcccaggcgctgccgcccgcctcgccgccccacgccgaaggaccacgcgcccgccgccgccagcctctcagcgctcccatgatcgcccggtgccttttggctgtgcgaagcctccgcagagttggtggttccaggattttactcagaatgacgttaggaagagaagtgatgtctcctcttcaggcaatgtcttcctatactgtggctggcagaaatgttttaagatgggatctttcaccagagcaaattaaaacaagaactgaggagctcattgtgcagaccaaacaggtgtacgatgctgttggaatgctcggtattgaggaagtaacttacgagaactgtctgcaggcactggcagatgtagaagtaaagtatatagtggaaaggaccatgctagactttccccagcatgtatcctctgacaaagaagtacgagcagcaagtacagaagcagacaaaagactttctcgttttgatattgagatgagcatgagaggagatatatttgagagaattgttcatttacaggaaacctgtgatctggggaagataaaacctgaggccagacgatacttggaaaagtcaattaaaatggggaaaagaaatgggctccatcttcctgaacaagtacagaatgaaatcaaatcaatgaagaaaagaatgagtgagctatgtattgattttaacaaaaacctcaatgaggatgataccttccttgtattttccaaggctgaacttggtgctcttcctgatgatttcattgacagtttagaaaagacagatgatgacaagtataaaattaccttaaaatatccacactatttccctgtcatgaagaaatgttgtatccctgaaaccagaagaaggatggaaatggcttttaatacaaggtgcaaagaggaaaacaccataattttgcagcagctactcccactgcgaaccaaggtggccaaactactcggttatagcacacatgctgacttcgtccttgaaatgaacactgcaaagagcacaagccgcgtaacagcctttctagatgatttaagccagaagttaaaacccttgggtgaagcagaacgagagtttattttgaatttgaagaaaaaggaatgcaaagacaggggttttgaatatgatgggaaaatcaatgcctgggatctatattactacatgactcagacagaggaactcaagtattccatagaccaagagttcctcaaggaatacttcccaattgaggtggtcactgaaggcttgctgaacacctaccaggagttgttgggactttcatttgaacaaatgacagatgctcatgtttggaacaagagtgttacactttatactgtgaaggataaagctacaggagaagtattgggacagttctatttggacctctatccaagggaaggaaaatacaatcatgcggcctgcttcggtctccagcctggctgccttctgcctgatggaagccggatgatggcagtggctgccctcgtggtgaacttctcacagccagtggcaggtcgtccctctctcctgagacacgacgaggtgaggacttactttcatgagtttggtcacgtgatgcatcagatttgtgcacaggtgagttttttttttcccccagtaaacctgccaattagtttttttagaaaacttcttgactgctgtcaggtttctgctcctaacaggttttttcagaagctgaatgtgttcaagaattttataggccttctgcaaaaccaaaattttccttatcctgtcctctttcacaacatatttttacttggaggttcatctaccagtgaaagatgtttgttgaataacagcctatggaaaaagaataagactatctgtaaggaaaggttacaaatactttgctttttccttttaatcctttaggaatttgatataaatttctcagaaaaactgtgctgtaatctgtctcttctgcttatcaatgctttgtttactttagtggtttttcaatcctcttagaccctttactcatttttaaataataattttgtaacatttgcctttactaacttcaaattaaaatcatagataatatagtctaaccatgcaaagaatttgccagagtggaggtgtatgtgtgcagtagattaaaactgatttttttatttctgaaaataaaaagtacatttattctcaactttgtaatacagtccatttaattaggcccagactattctagcatgaaccatatgaacttgctaacatttaaccattattaacatatgaaaatgtctagttcagcaattcaccgtaatagttgaaatatactgttatttggctgggcatggtggctcatgcctgtaatcccagcactttgggaggccaaggtggaaggatcgcttgagtctaggagtttgagaacagcctgggcaacgtggtaaaacaaacaaaaattatccaggcatggtggtatgtgcctgtggtcccagctactcgggaggctgaggtgggaggatcacttgagttcaggaggttgaggttgtagtgagccatgattgtgccactgcaccacagcctgggtgacagagcagaccttgacttaaa

SEQ ID NO: 5265 - protein, 607 aa, Homo sapiens
MIARCLLAVRSLRRVGGSRILLRMTLGREVMSPLQAMSSYTVAGRNVLRWDLSPEQIKTRTEELIVQTKQVYDAVGMLGIEEVTYENCLQALADVEVKYIVERTMLDFPQHVSSDKEVRAASTEADKRLSRFDIEMSMRGDIFERIVHLQETCDLGKIKPEARRYLEKSIKMGKRNGLHLPEQVQNEIKSMKKRMSELCIDFNKNLNEDDTFLVFSKAELGALPDDFIDSLEKTDDDKYKITLKYPHYFPVMKKCCIPETRRRMEMAFNTRCKEENTIILQQLLPLRTKVAKLLGYSTHADFVLEMNTAKSTSRVTAFLDDLSQKLKPLGEAEREFILNLKKKECKDRGFEYDGKINAWDLYYYMTQTEELKYSIDQEFLKEYFPIEVVTEGLLNTYQELLGLSFEQMTDAHVWNKSVTLYTVKDKATGEVLGQFYLDLYPREGKYNHAACFGLQPGCLLPDGSRMMAVAALVVNFSQPVAGRPSLLRHDEVRTYFHEFGHVMHQICAQVSFFFPPVNLPISFFRKLLDCCQVSAPNRFFQKLNVFKNFIGLLQNQNFPYPVLFHNIFLLGGSSTSERCLLNNSLWKKNKTICKERLQILCFFLLIL

SEQ ID NO: 5266 - DNA, 2731 bp, Homo sapiens
ggggctggtaggcgccggcgtggagctgccgcacgtgggagggcgctggccaggcagccactgtggcctctgcggctaggccggctcgagactcccgggcgcccaggcgctgccgcccgcctcgccgccccacgccgaaggaccacgcgcccgccgccgccagcctctcagcgctcccatgatcgcccggtgccttttggctgtgcgaagcctccgcagagttggtggttccaggattttactcagaatgacgttaggaagagaagtgatgtctcctcttcaggcaatgtcttcctatactgtggctggcagaaatgttttaagatgggatctttcaccagagcaaattaaaacaagaactgaggagctcattgtgcagaccaaacaggtgtacgatgctgttggaatgctcggtattgaggaagtaacttacgagaactgtctgcaggcactggcagatgtagaagtaaagtatatagtggaaaggaccatgctagactttccccagcatgtatcctctgacaaagaagtacgagcagcaagtacagaagcagacaaaagactttctcgttttgatattgagatgagcatgagaggagatatatttgagagaattgttcatttacaggaaacctgtgatctggggaagataaaacctgaggccagacgatacttggaaaagtcaattaaaatggggaaaagaaatgggctccatcttcctgaacaagtacagaatgaaatcaaatcaatgaagaaaagaatgagtgagctatgtattgattttaacaaaaacctcaatgaggatgataccttccttgtattttccaaggctgaacttggtgctcttcctgatgatttcattgacagtttagaaaagacagatgatgacaagtataaaattaccttaaaatatccacactatttccctgtcatgaagaaatgttgtatccctgaaaccagaagaaggatggaaatggcttttaatacaaggtgcaaagaggaaaacaccataattttgcagcagctactcccactgcgaaccaaggtggccaaactactcggttatagcacacatgctgacttcgtccttgaaatgaacactgcaaagagcacaagccgcgtaacagcctttctagatgatttaagccagaagttaaaacccttgggtgaagcagaacgagagtttattttgaatttgaagaaaaaggaatgcaaagacaggggttttgaatatgatgggaaaatcaatgcctgggatctatattactacatgactcagacagaggaactcaagtattccatagaccaagagttcctcaaggaatacttcccaattgaggtggtcactgaaggcttgctgaacacctaccaggagttgttgggactttcatttgaacaaatgacagatgctcatgtttggaacaagagtgttacactttatactgtgaaggataaagctacaggagaagtattgggacagttctatttggacctctatccaagggaaggaaaatacaatcatgcggcctgcttcggtctccagcctggctgccttctgcctgatggaagccggatgatggcagtggctgccctcgtggtgaacttctcacagccagtggcaggtcgtccctctctcctgagacacgacgaggtgaggacttactttcatgagtttggtcacgtgatgcatcagatttgtgcacagactgattttgcacgatttagcggaacaaatgtggaaactgactttgtagaggtgccatcgcaaatgcttgaaaattgggtgtgggacgtcgattccctccgaagattgtcaaaacattataaagatggaagccctattgcagacgatctgcttgaaaaacttgttgcttctaggctggtcaacacaggtcttctgaccctgcgccagattgttttgagcaaagttgatcagtctcttcataccaacacatcgctggatgctgcaagtgaatatgccaaatactgctcagaaatattaggagttgcagctactccaggcacaaatatgccagctacctttggacatttggcagggggatacgatggccaatattatggatatctttggagtgaagtattttccatggatatgttttacagctgttttaaaaaagaagggataatgaatccagaggttggaatgaaatacagaaacctaatcctgaaacctgggggatctctggacggcatggacatgctccacaatttcttgaaacgtgagccaaaccaaaaagcgttcctaatgagtagaggcctgcatgctccgtgaactggggatctttggtagccgtccatgtctggaggacaagtcgacatcaccatgtgttactggcctggaaactgaagggagttttgcaagtgaaaatttagatttctattgacatccttttgttttctaattttaaaaattataaagatgtaaatggaattataaatactgtgacctaagaaaagacccactagaaagtaattgtactataaaatttcataaaactggatttgatttctttttatgaaagtttcatatgaatgtaacttgattttttactattataatctagataatatgatataagagggctaagaatttttaaattgaatcatatatatgatataatttgatccttcttgtatcttgaagttttgtacttgggatttctggactgataaatgaatcatcacattcttctggtaaatattttcttgg

SEQ ID NO: 5267 - protein, 704 aa, Homo sapiens; identical to SEQ ID NO: 668

SEQ ID NO: 5268 - DNA, 4061 bp, Homo sapiens
ggggctggtaggcgccggcgtggagctgccgcacgtgggagggcgctggccaggcagccactgtggcctctgcggctaggccggctcgagactcccgggcgcccaggcgctgccgcccgcctcgccgccccacgccgaaggaccacgcgcccgccgccgccagcctctcagcgctcccatgatcgcccggtgccttttggctgtgcgaagcctccgcagagttggtggttccaggattttactcagaatgacgttaggaagagaagtgatgtctcctcttcaggcaatgtcttcctatactgtggctggcagaaatgttttaagatgggatctttcaccagagcaaattaaaacaagaactgaggagctcattgtgcagaccaaacaggtgtacgatgctgttggaatgctcggtattgaggaagtaacttacgagaactgtctgcaggcactggcagatgtagaagtaaagtatatagtggaaaggaccatgctagactttccccagcatgtatcctctgacaaagaagtacgagcagcaagtacagaagcagacaaaagactttctcgttttgatattgagatgagcatgagaggagatatatttgagagaattgttcatttacaggaaacctgtgatctggggaagataaaacctgaggccagacgatacttggaaaagtcaattaaaatggggaaaagaaatgggctccatcttcctgaacaagtacagaatgaaatcaaatcaatgaagaaaagaatgagtgagctatgtattgattttaacaaaaacctcaatgaggatgataccttccttgtattttccaaggctgaacttggtgctcttcctgatgatttcattgacagtttagaaaagacagatgatgacaagtataaaattaccttaaaatatccacactatttccctgtcatgaagaaatgttgtatccctgaaaccagaagaaggatggaaatggcttttaatacaaggtgcaaagaggaaaacaccataattttgcagcagctactcccactgcgaaccaaggtggccaaactactcggttatagcacacatgctgacttcgtccttgaaatgaacactgcaaagagcacaagccgcgtaacagcctttctagatgatttaagccagaagttaaaacccttgggtgaagcagaacgagagtttattttgaatttgaagaaaaaggaatgcaaagacaggggttttgaatatgatgggaaaatcaatgcctgggatctatattactacatgactcagacagaggaactcaagtattccatagaccaagagttcctcaaggaatacttcccaattgaggtggtcactgaaggcttgctgaacacctaccaggagttgttgggactttcatttgaacaaatgacagatgctcatgtttggaacaagagtgttacactttatactgtgaaggataaagctacaggagaagtattgggacagttctatttggacctctatccaagggaaggaaaatacaatcatgcggcctgcttcggtctccagcctggctgccttctgcctgatggaagccggatgatggcagtggctgccctcgtggtgaacttctcacagccagtggcaggtcgtccctctctcctgagacacgacgaggtgaggacttactttcatgagtttggtcacgtgatgcatcagatttgtgcacagactgattttgcacgatttagcggaacaaatgtggaaactgactttgtagaggtgccatcgcaaatgcttgaaaattgggtgtgggacgtcgattccctccgaagattgtcaaaacattataaagatggaagccctattgcagacgatctgcttgaaaaacttgttgcttctaggctggtcaacacaggtcttctgaccctgcgccagattgttttgagcaaagttgatcagtctcttcataccaacacatcgctggatgctgcaagtgaatatgccaaatactgctcagaaatattaggagttgcagctactccaggcacaaatatgccagctacctttggacatttggcagggggatacgatggccaatattatggatatctttggagtgaagtattttccatggatatgttttacagctgttttaaaaaagaagggataatgaatccagaggttggaatgaaatacagaaacctaatcctgaaacctgggggatctctggacggcatggacatgctccacaatttcttgaaacgtgagccaaaccaaaaagcgttcctaatgagtagaggcctgcatgctccgtgaactggggatctttggtagccgtccatgtctggaggacaagtcgacatcaccatgtgttactggcctggaaactgaagggagttttgcaagtgaaaatttagatttctattgacatccttttgttttctaattttaaaaattataaagatgtaaatggaattataaatactgtgacctaagaaaagacccactagaaagtaattgtactataaaatttcataaaactggatttgatttctttttatgaaagtttcatatgaatgtaacttgattttttactattataatctagataatatgatataagagggctaagaatttttaaattgaatcatatatatgatataatttgatccttcttgtatcttgaagttttgtacttgggatttctggactgataaatgaatcatcacattcttctggtaaatattttcttggagctctgtgtcaactttgatcctttgtctcccaggaaggtgtgacctctcctttgcctgcatacctcaaggccaggggaatatgcctcagtgatgcatttatctttgtatatcaggccgcatgattcccaactttctgccacacttaaattacgttcctccatttcagttttgtcttttctgtctaaagttcagtcaaagagtatcaaaaaattatgtttcagctagactggtgtaatgtataagtttttgtatcttgtattagaggatttcgtagcttttattagaggctcatttccacctcagcatacaagatcgttagtcttttggcatgtgtgccaattagaatactaaagcaagtccaagcacatttttctcttctcacgtttctaataagtgttagggactttgcctcttttacttaccacgtccccaaaagtgtcaggtagacatgtcacaaatggctctgtagagagccatgggaagagagaggaggtggatgtggaacataaagggttcagaaactccagaagaggagtgggttttggatagaagcatttgaggacagctgctccaaagccttatgtgtatgatgaaacttaaccacggggaagagactcttcagtagcctgttctgtctggtgatttttattttaagtgaacctttggatctatctttaactctctttattgtgagtctaaattccaattctgcagcagatcagtaaactcacagtatttttcctgtggaaatctattcaataaggaaaccaagacaggataataaaatttaaaaaaaaaacaactttgaattcccctgcctaggtcttccagttgttttccagcgcatacctcaggtatgactttgctagccggggacaaaattagcaccttccgattctctagtccaaatgaactttgtgctaaataaaaaattattatactacataataaagttacagatagcaggaaatgcaagagctaggagattcctagattatatctgccaagcaaataccttaaacatccacctgaaatcctactaccccctcttctgagataatttgcccagcccttctcttcccacacactcactcaatgtcacccccttctaatccccaaaactgtttttgtggtctttgtagcctatagtagttttctcacatctttccccctagacttttctgtttttcagtttcagacaaaaaaactcttcagctttttccagtgtgtctccttaacagtaactttaccacttgaaatcttatttcatagaaaaactaaattggtgtggaaaggctgcacacaataaagttatattattatccatg

SEQ ID NO: 5269 - protein, 704 aa, Homo sapiens; identical to SEQ ID NO: 668

SEQ ID NO: 5270 - DNA, 7178 bp, Homo sapiens
ggggctggtaggcgccggcgtggagctgccgcacgtgggagggcgctggccaggcagccactgtggcctctgcggctaggccggctcgagactcccgggcgcccaggcgctgccgcccgcctcgccgccccacgccgaaggaccacgcgcccgccgccgccagcctctcagcgctcccatgatcgcccggtgccttttggctgtgcgaagcctccgcagagttggtggttccaggattttactcagaatgacgttaggaagagaagtgatgtctcctcttcaggcaatgtcttcctatactgtggctggcagaaatgttttaagatgggatctttcaccagagcaaattaaaacaagaactgaggagctcattgtgcagaccaaacaggtgtacgatgctgttggaatgctcggtattgaggaagtaacttacgagaactgtctgcaggcactggcagatgtagaagtaaagtatatagtggaaaggaccatgctagactttccccagcatgtatcctctgacaaagaagtacgagcagcaagtacagaagcagacaaaagactttctcgttttgatattgagatgagcatgagaggagatatatttgagagaattgttcatttacaggaaacctgtgatctggggaagataaaacctgaggccagacgatacttggaaaagtcaattaaaatggggaaaagaaatgggctccatcttcctgaacaagtacagaatgaaatcaaatcaatgaagaaaagaatgagtgagctatgtattgattttaacaaaaacctcaatgaggatgataccttccttgtattttccaaggctgaacttggtgctcttcctgatgatttcattgacagtttagaaaagacagatgatgacaagtataaaattaccttaaaatatccacactatttccctgtcatgaagaaatgttgtatccctgaaaccagaagaaggatggaaatggcttttaatacaaggtgcaaagaggaaaacaccataattttgcagcagctactcccactgcgaaccaaggtggccaaactactcggttatagcacacatgctgacttcgtccttgaaatgaacactgcaaagagcacaagccgcgtaacagcctttctagatgatttaagccagaagttaaaacccttgggtgaagcagaacgagagtttattttgaatttgaagaaaaaggaatgcaaagacaggggttttgaatatgatgggaaaatcaatgcctgggatctatattactacatgactcagacagaggaactcaagtattccatagaccaagagttcctcaaggaatacttcccaattgaggtggtcactgaaggcttgctgaacacctaccaggagttgttgggactttcatttgaacaaatgacagatgctcatgtttggaacaagagtgttacactttatactgtgaaggataaagctacaggagaagtattgggacagttctatttggacctctatccaagggaaggaaaatacaatcatgcggcctgcttcggtctccagcctggctgccttctgcctgatggaagccggatgatggcagtggctgccctcgtggtgaacttctcacagccagtggcaggtcgtccctctctcctgagacacgacgaggtgaggacttactttcatgagtttggtcacgtgatgcatcagatttgtgcacagactgattttgcacgatttagcggaacaaatgtggaaactgactttgtagaggtgccatcgcaaatgcttgaaaattgggtgtgggacgtcgattccctccgaagattgtcaaaacattataaagatggaagccctattgcagacgatctgcttgaaaaacttgttgcttctaggctggtcaacacaggtcttctgaccctgcgccagattgttttgagcaaagttgatcagtctcttcataccaacacatcgctggatgctgcaagtgaatatgccaaatactgctcagaaatattaggagttgcagctactccaggcacaaatatgccagctacctttggacatttggcagggggatacgatggccaatattatggatatctttggagtgaagtattttccatggatatgttttacagctgttttaaaaaagaagggataatgaatccagaggttggaatgaaatacagaaacctaatcctgaaacctgggggatctctggacggcatggacatgctccacaatttcttgaaacgtgagccaaaccaaaaagcgttcctaatgagtagaggcctgcatgctccgtgaactggggatctttggtagccgtccatgtctggaggacaagtcgacatcaccatgtgttactggcctggaaactgaagggagttttgcaagtgaaaatttagatttctattgacatccttttgttttctaattttaaaaattataaagatgtaaatggaattataaatactgtgacctaagaaaagacccactagaaagtaattgtactataaaatttcataaaactggatttgatttctttttatgaaagtttcatatgaatgtaacttgattttttactattataatctagataatatgatataagagggctaagaatttttaaattgaatcatatatatgatataatttgatccttcttgtatcttgaagttttgtacttgggatttctggactgataaatgaatcatcacattcttctggtaaatattttcttggagctctgtgtcaactttgatcctttgtctcccaggaaggtgtgacctctcctttgcctgcatacctcaaggccaggggaatatgcctcagtgatgcatttatctttgtatatcaggccgcatgattcccaactttctgccacacttaaattacgttcctccatttcagttttgtcttttctgtctaaagttcagtcaaagagtatcaaaaaattatgtttcagctagactggtgtaatgtataagtttttgtatcttgtattagaggatttcgtagcttttattagaggctcatttccacctcagcatacaagatcgttagtcttttggcatgtgtgccaattagaatactaaagcaagtccaagcacatttttctcttctcacgtttctaataagtgttagggactttgcctcttttacttaccacgtccccaaaagtgtcaggtagacatgtcacaaatggctctgtagagagccatgggaagagagaggaggtggatgtggaacataaagggttcagaaactccagaagaggagtgggttttggatagaagcatttgaggacagctgctccaaagccttatgtgtatgatgaaacttaaccacggggaagagactcttcagtagcctgttctgtctggtgatttttattttaagtgaacctttggatctatctttaactctctttattgtgagtctaaattccaattctgcagcagatcagtaaactcacagtatttttcctgtggaaatctattcaataaggaaaccaagacaggataataaaatttaaaaaaaaaacaactttgaattcccctgcctaggtcttccagttgttttccagcgcatacctcaggtatgactttgctagccggggacaaaattagcaccttccgattctctagtccaaatgaactttgtgctaaataaaaaattattatactacataataaagttacagatagcaggaaatgcaagagctaggagattcctagattatatctgccaagcaaataccttaaacatccacctgaaatcctactaccccctcttctgagataatttgcccagcccttctcttcccacacactcactcaatgtcacccccttctaatccccaaaactgtttttgtggtctttgtagcctatagtagttttctcacatctttccccctagacttttctgtttttcagtttcagacaaaaaaactcttcagctttttccagtgtgtctccttaacagtaactttaccacttgaaatcttatttcatagaaaaactaaattggtgtggaaaggctgcacacaataaagttatattattatccatgaaaatgaactcatatttctttcatactttaacgttaaaaccgaaatgcatgagagcaaaagcaccatggtgttctttctatttagggcctacctctaatatttaaaatctaccaaagagcagtcacaaaattaaaactcagcccgggcgcagtggctcatgcctgtaatcccagcactttgggaggccaaggcaggaggatcacctgaggtcagagttcaagaccagcatggtcaacatggtgaaaccctgtctctacaaaaatacaaaaagctgggcatgatgttgggttcctgtagtcccagctacttaggaggctgaggcaggagaatagcttgaacccgggaggtggaggttgcagtgagctgagatcatgccattgcactccagcctggacgacagagtgagattcagtctcaaaaaaaattaatactcaaagaattatctagcataatttaaaagaaaggactttttaaaaattctctagcataattcaaaagaaaggacttaacttttttttttttagtgtggtcatccgtctagttgttctttttttccagatcagagcagagaatatcactgacatgcttgaaatggtggataactatgtaaattgtaattggacaaatgtacactttagatttatggactgagccacatataataaggtctctcctggtaattgatccaggggatttaggcctctttcgggttttttgttttttttttaggcattgttatgttgtgaaggataaaatcttcaacatcttatgcaaatggatagtaggcatgatcctaaaggtttagttttacgatgctgcagagaagagaaatgtcttgacgttttgccacctgatgtagactttgtccccctctagtataaatgttgcatgttacctagataaacaactaaaaattgccttgagttatcacctgagctacttatgccaaggtcttgcctttctaaagctaataaggtgagaggtggatatctgtagctcttcggatgaaaaattgcattgtgggagataccaaaattgaggaaatagctcttcaaagaaaaattactgatatgatcattgtacttgtaaatgccttaagtagcaggcagtgactcaattttctactttaccattttacctttagcttttatgtatgaattataggtctgtggagattctgcctccccactaggccagtgtgtgtttaccatttattcattttctatcatacacaggtggattaaaatttacattaaaatttacattaaaataccatcatacttcaggcttctataacaaaatatcagactgggtggcttcaaaagcagacatttcttacagttctggaagctgggaagtcccacaatccacatgctggtaaatttggttcgtggtgaggcccctcttcctcttttactgaccacatccccaaaagtgtcaggtagacatgttacaaatagctctgtagagagccatgggaagagacaggaggcagatgtggaacataaagggtttagaaacttctgcaggcagcagtggcagggagcaagccctagagtgtctctttttacgagagcaggaatcccatcatgagagttccttcctcatgactttatctaaacccagtcacccccaacaaaggccccaccccctaaccccatcacattggctgttacggcttcaatgtaggggatggggcacaaacattcagtccataacgaatactgattcctcaaatagggtttaaacatagttaactgagcccccaaagaatgttaaaagagaaaatccattttatttgaatagatgcagtgaccacagcttcttccctcaaatcaacacattacagttagatgtctcccatctgaaattggatagcccactgaaattgaacatgccttctcttataaatgtgtggtgagaataaaagcaacaaagaaatgaatgtggtggctcacacctgtaatcctaacactttggaaggttgaggcaggaggatcctttgtgctcaagagtttgagaccagcctgagcaacacagtgagaccctgtctctacaaaaactaaaaaaattagctagggatggtggcacatgcctgtagtcccagctacttgggaggctgaggtgggaggattgcttgagcccaagaaggtcaaggctgccatgagccataatcacgccactgcactccagcctgggtgacagagaccctgtcttaaaataaaataaaaaaaaaaggaaaaggaaagacatacataccctcagttcttcgaaaaacagtcaacgtccaaaaagtttattttttgagtcacctttaatagagaaatttcccactggaaacagatccacctaagtgattatctagtatcagctgtatcaaggcaaaaggtaaaggttataagatgtaaatattagaccaaaatagccttttttaacaaacacaataatgctgtacgtctgtaacaaaacaaaatttgaaaaattgaggtaatgtacacagcgatgcacacacccccacaccacaccgtgattcctgagttttgatttggttgaattcaccttgtagttccctttcctgagaaaatacaggttcaacacatctagtccacgatgtacgtacaaggggaaggggtgaacaggaaatagactcccttattctgctcacatgagctggaacctgtactagctgcatatttcatagaccccagaggctcacctcaattgtactcctatgataaaatgtctctagcatttgtcatgagagaaactggctagaaatagtttgttcattgcgtccagcaagacacgcattgctgttgatatctttgtggctaagatggagaatgtgactggataatagttatccaggtggattactagctattgaaacagtctgagatagttgcatgatgattaacgttaaactgggagtaatttcaagtcatttggctaaaaatgaaaaaaaagtcccataaaaaggtatcaaatgtacagataatagggctggaattattaagtatgatgatgttattaacatctaaaattattttggccgggcaaggtgggtcacgcctgtaatctcagcactttgggatgccaagatgggtggatcacct

SEQ ID NO: 5271 - protein, 704 aa, Homo sapiens; identical to SEQ ID NO: 668

SEQ ID NO: 5272 - DNA, 701 bp, Homo sapiens
gttagccaggctggtcttggactcttgacctcaaatgatccacccaccttagcctcccaaattgctgggattacaggtgtgggccaccgtgcctggcaaaaaatgagtttctttttattgctaatgccctgtatttttatcttcctttcaggaaatcaaatcaatgaagaaaagaatgagtgagctatgtattgattttaacaaaaacctcaatgaggatgataccttccttgtattttccaaggctgaacttggtgctcttcctgatgatttcattgacagtttagaaaagacagatgatgacaagtataaaattaccttaaaatatccacactatttccctgtcatgaagaaatgttgtatccctgaaaccagaagaaggatggaaatggcttttaatacaaggtgcaaagaggaaaacaccataattttgcagcagctactcccactgcgaaccaaggtggccaaactactcggttatagcacacatgctgacttcgtccttgaaatgaacactgcaaagagcacaagccgcgtaacagcctttctaggttagttcttttttttttttctatgactgttttgctataccatgtcaaccagacagaaggcctcagaacataatatgcctttgaggacatcctacttttccttcatttgagagaagtatattgatcacctattaagtgttagatagtgtg

SEQ ID NO: 5273 - protein, 130 aa, Homo sapiens
MKKRMSELCIDFNKNLNEDDTFLVFSKAELGALPDDFIDSLEKTDDDKYKITLKYPHYFPVMKKCCIPETRRRMEMAFNTRCKEENTIILQQLLPLRTKVAKLLGYSTHADFVLEMNTAKSTSRVTAFLG

SEQ ID NO: 5274 - DNA, 836 bp, Homo sapiens
ggtgagcttgtcaggtgcctgatcgtcatcccccgtccttggctggtcgctctctgccctgatgactgccgctcagtgtaggaaggagacagctctggctgccctccccagagtcatccatgctgggaaggatggaggaggggtggaaagttagtgagagcctgcatgtgctgctgcagagatgcccaagatagcaggagacccaatctgtttcccatttatatattctcattgctgatagatgatggacatccttcatttaggttggaatgaaatacagaaacctaatcctgaaacctgggggatctctggacggcatggacatgctccacaatttcttgaaacgtgagccaaaccaaaaagcgttcctaatgagtagaggcctgcatgctccgtgaactggggatctttggtagccgtccatgtctggaggacaagtcgacatcaccatgtgttactggcctggaaactgaagggagttttgcaagtgaaaatttagatttctattgacatccttttgttttctaattttaaaaattataaagatgtaaatggaattataaatactgtgacctaagaaaagacccactagaaagtaattgtactataaaatttcataaaactggatttgatttctttttatgaaagtttcatatgaatgtaacttgattttttactattataatctagataatatgatataagagggctaagaatttttaaattgaatcatatatatgatataatttgatccttcttgtatcttgaagttttgtacttgggatttctggactgataaatgaatcatcacattcttctggtaaatattttcttgg

SEQ ID NO: 5275 - protein, 35 aa, Homo sapiens
MCCCRDAQDSRRPNLFPIYIFSLLIDDGHPSFRLE

SEQ ID NO: 5276 - DNA, 2166 bp, Homo sapiens
ggtgagcttgtcaggtgcctgatcgtcatcccccgtccttggctggtcgctctctgccctgatgactgccgctcagtgtaggaaggagacagctctggctgccctccccagagtcatccatgctgggaaggatggaggaggggtggaaagttagtgagagcctgcatgtgctgctgcagagatgcccaagatagcaggagacccaatctgtttcccatttatatattctcattgctgatagatgatggacatccttcatttaggttggaatgaaatacagaaacctaatcctgaaacctgggggatctctggacggcatggacatgctccacaatttcttgaaacgtgagccaaaccaaaaagcgttcctaatgagtagaggcctgcatgctccgtgaactggggatctttggtagccgtccatgtctggaggacaagtcgacatcaccatgtgttactggcctggaaactgaagggagttttgcaagtgaaaatttagatttctattgacatccttttgttttctaattttaaaaattataaagatgtaaatggaattataaatactgtgacctaagaaaagacccactagaaagtaattgtactataaaatttcataaaactggatttgatttctttttatgaaagtttcatatgaatgtaacttgattttttactattataatctagataatatgatataagagggctaagaatttttaaattgaatcatatatatgatataatttgatccttcttgtatcttgaagttttgtacttgggatttctggactgataaatgaatcatcacattcttctggtaaatattttcttggagctctgtgtcaactttgatcctttgtctcccaggaaggtgtgacctctcctttgcctgcatacctcaaggccaggggaatatgcctcagtgatgcatttatctttgtatatcaggccgcatgattcccaactttctgccacacttaaattacgttcctccatttcagttttgtcttttctgtctaaagttcagtcaaagagtatcaaaaaattatgtttcagctagactggtgtaatgtataagtttttgtatcttgtattagaggatttcgtagcttttattagaggctcatttccacctcagcatacaagatcgttagtcttttggcatgtgtgccaattagaatactaaagcaagtccaagcacatttttctcttctcacgtttctaataagtgttagggactttgcctcttttacttaccacgtccccaaaagtgtcaggtagacatgtcacaaatggctctgtagagagccatgggaagagagaggaggtggatgtggaacataaagggttcagaaactccagaagaggagtgggttttggatagaagcatttgaggacagctgctccaaagccttatgtgtatgatgaaacttaaccacggggaagagactcttcagtagcctgttctgtctggtgatttttattttaagtgaacctttggatctatctttaactctctttattgtgagtctaaattccaattctgcagcagatcagtaaactcacagtatttttcctgtggaaatctattcaataaggaaaccaagacaggataataaaatttaaaaaaaaaacaactttgaattcccctgcctaggtcttccagttgttttccagcgcatacctcaggtatgactttgctagccggggacaaaattagcaccttccgattctctagtccaaatgaactttgtgctaaataaaaaattattatactacataataaagttacagatagcaggaaatgcaagagctaggagattcctagattatatctgccaagcaaataccttaaacatccacctgaaatcctactaccccctcttctgagataatttgcccagcccttctcttcccacacactcactcaatgtcacccccttctaatccccaaaactgtttttgtggtctttgtagcctatagtagttttctcacatctttccccctagacttttctgtttttcagtttcagacaaaaaaactcttcagctttttccagtgtgtctccttaacagtaactttaccacttgaaatcttatttcatagaaaaactaaattggtgtggaaaggctgcacacaataaagttatattattatccatg

SEQ ID NO: 5277 - protein, 35 aa, Homo sapiens; identical to SEQ ID NO: 5275

SEQ ID NO: 5278 - DNA, 2477 bp, Homo sapiens
ggtgagcttgtcaggtgcctgatcgtcatcccccgtccttggctggtcgctctctgccctgatgactgccgctcagtgtaggaaggagacagctctggctgccctccccagagtcatccatgctgggaaggatggaggaggggtggaaagttagtgagagcctgcatgtgctgctgcagagatgcccaagatagcaggagacccaatctgtttcccatttatatattctcattgctgatagatgatggacatccttcatttaggttggaatgaaatacagaaacctaatcctgaaacctgggggatctctggacggcatggacatgctccacaatttcttgaaacgtgagccaaaccaaaaagcgttcctaatgagtagaggcctgcatgctccgtgaactggggatctttggtagccgtccatgtctggaggacaagtcgacatcaccatgtgttactggcctggaaactgaagggagttttgcaagtgaaaatttagatttctattgacatccttttgttttctaattttaaaaattataaagatgtaaatggaattataaatactgtgacctaagaaaagacccactagaaagtaattgtactataaaatttcataaaactggatttgatttctttttatgaaagtttcatatgaatgtaacttgattttttactattataatctagataatatgatataagagggctaagaatttttaaattgaatcatatatatgatataatttgatccttcttgtatcttgaagttttgtacttgggatttctggactgataaatgaatcatcacattcttctggtaaatattttcttggagctctgtgtcaactttgatcctttgtctcccaggaaggtgtgacctctcctttgcctgcatacctcaaggccaggggaatatgcctcagtgatgcatttatctttgtatatcaggccgcatgattcccaactttctgccacacttaaattacgttcctccatttcagttttgtcttttctgtctaaagttcagtcaaagagtatcaaaaaattatgtttcagctagactggtgtaatgtataagtttttgtatcttgtattagaggatttcgtagcttttattagaggctcatttccacctcagcatacaagatcgttagtcttttggcatgtgtgccaattagaatactaaagcaagtccaagcacatttttctcttctcacgtttctaataagtgttagggactttgcctcttttacttaccacgtccccaaaagtgtcaggtagacatgtcacaaatggctctgtagagagccatgggaagagagaggaggtggatgtggaacataaagggttcagaaactccagaagaggagtgggttttggatagaagcatttgaggacagctgctccaaagccttatgtgtatgatgaaacttaaccacggggaagagactcttcagtagcctgttctgtctggtgatttttattttaagtgaacctttggatctatctttaactctctttattgtgagtctaaattccaattctgcagcagatcagtaaactcacagtatttttcctgtggaaatctattcaataaggaaaccaagacaggataataaaatttaaaaaaaaaacaactttgaattcccctgcctaggtcttccagttgttttccagcgcatacctcaggtatgactttgctagccggggacaaaattagcaccttccgattctctagtccaaatgaactttgtgctaaataaaaaattattatactacataataaagttacagatagcaggaaatgcaagagctaggagattcctagattatatctgccaagcaaataccttaaacatccacctgaaatcctactaccccctcttctgagataatttgcccagcccttctcttcccacacactcactcaatgtcacccccttctaatccccaaaactgtttttgtggtctttgtagcctatagtagttttctcacatctttccccctagacttttctgtttttcagtttcagacaaaaaaactcttcagctttttccagtgtgtctccttaacagtaactttaccacttgaaatcttatttcatagaaaaactaaattggtgtggaaaggctgcacacaataaagttatattattatccatgaaaatgaactcatatttctttcatactttaacgttaaaaccgaaatgcatgagagcaaaagcaccatggtgttctttctatttagggcctacctctaatatttaaaatctaccaaagagcagtcacaaaattaaaactcagcccgggcgcagtggctcatgcctgtaatcccagcactttgggaggccaaggcaggaggatcacctgaggtcagagttcaagaccagcatggtcaacatggtgaaaccctgtctctacaaaaatacaaaaagctgggcatgatgttgggttcctgtagtcccagctactta

SEQ ID NO: 5279 - protein, 35 aa, Homo sapiens; identical to SEQ ID NO: 5275

SEQ ID NO: 5280 - DNA, 2555 bp, Homo sapiens
aatactaaagcaagtccaagcacatttttctcttctcacgtttctaataagtgttagggactttgcctcttttacttaccacgtccccaaaagtgtcaggtagacatgtcacaaatggctctgtagagagccatgggaagagagaggaggtggatgtggaacataaagggttcagaaactccagaagaggagtgggttttggatagaagcatttgaggacagctgctccaaagccttatgtgtatgatgaaacttaaccacggggaagagactcttcagtagcctgttctgtctggtgatttttattttaagtgaacctttggatctatctttaactctctttattgtgagtctaaattccaattctgcagcagatcagtaaactcacagtatttttcctgtggaaatctattcaataaggaaaccaagacaggataataaaatttaaaaaaaaaacaactttgaattcccctgcctaggtcttccagttgttttccagcgcatacctcaggtatgactttgctagccggggacaaaattagcaccttccgattctctagtccaaatgaactttgtgctaaataaaaaattattatactacataataaagttacagatagcaggaaatgcaagagctaggagattcctagattatatctgccaagcaaataccttaaacatccacctgaaatcctactaccccctcttctgagataatttgcccagcccttctcttcccacacactcactcaatgtcacccccttctaatccccaaaactgtttttgtggtctttgtagcctatagtagttttctcacatctttccccctagacttttctgtttttcagtttcagacaaaaaaactcttcagctttttccagtgtgtctccttaacagtaactttaccacttgaaatcttatttcatagaaaaactaaattggtgtggaaaggctgcacacaataaagttatattattatccatgaaaatgaactcatatttctttcatactttaacgttaaaaccgaaatgcatgagagcaaaagcaccatggtgttctttctatttagggcctacctctaatatttaaaatctaccaaagagcagtcacaaaattaaaactcagcccgggcgcagtggctcatgcctgtaatcccagcactttgggaggccaaggcaggagaatagcttgaacccgggaggtggaggttgcagtgagctgagatcatgccattgcactccagcctggacgacagagtgagattcagtctcaaaaaaaattaatactcaaagaattatctagcataatttaaaagaaaggactttttaaaaattctctagcataattcaaaagaaaggacttaacttttttttttttagtgtggtcatccgtctagttgttctttttttccagatcagagcagagaatatcactgacatgcttgaaatggtggataactatgtaaattgtaattggacaaatgtacactttagatttatggactgagccacatataataaggtctctcctggtaattgatccaggggatttaggcctctttcgggttttttgttttttttttaggcattgttatgttgtgaaggataaaatcttcaacatcttatgcaaatggatagtaggcatgatcctaaaggtttagttttacgatgctgcagagaagagaaatgtcttgacgttttgccacctgatgtagactttgtccccctctagtataaatgttgcatgttacctagataaacaactaaaaattgccttgagttatcacctgagctacttatgccaaggtcttgcctttctaaagctaataaggtgagaggtggatatctgtagctcttcggatgaaaaattgcattgtgggagataccaaaattgaggaaatagctcttcaaagaaaaattactgatatgatcattgtacttgtaaatgccttaagtagcaggcagtgactcaattttctactttaccattttacctttagcttttatgtatgaattataggtctgtggagattctgcctccccactaggccagtgtgtgtttaccatttattcattttctatcatacacaggtggattaaaatttacattaaaatttacattaaaataccatcatacttcaggcttctataacaaaatatcagactgggtggcttcaaaagcagacatttcttacagttctggaagctgggaagtcccacaatccacatgctggtaaatttggttcgtggtgaggcccctcttcctcttttactgaccacatccccaaaagtgtcaggtagacatgttacaaatagctctgtagagagccatgggaagagacaggaggcagatgtggaacataaagggtttagaaacttctgcaggcagcagtggcagggagcaagccctagagtgtctctttttacgagagcaggaatcccatcatgagagttccttcctcatgactttatctaaacccagtcacccccaacaaaggccccaccccctaaccccatcacattggctgttacggcttcaatgtaggggatggggc

SEQ ID NO: 5281 - protein, 74 aa, Homo sapiens
MGRDRRQMWNIKGLETSAGSSGREQALECLFLREQESHHESSFLMTLSKPSHPQQRPHPLTPSHWLLRLQCRGW

SEQ ID NO: 5282 - DNA, 1438 bp, Homo sapiens
agtgcgcacgctccgactcggccgtggcggacctgactgaaggaggccgcggacctgactgaaggaggccacggccacttctggttggcctcggggcgcgctggctcggctcttcctccgccctcgaggcccccgcagtcccatcattcagttccgtagggtcaccggcgcggcagtggcctcgcagggcgctgggtccctctccccagctctcctccccctggccccgtcgccccgccctcgccgggctgggctgcggggtcaggggccgagcggagagggttatcatttaacatggaagaagatgagttcattggagaaaaaacattccaacgttattgtgcagaattcattaaacattcacaacagataggtgatagttgggaatggagaccatcaaaggactgttctgatggctacatgtgcaaaatacactttcaaattaagaatgggtctgtgatgtcacatctaggagcatctacccatggacagacatgtcttcccatggaggtgaagtcttgctctgtcacccaggctggagtgcagttgcgtgatctcagctcactgcaacctccgccttctgggttcaagcagttctcctgcctcagccttccgagtaactgggactacaggggttcaccactacacctggctaattttttgtatttttagtagagataaggtttcaccatgttggtcaggctggtcttgaactcctgacatcaagtaatccatccgcctcagcctcccaaagtgctgagattacaggcatgagccactgtgcctggccctgagcttaaaataaaagttaaattaaaaaaaaaataatgttgatgttttcatttttgcaatcaatagcttagttagactcaaattgcaaactgtcattgcctgtagtaggcagtggcatagaactcaattcagctcttttaacctgagttttaagctgctttcagattgccccacacatacatggttcaggagtcagccagagacttgggctgagtttaaacatagaatctggggttgtcctcttctggctgtcttctttcttgggcatctgcatcattctctagcacctatggtttttccaggctctttcccccagtttcctccagtcagaaagatggcaagagtttttgctgcctgccctcccccagtccttgtgccaacaccaccaccattgcagctgcctccagggaaaaactgcaaaaaccaaatcacttgctccaggtgttgactcctcttcaaaatctatttttgttaaatctccaaagcctcaaataggttttcttcctagaatttatatctgttatttgtagcaggattggtctgtaaggcactcagtcttctacatcatgggtcagcagattacagcccttgggttaaatccagccacctgcttgttttattaataaagttttgttggaactaaacc

SEQ ID NO: 5283 - protein, 125 aa, Homo sapiens
MEEDEFIGEKTFQRYCAEFIKHSQQIGDSWEWRPSKDCSDGYMCKIHFQIKNGSVMSHLGASTHGQTCLPMEVKSCSVTQAGVQLRDLSSLQPPPSGFKQFSCLSLPSNWDYRGSPLHLANFLYF

SEQ ID NO: 5284 - DNA, 1683 bp, Homo sapiens
agtgcgcacgctccgactcggccgtggcggacctgactgaaggaggccgcggacctgactgaaggaggccacggccacttctggttggcctcggggcgcgctggctcggctcttcctccgccctcgaggcccccgcagtcccatcattcagttccgtagggtcaccggcgcggcagtggcctcgcagggcgctgggtccctctccccagctctcctccccctggccccgtcgccccgccctcgccgggctgggctgcggggtcaggggccgagcggagagggttatcatttaacatggaagaagatgagttcattggagaaaaaacattccaacgttattgtgcagaattcattaaacattcacaacagataggtgatagttgggaatggagaccatcaaaggactgttctgatggctacatgtgcaaaatacactttcaaattaagaatgggtctgtgatgtcacatctaggagcatctacccatggacagacatgtcttcccatggaggaggctttcgagctacccttggatgattgtgaagtgattgaaactgcagcagcgtccgaagtgattaaatatgagtatcatgtcttatattcctgtagctaccaagtgcctgtactttactttagggcaagctttttagatgggagacctttaactctgaaggacatatgggaaggagttcatgagtgctataagatgcgactgctacagggaccatgggacactattacgcaacaggaacatccaatacttgggcaacccttttttgtacttcatccctgcaagacgaatgaattcatgactcctgtattaaagaattctcagaaaatcaataagaatgtcaactatatcacatcatggctgagcattgtagggccagttgttgggctgaatctacctctgagttatgccaaagcaacgtctcaggatgaacgaaatgtcccttaacaagattcttctattgagtttaggaattgcggcacgaagaatgccaagagtttacctggccagccctggctttaataggactgataccatggaatatttcatctcaccaagatgtgacatggattatttttcccttggacacaaatgtctacagcaactggtgtttgataggctgaatgtttagaagaaacacttcaaagggatacatcatggccaggcatggtggctcacacctgtaatccaagcactttgggaggccaaggtgggagcatcacttgatcctgggagttcgagaccagcctgggcaacatggtgaaaccctgtcggtacaaaaaaatacaaaaatttgcctgtttatggtggtgtgttcctgtagtcccagctccccaggaggctgaggtgggaggttggctttaacccaggaggcagaggttgcagtgagctgagactgtgccactgcagtccagcctgggtgacagagccagacactgtctcggggaaaaaaaaaaaaaaaaaaagacacatcactataaatagcaaaaaaacaaatctaacttattaatactaggaataccaacattattagggcacttgcaggttattcttttctaggccaagtacttcacttccatttgtctgacatggagattgagggagaaatgtatttgtgtgttcattttaatgtaagatatataaaaattaaattactggatttacctgtccctg

SEQ ID NO: 5285 - protein, 220 aa, Homo sapiens; identical to SEQ ID NO: 670

SEQ ID NO: 5286 - DNA, 2311 bp, Homo sapiens
agtgcgcacgctccgactcggccgtggcggacctgactgaaggaggccgcggacctgactgaaggaggccacggccacttctggttggcctcggggcgcgctggctcggctcttcctccgccctcgaggcccccgcagtcccatcattcagttccgtagggtcaccggcgcggcagtggcctcgcagggcgctgggtccctctccccagctctcctccccctggccccgtcgccccgccctcgccgggctgggctgcggggtcaggggccgagcggagagggttatcatttaacatggaagaagatgagttcattggagaaaaaacattccaacgttattgtgcagaattcattaaacattcacaacagataggtgatagttgggaatggagaccatcaaaggactgttctgatggctacatgtgcaaaatacactttcaaattaagaatgggtctgtgatgtcacatctaggagcatctacccatggacagacatgtcttcccatggaggaggctttcgagctacccttggatgattgtgaagtgattgaaactgcagcagcgtccgaagtgattaaatatgagtatcatgtcttatattcctgtagctaccaagtgcctgtactttactttagggcaagctttttagatgggagacctttaactctgaaggacatatgggaaggagttcatgagtgctataagatgcgactgctacagggaccatgggacactattacgcaacaggaacatccaatacttgggcaacccttttttgtacttcatccctgcaagacgaatgaattcatgactcctgtattaaagaattctcagaaaatcaataagaatgtcaactatatcacatcatggctgagcattgtagggccagttgttgggctgaatctacctctgagttatgccaaagcaacgtctcaggatgaacgaaatgtcccttaacaagattcttctattgagtttaggaattgcggcacgaagaatgccaagagtttacctggccagccctggctttaataggactgataccatggaatatttcatctcaccaagatgtgacatggattatttttcccttggacacaaatgtctacagcaactggtgtttgataggctgaatgtttagaagaaacacttcaaagggatacatcatggccaggcatggtggctcacacctgtaatccaagcactttgggaggccaaggtgggagcatcacttgatcctgggagttcgagaccagcctgggcaacatggtgaaaccctgtcggtacaaaaaaatacaaaaatttgcctgtttatggtggtgtgttcctgtagtcccagctccccaggaggctgaggtgggaggttggctttaacccaggaggcagaggttgcagtgagctgagactgtgccactgcagtccagcctgggtgacagagccagacactgtctcggggaaaaaaaaaaaaaaaaaaagacacatcactataaatagcaaaaaaacaaatctaacttattaatactaggaataccaacattattagggcacttgcaggttattcttttctaggccaagtacttcacttccatttgtctgacatggagattgagggagaaatgtatttgtgtgttcattttaatgtaagatatataaaaattaaattactggatttacctgtccctgaaactggtgttataaacatgacctatcttaagtgattttcccacaatcaaactcaggaacaatagattatttctgttttactccaaaagagagagagagagtgagtgtgagtgtgtgtgtgtgtgtgtgtgtatgtgtgggtgtttgtgtagatagttgtaaaacaaagaaaaaacacaatattttactgtgagataatatgttttaccagcaaagtgtggcatagtaattagaagttttctaaaaagctataggagatatttaaacattaaaatttctttttgacctatagtaataaaacaatggtcattttacccctctgcttctcaaccccacagctgctctgctgtactctttgagggctcttgagcgagtcttcatgtccctgagacttattttcctcatctttaatttgaaactaacaagctacctcatagggttgctgtgagaaccacatgagatcattaatgcatgataagatattgtaaagtattatacgaatattcattaaatgctcacctttcttgtatataattggtattcactaaggctgtaaataagtttcatagccagttaagtattaagataaacctaacctggaacaattttttttttggttgcttgtttt

SEQ ID NO: 5287 - protein, 220 aa, Homo sapiens; identical to SEQ ID NO: 670

SEQ ID NO: 5288 - DNA, 1099 bp, Homo sapiens
gtgcgcacgctccgactcggccgtggcggacctgactgaaggaggccgcggacctgactgaaggaggccacggccacttctggttggcctcggggcgcgctggctcggctcttcctccgccctcgaggcccccgcagtcccatcattcagttccgtagggtcaccggcgcggcagtggcctcgcagggcgctgggtccctctccccagctctcctccccctggccccgtcgccccgccctcgccgggctgggctgcggggtcaggggccgagcggagaggggtgagtattccccacagcccttgccggttgtctcctcccggctctgcttcccacacggtccttgccccactcctaggacagggaggaagggcacgcgcgggtaggcgggaaacagcccagtcctgaacaaaaggccggggaagcgggtccccgccggtaactgcaggcctgtgctggccgccgcgagcggggaagggcgaggacactccctcctcggggacccggtccccgtcgcgcacacggtgtcaccagcacacctggcccagtacccaaagcaccctcgaattatcatttaacatggaagaagatgagttcattggagaaaaaacattccaacgttattgtgcagaattcattaaacattcacaacagataggtgatagttgggaatggagaccatcaaaggactgttctgatggctacatgtgcaaaatacactttcaaattaagaatgggtctgtgatgtcacatctaggagcatctacccatggacagacatgtcttcccatggaggtgaagtcttgctctgtcacccaggctggagtgcagttgcgtgatctcagctcactgcaacctccgccttctgggttcaagcagttctcctgcctcagccttccgagtaactgggactacaggggttcaccactacacctggctaattttttgtatttttagtagagataaggtttcaccatgttggtcaggctggtcttgaactcctgacatcaagtaatccatccgcctcagcctcccaaagtgctgagattacaggcatgagccactgtgcctggccctgagcttaaaataaaagttaaatt

SEQ ID NO: 5289 - protein, 125 aa, Homo sapiens; identical to SEQ ID NO: 5283

SEQ ID NO: 5290 - DNA, 956 bp, Homo sapiens
gtgcgcacgctccgactcggccgtggcggacctgactgaaggaggccgcggacctgactgaaggaggccacggccacttctggttggcctcggggcgcgctggctcggctcttcctccgccctcgaggcccccgcagtcccatcattcagttccgtagggtcaccggcgcggcagtggcctcgcagggcgctgggtccctctccccagctctcctccccctggccccgtcgccccgccctcgccgggctgggctgcggggtcaggggccgagcggagagggtagagacggggtttcaccgtgttagccaagatggtctcgatctcctgacctcgtgatccgcccgcctcggcctcccaaagtgctgggattacaggcgtgagccactgcgcccggcctgttgtacagttattaaagttatcatttaacatggaagaagatgagttcattggagaaaaaacattccaacgttattgtgcagaattcattaaacattcacaacagataggtgatagttgggaatggagaccatcaaaggactgttctgatggctacatgtgcaaaatacactttcaaattaagaatgggtctgtgatgtcacatctaggagcatctacccatggacagacatgtcttcccatggaggtgaagtcttgctctgtcacccaggctggagtgcagttgcgtgatctcagctcactgcaacctccgccttctgggttcaagcagttctcctgcctcagccttccgagtaactgggactacaggggttcaccactacacctggctaattttttgtatttttagtagagataaggtttcaccatgttggtcaggctggtcttgaactcctgacatcaagtaatccatccgcctcagcctcccaaagtgctgagattacaggcatgagccactgtgcctggccctgagcttaaaataaaagttaaattaaaaaaa

SEQ ID NO: 5291 - protein, 125 aa, Homo sapiens; identical to SEQ ID NO: 5283

SEQ ID NO: 5292 - DNA, 1537 bp, Homo sapiens
gtagagacggggtttcaccgtgttagccaagatggtctcgatctcctgacctcgtgatccgcccgcctcggcctcccaaagtgctgggattacaggcgtgagccactgcgcccggcctgttgtacagttattaaagttatcatttaacatggaagaagatgagttcattggagaaaaaacattccaacgttattgtgcagaattcattaaacattcacaacagataggtgatagttgggaatggagaccatcaaaggactgttctgatggctacatgtgcaaaatacactttcaaattaagaatgggtctgtgatgtcacatctaggagcatctacccatggacagacatgtcttcccatggaggaggctttcgagctacccttggatgattgtgaagtgattgaaactgcagcagcgtccgaagtgattaaatatgagtatcatgtcttatattcctgtagctaccaagtgcctgtactttactttagggcaagctttttagatgggagacctttaactctgaaggacatatgggaaggagttcatgagtgctataagatgcgactgctacagggaccatgggacactattacgcaacaggaacatccaatacttgggcaacccttttttgtacttcatccctgcaagacgaatgaattcatgactcctgtattaaagaattctcagaaaatcaataagaatgtcaactatatcacatcatggctgagcattgtagggccagttgttgggctgaatctacctctgagttatgccaaagcaacgtctcaggatgaacgaaatgtcccttaacaagattcttctattgagtttaggaattgcggcacgaagaatgccaagagtttacctggccagccctggctttaataggactgataccatggaatatttcatctcaccaagatgtgacatggattatttttcccttggacacaaatgtctacagcaactggtgtttgataggctgaatgtttagaagaaacacttcaaagggatacatcatggccaggcatggtggctcacacctgtaatccaagcactttgggaggccaaggtgggagcatcacttgatcctgggagttcgagaccagcctgggcaacatggtgaaaccctgtcggtacaaaaaaatacaaaaatttgcctgtttatggtggtgtgttcctgtagtcccagctccccaggaggctgaggtgggaggttggctttaacccaggaggcagaggttgcagtgagctgagactgtgccactgcagtccagcctgggtgacagagccagacactgtctcggggaaaaaaaaaaaaaaaaaaagacacatcactataaatagcaaaaaaacaaatctaacttattaatactaggaataccaacattattagggcacttgcaggttattcttttctaggccaagtacttcacttccatttgtctgacatggagattgagggagaaatgtatttgtgtgttcattttaatgtaagatatataaaaattaaattactggatttacctgtccctg

SEQ ID NO: 5293 - protein, 220 aa, Homo sapiens; identical to SEQ ID NO: 670

SEQ ID NO: 5294 - DNA, 1160 bp, Homo sapiens
ccaggctggtctcgaactcctgggttcaagctgtcctcctgctttggcctcccaaattgctgggattacagatgtgagccaccacgcctggccaaaaccattttttagtggccttgaggccattctacatcccaaattttggtttattgacagaaataaatcaattggcagaattcctttcaatataattctaaagttgatgctaatacttagtttttgtattgcagttatcatttaacatggaagaagatgagttcattggagaaaaaacattccaacgttattgtgcagaattcattaaacattcacaacagataggtgatagttgggaatggagaccatcaaaggtaagaatggaaatgtttgttttctgtctcaaaagaggattttttgttttgttttgttttggtttgttgacaggtaaaacctccataattgaaattaaggtatgaaaactggtttgatttagtaaaagtcttaaattgaagaatgtcttacaacagatgtccattttcttacttcaactatatatattgattattatcaggctaatgaagtattattttgaaaagtccttacgtaacctgcttaatttaatagataaaaattagcatattaattatctgaatgtaaacagatgtttctgtggtgcttcaaatcatcaatcctaagttaatattcttaggaaactactttcgtctggagagtaaaaagacaatcttgaaaccaaaccataaacaatcacaaattctgaaatattgaggactgtattaattgggaatttcctattaatataaacatatttcaaaatattttttcttttttgagatcatctcactctgtcccccacgctggagtgcagtgcccaaatttttttgtctttttgagatggattctagttctgttctggagtacagtggcgcaatctcggctcactgcaatctccacctcctgggttcaagcgattcttgtgcctcagcctcccgagtagctgggactataggcacacaccactgtacccggctaatttttgtattttgagtagagacggggtttcaccatgttggcctggctggtcttgaactactgacctcaagtgatctgcctgcctccacctcccaaagtgctgggattacaggcgtgaaccaccacgcctggcc

SEQ ID NO: 5295 - protein, 70 aa, Homo sapiens [sequence omitted]

SEQ ID NO: 5296 - DNA, 4819 bp, Homo sapiens
cacacgcacgccgcctctgtttgtacacagtgcgctcccggcggcccgctcgctcccctccagctcacgcttcattgttctccaagtcagaagccccgcagccgccgcgcggagaacagcgacagccgagcgcccggtccgcctgtctgccggtgggtctgcctgcccgcgcagcagacccggggcggccgcgggagcccgcgccccgcccgccgcgcctctgccgggacccacccgcagcggagggctgagcccgccggcggctccccggagctcacccacctccgcgcgccggagcgcaggcaaaaggggaggaaaggctcctctctttagtcaccactctcgccctctccaagaatttgtttaacaaagcgctgaggaaagagaacgtcttcttgaattctttagtaggggcggagtctgctgctgccctgcgctgccacctcggctacactgccctccgcgacgacccctgaccagccggggtcacgtccgggagacgggatcatgaagcgctcggtagccgtctggctcttggtcgggctcagcctcggtgtcccccagttcggcaaaggtgatatttgtgatcccaatccatgtgaaaatggaggtatctgtttgccaggattggctgatggttccttttcctgtgagtgtccagatggcttcacagaccccaactgttctagtgttgtggaggttgcatcagatgaagaagaaccaacttcagcaggtccctgcactcctaatccatgccataatggaggaacctgtgaaataagtgaagcataccgaggggatacattcataggctatgtttgtaaatgtccccgaggatttaatgggattcactgtcagcacaacataaatgaatgcgaagttgagccttgcaaaaatggtggaatatgtacagatcttgttgctaactattcctgtgagtgcccaggcgaatttatgggaagaaattgtcaatacaaatgctcaggcccactgggaattgaaggtggaattatatcaaaccagcaaatcacagcttcctctactcaccgagctctttttggactccaaaaatggtatccctactatgcacgtcttaataagaaggggcttataaatgcgtggacagctgcagaaaatgacagatggccgtggattcagataaatttgcaaaggaaaatgagagttactggtgtgattacccaaggagccaagaggattggaagcccagagtatataaaatcctacaaaattgcctacagtaatgatggaaagacttgggcaatgtacaaagtgaaaggcaccaatgaagacatggtgtttcgtggaaacattgataacaacactccatatgctaactctttcacaccccccataaaagctcagtatgtaagactctatccccaagtttgtcgaagacattgcactttgcgaatggaacttcttggctgtgaactgtcgggttgttctgagcctctgggtatgaaatcaggacatatacaagactatcagatcactgcctccagcatcttcagaacgctcaacatggacatgttcacttgggaaccaaggaaagctcggctggacaagcaaggcaaagtgaatgcctggacctctggccacaatgaccagtcacaatggttacaggtggatcttcttgttccaaccaaagtgactggcatcattacacaaggagctaaagattttggtcatgtacagtttgttggctcctacaaactggcttacagcaatgatggagaacactggactgtataccaggatgaaaagcaaagaaaagataaggttttccagggaaattttgacaatgacactcacagaaaaaatgtcatcgaccctcccatctatgcacgacacataagaatccttccttggtcctggtacgggaggatcacattgcggtcagagctgctgggctgcacagaggaggaatgaggggaggctacatttcacaaccctcttccctatttccctaaaagtatctccatggaatgaactgtgcaaaatctgtaggaaactgaatggtttttttttttttttcatgaaaaagtgctcaaattatggtaggcaactaacggtgtttttaagggggtctaagcctgccttttcaatgatttaatttgattttattttatccgtcaaatctcttaagtaacaacacattaagtgtgaattacttttctctcattgtttcctgaattattcgcattggtagaaatatattagggaaagaaagtagccttctttttatagcaagagtaaaaaagtctcaaagtcatcaaataagagcaagagttgatagagcttttacaatcaatactcacctaattctgataaaaggaatactgcaatgttagcaataagtttttttcttctgtaatgactctacgttatcctgtttccctgtgcctaccaaacactgtcaatgtttattacaaaattttaaagaagaatatgtaacatgcagtactgatattataattctcattttactttcattatttctaataagagattatgtgacttctttttcttttagttctattctacattcttaatattgtatattacctgaataattcaatttttttctaattgaatttcctattagttgactaaaagaagtgtcatgtttactcatatatgtagaacatgactgcctatcagtagattgatctgtatttaatattcgttaattaaatctgcagttttatttttgaaggaagccataactatttaatttccaaataattgcttcataaagaatcccatactctcagtttgcacaaaagaacaaaaaatatatatgtctctttaaatttaaatcttcatttagatggtaattacatatccttatatttactttaaaaaatcggcttatttgtttattttataaaaaatttagcaaagaaatattaatatagtgctgcatagtttggccaagcatactcatcatttctttgttcagctccacatttcctgtgaaactaacatcttattgagatttgaaactggtggtagtttcccaggaaggcacaggtggagttatttgtgagaagcaaagtgtttactaatgacaaagtagtaaaccattttcaagatgaaaactgatttctatttattttgcttcaaaggtcctgaaaaaataagcaattatcataacaatttgttattgatactggaggtttcattgacatgtctctcaaattaaagctcacactgcctccataaaagtcttcaacatctaatttataagctttacaagtatttattttataaggcttagacagaattattggagttttaaattaagtgtattggaaaagaaaggatggtatgtgtatgaaatgttaagatcctacgcaacactgctatttttttcctttaatatttgtgctgcataacaaaagccactagactgttactgtcttgtctgtccatgtgttaacagcatttcttaatgatgtatatatggagtggtcttcaatcatagtgaagaatttaaagagaaagtcaattgtattggcatttttaataagaacaaaattagttcgtctaaggggactggctggccacatatttgttccttgcccatatgctttctacttcttgttcttattatgaaattatgaatttgaagcctctgaaatggtgatcagttttcaacatctttcaaaaacaaaattactatttcctccatattgccttttttagataactttaaagttaggattttaaaatatttgtaactggctaaattttaaagtcgtgacaaataattacttaggttcagaaatatacacacacttactctttagccagtttctttcaaggtttactgtcccatcagatatctagccattttcctttgcaaattacataccttcttaagagtgtatttttaagattattacttacgctttatgatgatatagtttttcaaaattatttatagcttcatatgatgttttgtaattttttctattgatacctgttttaaaaatattttccaaggaagttgattaaaattatatttgttaccttttagaaaaagcattgaaatgagtttctcttgctttttcattttccctctgctttatatgctcttcgcaatacatcatgtccaacgggatacctattgttctcatgacacccaaaattgatgagagcaaaggggtcgcaccatatggaaatgttgaaaactattgtaaagtagtattatgaagtagcttttgtgtcattcatgtcgatgacatgaaagtgaagtaaatttattctatgtaaattcacactaaaaccagtacagtaccataagtagaatacatgtaagaatcacctagtcttcactatattgagtaaatataacatgctaattttacaattaatgaaactaaacttttaaacatctccattatatctacatccttttgaaggtatttatcatagttgccaattttaattttaggattgactttctctttctgaatgacttcataaagtttggtgtgaattttgaagacttgggttactaatgattgtatctttgctagtcaacaacttatgaaatatactcaatgcgtctgatgtgtcattaagtgcagaaataactaagacacaaataacctttgcaaaccttcaagctgtgtaatattccaatgttgtttttttctttgtatatatacttatatcacgtaggatgtaaaaccagtatgaccttgtctagtctccaaacttaaaataaacttttgaaaagctgggattcttttgaagcagttgtaattaaacacatttataagaatacaca

SEQ ID NO: 5297 - protein, 480 aa, Homo sapiens; identical to SEQ ID NO: 672

SEQ ID NO: 5298 - DNA, 4773 bp, Homo sapiens
cacacgcacgccgcctctgtttgtacacagtgcgctcccggcggcccgctcgctcccctccagctcacgcttcattgttctccaagtcagaagccccgcagccgccgcgcggagaacagcgacagccgagcgcccggtccgcctgtctgccggtgggtctgcctgcccgcgcagcagacccggggcggccgcgggagcccgcgccccgcccgccgcgcctctgccgggacccacccgcagcggagggctgagcccgccggcggctccccggagctcacccacctccgcgcgccggagcgcaggcaaaaggggaggaaaggctcctctctttagtcaccactctcgccctctccaagaatttgtttaacaaagcgctgaggaaagagaacgtcttcttgaattctttagtaggggcggagtctgctgctgccctgcgctgccacctcggctacactgccctccgcgacgacccctgaccagccggggtcacgtccgggagacgggatcatgaagcgctcggtagccgtctggctcttggtcgggctcagcctcggtgtcccccagttcggcaaaggtgatatttgtgatcccaatccatgtgaaaatggaggtatctgtttgccaggattggctgatggttccttttcctgtgagtgtccagatggcttcacagaccccaactgttctagtgttgtggaggttgcatcagatgaagaagaaccaacttcagcaggtccctgcactcctaatccatgccataatggaggaacctgtgaaataagtgaagcataccgaggggatacattcataggctatgtttgtaaatgtccccgaggatttaatgggattcactgtcagcacaacataaatgaatgcgaagttgagccttgcaaaaatggtggaatatgtacagatcttgttgctaactattcctgtgagtgcccaggcgaatttatgggaagaaattgtcaatacaaatgctcaggcccactgggaattgaaggtggaattatatcaaaccagcaaatcacagcttcctctactcaccgagctctttttggactccaaaaatggtatccctactatgcacgtcttaataagaaggggcttataaatgcgtggacagctgcagaaaatgacagatggccgtggattcagataaatttgcaaaggaaaatgagagttactggtgtgattacccaaggagccaagaggattggaagcccagagtatataaaatcctacaaaattgcctacagtaatgatggaaagacttgggcaatgtacaaagtgaaaggcaccaatgaagacatggtgtttcgtggaaacattgataacaacactccatatgctaactctttcacaccccccataaaagctcagtatgtaagactctatccccaagtttgtcgaagacattgcactttgcgaatggaacttcttggctgtgaactgtcgggttgttctgagcctctgggtatgaaatcaggacatatacaagactatcagatcactgcctccagcatcttcagaacgctcaacatggacatgttcacttgggaaccaaggaaagctcggctggacaagcaaggcaaagtgaatgcctggacctctggccacaatgaccagtcacaatggttacaggtggatcttcttgttccaaccaaagtgactggcatcattacacaaggagctaaagattttggtcatgtacagtttgttggctcctacaaactggcttacagcaatgatggagaacactggactgtataccaggatgaaaagcaaagaaaagataaggttttccagggaaattttgacaatgacactcacagaaaaaatgtcatcgaccctcccatctatgcacgacacataagaatccttccttggtcctggtacgggaggatcacattgcggtcagagctgctgggctgcacagaggaggaatgaggggaggctacatttcacaaccctcttccctatttccctaaaagtatctccatggaatgaactgtgcaaaatctgtaggaaactgaatggtttttttttttttttcatgaaaaagtgctcaaattatggtaggcaactaacggtgtttttaagggggtctaagcctgccttttcaatgatttaatttgattttattttatccgtcaaatctcttaagtaacaacacattaagtgtgaattacttttctctcattgtttcctgaattattcgcattggtagaaatatattagggaaagaaagtagccttctttttatagcaagagtaaaaaagtctcaaagtcatcaaataagagcaagagttgatagagcttttacaatcaatactcacctaattctgataaaaggaatactgcaatgttagcaataagtttttttcttctgtaatgactctacgttatcctgtttccctgtgcctaccaaacactgtcaatgtttattacaaaattttaaagaagaatatgtaacatgcagtactgatattataattctcattttactttcattatttctaataagagattatgtgacttctttttcttttagttctattctacattcttaatattgtatattacctgaataattcaatttttttctaattgaatttcctattagttgactaaaagaagtgtcatgtttactcatatatgtagaacatgactgcctatcagtagattgatctgtatttaatattcgttaattaaatctgcagttttatttttgaaggaagccataactatttaatttccaaataattgcttcataaagaatcccatactctcagtttgcacaaaagaacaaaaaatatatatgtctctttaaatttaaatcttcatttagatggtaattacatatccttatatttactttaaaaaatcggcttatttgtttattttataaaaaatttagcaaagaaatattaatatagtgctgcatagtttggccaagcatactcatcatttctttgttcagctccacatttcctgtgaaactaacatcttattgagatttgaaactggtggtagtttcccaggaaggcacaggtggagttatttgtgagaagcaaagtgtttactaatgacaaagtagtaaaccattttcaagatgaaaactgatttctatttattttgcttcaaaggtcctgaaaaaataagcaattatcataacaatttgttattgatactggaggtttcattgacatgtctctcaaattaaagctcacactgcctccataaaagtcttcaacatctaatttataagctttacaagtatttattttataaggcttagacagaattattggagttttaaattaagtgtattggaaaagaaaggatggtatgtgtatgaaatgttaagatcctacgcaacactgctatttttttcctttaatatttgtgctgcataacaaaagccactagactgttactgtcttgtctgtccatgtgttaacagcatttcttaatgatgtatatatggagtggtcttcaatcatagtgaagaatttaaagagaaagtcaattgtattggcatttttaataagaacaaaattagttcgtctaaggggactggctggccacatatttgttccttgcccatatgctttctacttcttgttcttattatgaaattatgaatttgaagcctctgaaatggtgatcagttttcaacatctttcaaaaacaaaattactatttcctccatattgccttttttagataactttaaagttaggattttaaaatatttgtaactggctaaattttaaagtcgtgacaaataattacttaggttcagaaatatacacacacttactctttagccagtttctttcaaggtttactgtcccatcagatatctagccattttcctttgcaaattacataccttcttaagagtgtatttttaagattattacttacgctttatgatgatatagtttttcaaaattatttatagcttcatatgatgttttgtaattttttctattgatacctgttttaaaaatattttccaaggaagttgattaaaattatatttgttaccttttagaaaaagcattgaaatgagtttctcttgctttttcattttccctctgctttatatgctcttcgcaatacatcatgtccaacgggatacctattgttctcatgacacccaaaattgatgagagcaaaggggtcgcaccatatggaaatgttgaaaactattgtaaagtagtattatgaagtagcttttgtgtcattcatgtcgatgacatgaaagtgaagtaaatttattctatgtaaattcacactaaaaccagtacagtaccataagtagaatacatgtaagaatcacctagtcttcactatattgagtaaatataacatgctaattttacaattaatgaaactaaacttttaaacatctccattatatctacatccttttgaaggtatttatcatagttgccaattttaattttaggattgactttctctttctgaatgacttcataaagtttggtgtgaattttgaagacttgggttactaatgattgtatctttgctagtcaacaacttatgaaatatactcaatgcgtctgatgtgtcattaagtgcagaaataactaagacacaaataacctttgcaaaccttcaagctgtgtaatattccaatgttgtttttttctttgtatatatacttatatcacgtaggatgtaaaaccagtatgaccttgtctagtctccaaacttaaaataaacttttgaaaagctggg

SEQ ID NO: 5299 - protein, 480 aa, Homo sapiens; identical to SEQ ID NO: 672

SEQ ID NO: 5300 - DNA, 2324 bp, Homo sapiens
cacacgcacgccgcctctgtttgtacacagtgcgctcccggcggcccgctcgctcccctccagctcacgcttcattgttctccaagtcagaagccccgcagccgccgcgcggagaacagcgacagccgagcgcccggtccgcctgtctgccggtgggtctgcctgcccgcgcagcagacccggggcggccgcgggagcccgcgccccgcccgccgcgcctctgccgggacccacccgcagcggagggctgagcccgccggcggctccccggagctcacccacctccgcgcgccggagcgcaggcaaaaggggaggaaaggctcctctctttagtcaccactctcgccctctccaagaatttgtttaacaaagcgctgaggaaagagaacgtcttcttgaattctttagtaggggcggagtctgctgctgccctgcgctgccacctcggctacactgccctccgcgacgacccctgaccagccggggtcacgtccgggagacgggatcatgaagcgctcggtagccgtctggctcttggtcgggctcagcctcggtgtcccccagttcggcaaaggtggtccctgcactcctaatccatgccataatggaggaacctgtgaaataagtgaagcataccgaggggatacattcataggctatgtttgtaaatgtccccgaggatttaatgggattcactgtcagcacaacataaatgaatgcgaagttgagccttgcaaaaatggtggaatatgtacagatcttgttgctaactattcctgtgagtgcccaggcgaatttatgggaagaaattgtcaatacaaatgctcaggcccactgggaattgaaggtggaattatatcaaaccagcaaatcacagcttcctctactcaccgagctctttttggactccaaaaatggtatccctactatgcacgtcttaataagaaggggcttataaatgcgtggacagctgcagaaaatgacagatggccgtggattcagataaatttgcaaaggaaaatgagagttactggtgtgattacccaaggagccaagaggattggaagcccagagtatataaaatcctacaaaattgcctacagtaatgatggaaagacttgggcaatgtacaaagtgaaaggcaccaatgaagacatggtgtttcgtggaaacattgataacaacactccatatgctaactctttcacaccccccataaaagctcagtatgtaagactctatccccaagtttgtcgaagacattgcactttgcgaatggaacttcttggctgtgaactgtcgggttgttctgagcctctgggtatgaaatcaggacatatacaagactatcagatcactgcctccagcatcttcagaacgctcaacatggacatgttcacttgggaaccaaggaaagctcggctggacaagcaaggcaaagtgaatgcctggacctctggccacaatgaccagtcacaatggttacaggtggatcttcttgttccaaccaaagtgactggcatcattacacaaggagctaaagattttggtcatgtacagtttgttggctcctacaaactggcttacagcaatgatggagaacactggactgtataccaggatgaaaagcaaagaaaagataaggttttccagggaaattttgacaatgacactcacagaaaaaatgtcatcgaccctcccatctatgcacgacacataagaatccttccttggtcctggtacgggaggatcacattgcggtcagagctgctgggctgcacagaggaggaatgaggggaggctacatttcacaaccctcttccctatttccctaaaagtatctccatggaatgaactgtgcaaaatctgtaggaaactgaatggtttttttttttttttcatgaaaaagtgctcaaattatggtaggcaactaacggtgtttttaagggggtctaagcctgccttttcaatgatttaatttgattttattttatccgtcaaatctcttaagtaacaacacattaagtgtgaattacttttctctcattgtttcctgaattattcgcattggtagaaatatattagggaaagaaagtagccttctttttatagcaagagtaaaaaagtctcaaagtcatcaaataagagcaagagttgatagagcttttacaatcaatactcacctaattctgataaaaggaatactgcaatgttagcaataagtttttttcttctgtaatgactctacgttatcctgtttccctgtgcctaccaaacactgtcaatgtttattacaaaattttaaagaagaatatgtaacatgc

SEQ ID NO: 5301 - protein, 428 aa, Homo sapiens
MKRSVAVWLLVGLSLGVPQFGKGGPCTPNPCHNGGTCEISEAYRGDTFIGYVCKCPRGFNGIHCQHNINECEVEPCKNGGICTDLVANYSCECPGEFMGRNCQYKCSGPLGIEGGIISNQQITASSTHRALFGLQKWYPYYARLNKKGLINAWTAAENDRWPWIQINLQRKMRVTGVITQGAKRIGSPEYIKSYKIAYSNDGKTWAMYKVKGTNEDMVFRGNIDNNTPYANSFTPPIKAQYVRLYPQVCRRHCTLRMELLGCELSGCSEPLGMKSGHIQDYQITASSIFRTLNMDMFTWEPRKARLDKQGKVNAWTSGHNDQSQWLQVDLLVPTKVTGIITQGAKDFGHVQFVGSYKLAYSNDGEHWTVYQDEKQRKDKVFQGNFDNDTHRKNVIDPPIYARHIRILPWSWYGRITLRSELLGCTEEE

SEQ ID NO: 5302 - DNA, 893 bp, Homo sapiens
gcaaagtgacttccaacaagacaggggtaaaagaacctgagctagagtccagacaaccaaatctgttaaaggtagaatatggtgatgggtgctgtgcaagaagaaggagggaagaaggaagctgagtgtgcagcaaagacacctgcagggacacatagaaccaggcatttgctgaaggacacctggattgcacaaccagcggctaacttgcatgaaaaaacattctaggtggttttgcttaatgttggtctctccaactgtgctacaagctccatgaggtgaaggaccaagttaattgtgtcttccatggtatgtcccagtcctgccactttaggcattttaaatatttgctgaatattgtttgaataaataatttgtggagaattggaagagatttgtgggataaatatttttatatggcatgtggttgaacctgcatatgcttttctattttaacaatattgtcattgggactgtagaatttgactcataaacatcactttgcttttcttggaattctaattcatatttacagtttcaaatgtcacctctcttttaagttccacgtcaacatatttgcctaatccttggatgtcctgccatttgaacttgaaatgtctaaaatctaatttgtcattttttaaaactgactcaaataataatctcacgtgtttcctatgttctaggtcagaaaattgtacacaacttaaatttttccttttgcttcctatgtctgttcataactatatcttattagccatgaagttgtgtttttctgttcctttttatattttttgcatattcatttcttttccatccctgtcctggaagccctgactacctgacaaccactacatcctggttcccttggctttcctttctcttctttccag

SEQ ID NO: 5303 - protein, 81 aa, Homo sapiens
MSCHLNLKCLKSNLSFFKTDSNNNLTCFLCSRSENCTQLKFFLLLPMSVHNYILLAMKLCFSVPFYIFCIFISFPSLSWKP

SEQ ID NO: 5304 - DNA, 729 bp, Homo sapiens
attctcaagctgctgcagaactcgactgccattgaaatgtgcaaaagaaaaatttcctggcatcttaaaaaaaatgtcgaagtcagttactccacaagccctgtttgtaagagtccttgaaaagagaagcatcagttttccaatatgaagtaaatggagagtctggagttgcttctgttggccatcaatttcctgtggtgcagaggggctacaaatataatacagattaaactccctgcaggaagtctcttatggataagaacaagttcagcttcccattggggatgacagagctggtgctcaggtcatcaacatcctgctgaacctatgagaaagcatttgggacaacttgacaatgcatggtgagtcagaaagtttgctttttgattcaactatttaaaattccctattattttctttgtttttggctgccttttgcttaattgtcttgtcagctgtcctaagcctgacagccatatgaggtcaagcagaaaaactgaactggggaaataatcatagttcttcaatggattgtttctgaaaactgaatatgaggagagaatattcataggtatggcataacttccattttgtagctggaagaaatcatacccccaaattatgacaatttatagaattatgagttgaatgtttgtgtaagtatatgccttcatatttttaaacatgtataggctgcattattttctgccaataaattttatggctttt

SEQ ID NO: 5305 - protein, 44 aa, Homo sapiens
MESLELLLLAINFLWCRGATNIIQIKLPAGSLLWIRTSSASHWG

SEQ ID NO: 5306 - DNA, 629 bp, Homo sapiens
aggctggaagtccaagatcaaggtgctatcagggttggtttcggctgtggcctctcttcctggcttgtagacagctatcttctcgcagtgtcctcacgtggcctctttgtgtgaagttaaaaatgaacagatcaaccttttactcttctctgaaaaatatagtgaaattaataatcaagaacgattttctgaaatgaaaacatccgaacagcatactgcaaagacattcaggggaaaataaaataggttttggcaaacgtctaatgacacagagccaccattgccaatttcaccactgtctttcaccaagttgattcattttgaactggctccagcaatctactcagagttgacctcagagcaaaaaattgaagtgggaagctgctaaagaatgtgcttgactaaaacaaggcaataagcaaaaggaagtcatagcatccagaaaatgggatccatcatgcgcacaaagaaaaggtgaagaaaatttccaggatgttcagaacccaccaaaaacgaaagattctggtccagatcagaagagagggaaacactctgaaaaagtccctcaaatacaaaattaaacagagtttaaatgatgtgcttgaccacaataaaaggcttcttgctct

SEQ ID NO: 5307 - protein, 44 aa, Homo sapiens
MFRTHQKRKILVQIRREGNTLKKSLKYKIKQSLNDVLDHNKRLL

SEQ ID NO: 5308 - DNA, 778 bp, Homo sapiens
tttggcaaacgtctaatgacacagagccaccattgccaatttcaccactgtctttcaccaagttgattcattttgaactggctccagcaatctactcagagttgacctcagagcaaaaaattgaacaacagctccatatgttgatgtgaactgtgactccaggagaacggtggaaaagtgtcttgatccaggaaggaaggggtatagagaaaatatgagtctcaccacactagaagcaacatatgcaaaatccatcaaacacaccataaaatcaatgtgggagtaacaacaccttggcctactgctccctgaaaagtttttctctcgtcaagtgatgacaggcgtacatttgtaaataaattaccaagttgcttttgatttgatggagaaggaagaaaaggattgtctcctggaagtatttttattgtcttaataggtaggataatatctctgttcagcaaactgagatcttttgagaatcttaacaaatgtatacccctccctctcaccttttcctctctggtgtatttcataggcagctttgctaactgactgcactactacaaatagattctgtcactttagaaataggatttttccttttataggcagattgatggactaagtgtcaaggttttagaacagtagcatgactggggcagacactataaaccataaatccagtattgacaaatgttctagccaatccagattttctatttgttaaattgcctttatgaagtcatacttgtgcagcacagaatatggaaaataattg

SEQ ID NO: 5309 - protein, 57 aa, Homo sapiens
FDGEGRKGLSPGSIFIVLIGRIISLFSKLRSFENLNKCIPLPLTFSSLVYFIGSFAN

SEQ ID NO: 5310 - DNA, 497 bp, Homo sapiens
cttctatatagtagacactcaaaatgcttattaaactgcatttacattcagcagagataaacagagtggaaagctgccatagcattacctgtggaaatgaatgaaagcctgtgattcggatcctaatgggagaaaagtgccatggcagaaggagattctgttgagaagataaatgccctctgactatgtcttcttcaatcctcaaaaatattgccattatgtttgagagcagttgataaagcatagtgtgctgggaagagtgctggagaaggagtcagttgaccttcacgactgtccaattctgcaatgagcaagctgtgtcactttgggcaaatcatgggttctctgtttctctgtttcatctataaagtgaggcaatgaaatattatgatcttaaattatttctttacagttatatgacattaatcaattcctgacttccttcttccattggtcataaatatgtgtatgtatgtataatatattcatagataatg

SEQ ID NO: 5311 - protein, 42 aa, Homo sapiens
SIVCWEECWRRSQLTFTTVQFCNEQAVSLWANHGFSVSLFHL

SEQ ID NO: 5312 - DNA, 4364 bp, Homo sapiens
ggagtcggcggctcgggcagctctgcgattagggcggcggagttggcgggtgcacgttggaaatctcggaaatgccaggcacagctacctaccggcctcagaaagtgtgtttgtgtccatttctcccagcgcaccctctgcatatctctacccacttgtacataattcagcatccagcagaggaaaacaaagtgttgcgtacagttcctctactagcagcatgcctcccccaggacaagtgtaaagtgaagatcggtcgtcgcttcagtgaagaaagagatcctgaactttcaactgtttgccggaagtctggtacattaatattatatccaggggctgaagctgctaatttggaagaatttatattagattctcctgtttatccttctacaatcatcatcattgatggtacatggagccaggctaaggacattttctataagaactccttgttccgacatcccaaacaggtgcaattaaaaactagcatttctagtcagtatgtaattcggatgcagccgactaatagatgcctttctacactggagtgtgcagctgttgctctttccatcttggagaaaaataattacatacaagagactttgcttcgccctcttcaagctttatgctcctttcaacttcagcatggtgcccaaattcgcctcagcaaggaacaccttctgaaaaatggattatatcctaaaccaatgccaaagaacaaacgcaaactcaggaaaatggaattgttaatgaatagtgttaaaatttagtacagttattcttttggtgctagcttaactgtcttcatctaacaataccaaattaagttttcatatagttaaggtctgtaggtttttgacttgctaaagaaggagaattgcatactaatcttacccagaagaaggaagtaaaccaaatattcataaatacaaataaacagaaattcactggctcactgaaaagcaggatttcctactgtacttgtttttaaaaatgtgcctctaatacatgttttcaaacccaaatttaaaatatgatttgttgttgtgataggttagaagttcttacttgtaaaatagaagaaaattgttgtagtggattggaacggtgttgtgtccattaatgtttataaataattaggtgtagaccaataatataagattcctacatcagtttgcagtcctgactttacagtttgaaataagtagcaaaagaaaattatgataatcaagtaatttattattttgtaaaatagtataaaggaataaggaaattttaagtattgtttaggggccaaatttgaactcagctaatatgatttaagcgctctattaattgccctgatttttaaagaggtgcatgtaattttgaaatagcacacattttcatttgtaatcactctggataaatttgtatttttcagtgttcattgaacaggcttattgactctggtaaacttattttattgatgttttcatatggaaaataataagtggaatatgatacaattgttattttcagaacatatttctttagggctatttaatataacctttttaacgagcaaaaactttccatttgagagaaaaaattcttcctgctctgtgggaaaatatttgctgagattttgtatagaataagagacatgtatgtaacatatatgtatattcagcacaagtctactgcaattatgtacacattttggcaggaagaggggattttgtttagtctttgtttatgagttctagagtttcctgtatctagtgttaagttgtaaggaaaaactaaacatgccatttaaaggtaaacttggtaactatttatagagcatacaccaatgattatttctcacagttttcatgatcatttgtttattatttacttggattagactcattaaaaggtataatgctggtcacaattagaatgctaatatttggggaaactatgcagaaaatattttaaaatattaaaagagtgctggcttctattgttgatttatttttggatttaaaaacaaattagggctgggcccattagctcacacctgtaatcccagcactttgggaggctgagatgtgagaattgcttgagcccaggagtttgagaccagcctgggcaatatggtgagactccatctccatacaaaattaaaaaaaaaataattagccagatgtggtggtgtgcacttgtagtcctagctacttgggaggctaaggtgggaggatcgctggagcccaggacatcaaggttgcaaggagctatgttcattccactgcactccagcctgggctacagagtgagacctgtctaaaataaataaataaataaacaaactagctcatttacaatgtaaagcacttaatatcaaatgattatttggtgtactagaaaagaaacagcatataataatgtataatagtttcttaacaagtggggctaaaatcattttgtagtaatttttcacattgatattaaacttcatgagtttcttttagtcattattattattattattattatttgagatggaatctcgctctgtcgcccaggctggagtgcagtggcgcaatcttggctcactgaaagctctgcctcctgggttcacgccattcttctgcctcagcctcctgagtagctgggactacaggtgcccaccaccacgcccggctaattttttgtatttttagtagagatggggtttcaccgtattagccaggatggtctcgatctcctgacctcgtgatctgtctgccttggcctccaaaagtgctgggaccgtgcccagccatcattattattttttaaaaagaaaactccccctacccccagtataccattttgtatctcaaaattttactttattgatttttaagagtaatttctacttttatcttttaaataaaacattttagagtatttttgaagacttaaaaagcttaaaatttagtgtttttggaaatgtataaaattttcttgaagtatgtatagttttccaaattactttactgacctgttaactcactgtacttgttttttacttattttttcctgacctcttaacaaggtgagtccatttaatcatctgtggtataaaatgcttctctagtcacctgttctcattaaacagttgtaagtaagttttaaaagccattattttaattactaaaagttctcaagtgtgtagtattatctgagtattttaattgaaaaattaatcaggcttttaaaaattacttttttattgtattagttggcttttaaattcagattctttatatttgcttgatttttcctggaagttccaagttttatgaatttgtagctgatagtaggttttacttgtgtaccccatctgcactttgatgttgtgtagatcgttttgtgagttatttgaaccgtgtaactcagagaatagtatttcctcatacataaagtgacctcacttttaatcagctcctttatagtatgttgaaaatcactgcgtgtaatgagaggtattgagagtttcttgcacacatgagtgtaaaaggttgagaactagattatacaaagtagtaagtcacagtgcatggcaactttctacaggttggattataagacttatgtggaataggagaattatattgggaaaaaattattttctctaacttgaagactccagagacacttttcttagtcatgaccagtaatatttttcatatattttggaagaaataagctcctcactataccaccagttagtgatttatttatttatgtattttagagacagggcctccttctgtcacccagtttggagtgcagtggtgtaatcatagcttactgcagcatcaaactcctgggctcaagtgttcctcctgcctcagcctcccaagtagctagaacctcagccccatgccaccacactcagctaattttaaattttactaatttcatttaatttttgtggagatgggggtcttgctgtgttgtttaggctggtcctgaactcctggcctcaagcgatccttctgccttggcctctcagtaaattatatagaagagcacttctgtataatttactcagtttcttcatcacatatttccaactgttgccctaaataggtttaaaaatgtgatcatgttattagaaaatcctttccattgaatttcagggatgctgaatttcagggagctaaattgttgacccttgcctgtagttgttattggttcagaagtaaattttattgatgctacaagtaaaaaattagatctgacttagtaaactcaaaagttttacaaaactgtattttactatgtagatgtatttctttaaaataggtatggatggatatttttatgaataaataatattgcattat

SEQ ID NO: 5313 - protein, 232 aa, Homo sapiens
MPGTATYRPQKVCLCPFLPAHPLHISTHLYIIQHPAEENKVLRTVPLLAACLPQDKCKVKIGRRFSEERDPELSTVCRKSGTLILYPGAEAANLEEFILDSPVYPSTIIIIDGTWSQAKDIFYKNSLFRHPKQVQLKTSISSQYVIRMQPTNRCLSTLECAAVALSILEKNNYIQETLLRPLQALCSFQLQHGAQIRLSKEHLLKNGLYPKPMPKNKRKLRKMELLMNSVKI

SEQ ID NO: 5314 - DNA, 1088 bp, Homo sapiens
acccgcggtcccgcagcggcgcgcggctgacgctccctcagcgatccggccctccgcggctcctgcgcgaccccacgcaaaagcgccccgtgcgaagagcgcggccagccagtccgcaaagggcctcgggcagtgcgggcagcacgaacggcgcgatcggggagcaggcgcggctacgctccgcctcagtgatgtcgccgggaggatctccgcgcggctacctcctcttccgccgccttcctcccacgccttcacctccctcccccgccgcgctctgcggcgaaaaggagcgggctcccaggccacctcccctctctccacccaggggccgcgcgtcagtggacctgcagcccaggcaacggggctgcggacggcgcgcgtgccctgcctcgcctcacgccggtagctgatgctcccgcggcagctgccaccccagcgccccagccacggcttcagaggctctcgcacgctggctttttttttttccccccgctttggtgaactcgcagtacttgggctgagcccgaaatctcgcgagatgctgcaggcgtcagtgcggcttcccactaggcgcgtggtacccgaggccgggccggagccgcaggccagccgcgattccttcgggcgatgctgggggctttccggtcggggccgcagccgcttccggagccgcgggcgaggtgcgttccccagcctggtttgctctgggctctgacccgccgccgcgaatctccgctcgtaactccgggcctgaacctggaggagggaggatttcctctgtgcagctttcgagcggtagactcaccctgccaggcagacctagattggcataaccagagatcagttccagttgtgatgcagtgggtgtctacacacttctgatgacacctttattttaaaagctgatgttccaagggacgggggtctcactatgttgcccaggctggtctctaactcatggcctcaaatgatcctcctgcctggacctctcaaagtgttggaattgcaggagggagccaccacacccacctgaaagtgacgtattagtctgatgggcttcccctcaaaagtgtagctggctcgattca

SEQ ID NO: 5315 - protein, 101 aa, Homo sapiens [sequence omitted]

SEQ ID NO: 5316 - DNA, 2655 bp, Homo sapiens
acccgcggtcccgcagcggcgcgcggctgacgctccctcagcgatccggccctccgcggctcctgcgcgaccccacgcaaaagcgccccgtgcgaagagcgcggccagccagtccgcaaagggcctcgggcagtgcgggcagcacgaacggcgcgatcggggagcaggcgcggctacgctccgcctcagtgatgtcgccgggaggatctccgcgcggctacctcctcttccgccgccttcctcccacgccttcacctccctcccccgccgcgctctgcggcgaaaaggagcgggctcccaggccacctcccctctctccacccaggggccgcgcgtcagtggacctgcagcccaggcaacggggctgcggacggcgcgcgtgccctgcctcgcctcacgccggtagctgatgctcccgcggcagctgccaccccagcgccccagccacggcttcagaggctctcgcacgctggctttttttttttccccccgctttggtgaactcgcagtacttgggctgagcccgaaatctcgcgagatgctgcaggcgtcagtgcggcttcccactaggcgcgtggtacccgaggccgggccggagccgcaggccagccgcgattccttcgggcgatgctgggggctttccggtcggggccgcagccgcttccggagccgcgggcgaggtgcgttccccagcctggtttgctctgggctctgacccgccgccgcgaatctccgctcgtaactccgggcctgaacctggaggagggaggatttcctctgtgcagctttcgagcggtagactcaccctgccaggcagacctagattggcataaccagagatcagttccagttgtgatgcagtgggtgtctacacacttctgatgacacctttattttaaaagctgatgttccaaggtgcaagcggtcttctctgtcttctttatggccagtaaaattctccagaagagatttatggcagcctcactcccagtagtttctgcatttagtgagataagatggaatcttgctctcttgctcagactggagtgcagtggcatgaccttggctcactgcaacctcacctctcgggttcaagcgattctgcctcagcctctcgagtagctgggactacaggtgggagacctccacagaacccttccagcaagctgtcttctaaagcaaacaagaaaaggaaagtctgagcagttttgattagatttcccagaagtcaaagcaaggaaaaatgaaaaagcttcatttctcacgttcttaaaagagagcacagatgttgcatcatctggttagataccctgagaataaaatctggatccagtgagaggaaagattctgggtgctcatgaaaaaagaaacaaaacaaaacttgggagcctcttgagagtgtacagcatcagcccttgccaactcttgtttatatgcatttaactttcagttaaccatgggaataattcatgaaaatccaatctacaaacaaaggccatcctaacgttcatgttattcttttccctaagaatctttcacaagagctataatcaagtagaattatgctttgatttgaattctaattcaattgaaaataaaaaatgagggccggacgcggtggctcatgcctgtaatcccagcgctttgggaggctgaggtggacggatcacgaggtcaggagatcgagaccatcctggctaacacggtgaaacccgatccctactaaaaatacaaaaaattagccgggcgtggtggcaggcgcctgtagtcccagctactcgggaggctgaggcaggagaatggcgtgaacccaggaggcagaggttgcagtgagccgagatcatgctactgcactccagcctgggcgacagagcgagactctgtgtataaataaataaataaataaataaataacgaaaaggttgccattgccctttctggggaaagtgataatgaggaaagactagtttcttaacccaagtcagctttagagtcggcaaggatgcaatttgaggtgatccaggaaaactctattagcatggtatttcccatacagattcatttcttttaggcctgaagtctttttggcacttcttaataaaatcacagatacctcttggacatgaaagcttatcctttatcaatttctatcagttaaccactcagatgaggataaaggcctgagtcagaaaggacagagagaggttccacaaagagataaaagatgagtggccataaggagtccttgaaaacacacctctctagcccatcaaaaaatgcagcaccttaaactcaagtccatcttactagcctttagcagtaccccaccactctcaaaatttccagcattaaatgtctcggagctatataaaaggcagacttaggtataagtaggaagagatatcaagggcttgggtatcatttcagcactaatggagcttatggcatgtatgaatgaacctgatgcgtggtctccacggtagattgttacaattgaggtcccacatttatgagattcccagtgaaaacaaatctcacagcttcacctgagagaaacattactgtcagtctcagatacaaaagcctgctgctattaggtacctatacacctgctgaaaatggaccagctttgctgtagtagtgcgcgcaggcaaa

SEQ ID NO: 5317 - protein, 61 aa, Homo sapiens
MESCSLAQTGVQWHDLGSLQPHLSGSSDSASASRVAGTTGGRPPQNPSSKLSSKANKKRKV

SEQ ID NO: 5318 - DNA, 1445 bp, Homo sapiens
acccgcggtcccgcagcggcgcgcggctgacgctccctcagcgatccggccctccgcggctcctgcgcgaccccacgcaaaagcgccccgtgcgaagagcgcggccagccagtccgcaaagggcctcgggcagtgcgggcagcacgaacggcgcgatcggggagcaggcgcggctacgctccgcctcagtgatgtcgccgggaggatctccgcgcggctacctcctcttccgccgccttcctcccacgccttcacctccctcccccgccgcgctctgcggcgaaaaggagcgggctcccaggccacctcccctctctccacccaggggccgcgcgtcagtggacctgcagcccaggcaacggggctgcggacggcgcgcgtgccctgcctcgcctcacgccggtagctgatgctcccgcggcagctgccaccccagcgccccagccacggcttcagaggctctcgcacgctggctttttttttttccccccgctttggtgaactcgcagtacttgggctgagcccgaaatctcgcgagatgctgcaggcgtcagtgcggcttcccactaggcgcgtggtacccgaggccgggccggagccgcaggccagccgcgattccttcgggcgatgctgggggctttccggtcggggccgcagccgcttccggagccgcgggcgaggtgcgttccccagcctggtttgctctgggctctgacccgccgccgcgaatctccgctcgtaactccgggcctgaacctggaggagggaggatttcctctgtgcagctttcgagcggtagactcaccctgccaggcagacctagattggcataaccagagatcagttccagttgtgatgcagtgggtgtctacacacttctgatgacacctttattttaaaagctgatgttccaaggtgcaagcggtcttctctgtcttctttatggccagtaaaattctccagaagggtgggagacctccacagaacccttccagcaagctgtcttctaaagcaaacaagaaaaggaaagtctgagcagttttgattagatttcccagaagtcaaagcaaggaaaaatgaaaaagcttcatttctcacgttcttaaaagagagcacagatgttgcatcatctggttagataccctgagaataaaatctggatccagtgagaggaaagattctgggtgctcatgaaaaaagaaacaaaacaaaacttgggagcctcttgagagtgtacagcatcagcccttgccaactcttgtttatatgcatttaactttcagttaaccatgggaataattcatgaaaatccaatctacaaacaaaggccatcctaacgttcatgttattcttttccctaagaatctttcacaagagctataatcaagtagaattatgctttgatttgaattctaattcaattgaaaataaaaaatgagggccgg

SEQ ID NO: 5319 - protein, 30 aa, Homo sapiens
MASKILQKGGRPPQNPSSKLSSKANKKRKV

SEQ ID NO: 5320 - DNA, 1612 bp, Homo sapiens
acccgcggtcccgcagcggcgcgcggctgacgctccctcagcgatccggccctccgcggctcctgcgcgaccccacgcaaaagcgccccgtgcgaagagcgcggccagccagtccgcaaagggcctcgggcagtgcgggcagcacgaacggcgcgatcggggagcaggcgcggctacgctccgcctcagtgatgtcgccgggaggatctccgcgcggctacctcctcttccgccgccttcctcccacgccttcacctccctcccccgccgcgctctgcggcgaaaaggagcgggctcccaggccacctcccctctctccacccaggggccgcgcgtcagtggacctgcagcccaggcaacggggctgcggacggcgcgcgtgccctgcctcgcctcacgccggtagctgatgctcccgcggcagctgccaccccagcgccccagccacggcttcagaggctctcgcacgctggctttttttttttccccccgctttggtgaactcgcagtacttgggctgagcccgaaatctcgcgagatgctgcaggcgtcagtgcggcttcccactaggcgcgtggtacccgaggccgggccggagccgcaggccagccgcgattccttcgggcgatgctgggggctttccggtcggggccgcagccgcttccggagccgcgggcgaggtgcgttccccagcctggtttgctctgggctctgacccgccgccgcgaatctccgctcgtaactccgggcctgaacctggaggagggaggatttcctctgtgcagctttcgagcggtagactcaccctgccaggcagacctagattggcataaccagagatcagttccagttgtgatgcagtgggtgtctacacacttctgatgacacctttattttaaaagctgatgttccaaggtgcaagcggtcttctctgtcttctttatggccagtaaaattctccagaagagatttatggcagcctcactcccagtagtttctgcatttagtgagataagatggaatcttgctctcttgctcagactggagtgcagtggcatgaccttggctcactgcaacctcacctctcgggttcaagcgattctgcctcagcctctcgagtagctgggactacaggtgggagacctccacagaacccttccagcaagctgtcttctaaagcaaacaagaaaaggaaagtctgagcagttttgattagatttcccagaagtcaaagcaaggaaaaatgaaaaagcttcatttctcacgttcttaaaagagagcacagatgttgcatcatctggttagataccctgagaataaaatctggatccagtgagaggaaagattctgggtgctcatgaaaaaagaaacaaaacaaaacttgggagcctcttgagagtgtacagcatcagcccttgccaactcttgtttatatgcatttaactttcagttaaccatgggaataattcatgaaaatccaatctacaaacaaaggccatcctaacgttcatgttattcttttccctaagaatctttcacaagagctataatcaagtagaattatgctttgatttgaattctaattcaattgaaaataaaaaatgagggccgg

SEQ ID NO: 5321 - protein, 61 aa, Homo sapiens; identical to SEQ ID NO: 5317

SEQ ID NO: 5322 - DNA, 484 bp, Homo sapiens
cgggcgatgctgggggctttccggtcggggccgcagccgcttccggagccgcgggcgaggtgcaagcggtcttctctgtcttctttatggccagtaaaattctccagaagagatttatggcagcctcactcccagtagtttctgcatttagtgagataagatggaatcttgctctcttgctcagactggagtgcagtggcatgaccttggctcactgcaacctcacctctcgggttcaagcgattctgcctcagcctctcgagtagctgggactacaggtgggagacctccacagaacccttccagcaagctgtcttctaaagcaaacaagaaaaggaaagtctgagcagttttgattagatttcccagaagtcaaagcaaggaaaaatgaaaaagcttcatttctcacgttcttaaaagagagcacagatgttgcatcatctggttagataccctgagaataaaatctggatccagtgagagg

SEQ ID NO: 5323 - protein, 61 aa, Homo sapiens; identical to SEQ ID NO: 5317

SEQ ID NO: 5324 - DNA, 2154 bp, Homo sapiens
tgtttaaagcctcggcggggctgcggcggcggcggctccggcagcagcacgcgggaggcggggccggaggctcctccgcccctcagcccgcccacccgcggtcccgcagcggcgcgcggctgacgctccctcagcgatccggccctccgcggctcctgcgcgaccccacgcaaaagcgccccgtgcgaagagcgcggccagccagtccgcaaagggcctcgggcagtgcgggcagcacgaacggcgcgatcggggagcaggcgcggctacgctccgcctcagtgatgtcgccgggaggatctccgcgcggctacctcctcttccgccgccttcctcccacgccttcacctccctcccccgccgcgctctgcggcgaaaaggagcgggctcccaggccacctcccctctctccacccaggggccgcgcgtcagtggacctgcagcccaggcaacggggctgcggacggcgcgcgtgccctgcctcgcctcacgccggtagctgatgctcccgcggcagctgccaccccagcgccccagccacggcttcagaggctctcgcacgctggctttttttttttccccccgctttggtgaactcgcagtacttgggctgagcccgaaatctcgcgagatgctgcaggcgtcagtgcggcttcccactaggcgcgtggtacccgaggccgggccggagccgcaggccagccgcgattccttcgggcgatgctgggggctttccggtcggggccgcagccgcttccggagccgcgggcgaggtgcgttccccagcctggtttgctctgggctctgacccgccgccgcgaatctccgctcgtaactccgggcctgaacctggaggagggaggatttcctctgtgcagctttcgagcggtagactcaccctgccaggcagacctagattggcataaccagagatcagttccagttgtgatgcagtgggtgtctacacacttctgatgacacctttattttaaaagctgatgttccaaggtgcaagcggtcttctctgtcttctttatggccagtaaaattctccagaagagatttatggcagcctcactcccagtagtttctgcatttagtgagataaggaatggattttcttctgtgtattgctgacacgaacaggagacggaaatactgagtagaagagggcggttccctggctaaggccccaccctcaagcctggatacccgcggccctaaatgagaagaggcgtttctgtttggggcccaaaaagttgctttttgacccaccacgccccctatcctgcccccatataaaccccaaaccccaacctccagagcataccagcaggtgaggagatacgaggcaagccgactgacggcaaaacgacgtagcagagaaagagagaagaggagggacgtctggacaccgagagatgtttggctcggggcagtcagagcggagtccagcccctgggcggcccaactccaggggaagatcaccttcccacttcatccatccccacccttccagctccccatccatcctgctgaaagccatttccaccactcaataaaacctcgcattcatccttcaagtccgtgtgtgacccgatttttcctggattctggaaaagagctcggaatacagaaagctgtcccctggtcctttgcccttgtgaaaaagcagaaggtccattgagctggttaacactccagctgtctgtggtggccaagctgaaagagctttgtaacactggggttgcaggcacccacctctagacgctaccgcagagccagagcccaaagccctcaccccggcctctgcacttgcccatctgcgtgctccccctctcgcaaggggtttctgcagagggggctactgaacaggtgagccacacccctgtcgcacgccctgcaaggggaatcagggaactcttccgtttcattgctttgaccacatcctataaatcttgttctccttgtctttcagctccaatttgtttatacattcagtttttacttttgactttactcatgatttattatagaaagatgtttaacaattttcaagcaaatggaataatttttgctcctctttcgttgttaatttattattcattggagttagaaaattgttgctaaaataaattctgcattttgaaattt

SEQ ID NO: 5325 - protein, 33 aa, Homo sapiens
MASKILQKRFMAASLPVVSAFSEIRNGFSSVYC

SEQ ID NO: 5326 - DNA, 1601 bp, Homo sapiens
gcgaggtgcgttccccagcctggtttgctctgggctctgacccgccgccgcgaatctccgctcgtaactccgggcctgaacctggaggagggaggatttcctctgtgcagctttcgagcggtagactcaccctgccaggcagacctagattggcataaccagagatcagttccagttgtgatgcagtgggtgtctacacacttctgatgacacctttattttaaaagctgatgttccaagagtcggggtttcaccgtgttagccaggatggtctcgatctcctgacctcgtgatccgcccacctccgcctctccaagtgctgggattacaggcatgagccaccgcgcccggcccttgtatttttaaactttgactttatggagacgaacaccatcgtttgctgaacacttgaaacatgatgaaagagccacagagttggcagaactgtttgaaaatgctgtgcaagcggtcttctctgtcttctttatggccagtaaaattctccagaagagatttatggcagcctcactcccagtagtttctgcatttagtgagataaggaatggattttcttctgtgtattgctgacacgaacaggagacggaaatactgagtagaagagggcggttccctggctaaggccccaccctcaagcctggatacccgcggccctaaatgagaagaggcgtttctgtttggggcccaaaaagttgctttttgacccaccacgccccctatcctgcccccatataaaccccaaaccccaacctccagagcataccagcaggtgaggagatacgaggcaagccgactgacggcaaaacgacgtagcagagaaagagagaagaggagggacgtctggacaccgagagatgtttggctcggggcagtcagagcggagtccagcccctgggcggcccaactccaggggaagatcaccttcccacttcatccatccccacccttccagctccccatccatcctgctgaaagccatttccaccactcaataaaacctcgcattcatccttcaagtccgtgtgtgacccgatttttcctggattctggaaaagagctcggaatacagaaagctgtcccctggtcctttgcccttgtgaaaaagcagaaggtccattgagctggttaacactccagctgtctgtggtggccaagctgaaagagctttgtaacactggggttgcaggcacccacctctagacgctaccgcagagccagagcccaaagccctcaccccggcctctgcacttgcccatctgcgtgctccccctctcgcaaggggtttctgcagagggggctactgaacaggtgagccacacccctgtcgcacgccctgcaaggggaatcagggaactcttccgtttcattgctttgaccacatcctataaatcttgttctccttgtctttcagctccaatttgtttatacattcagtttttacttttgactttactcatgatttattatagaaagatgtttaacaattttcaagcaaatggaataatttttgctcctctttcgttgttaatttattattcattggagttagaaaattgttgctaaaataaattctgcattttgaa

SEQ ID NO: 5327 - protein, 40 aa, Homo sapiens
MMKEPQSWQNCLKMLCKRSSLSSLWPVKFSRRDLWQPHSQ

SEQ ID NO: 5328 - DNA, 1821 bp, Homo sapiens
acccgcggtcccgcagcggcgcgcggctgacgctccctcagcgatccggccctccgcggctcctgcgcgaccccacgcaaaagcgccccgtgcgaagagcgcggccagccagtccgcaaagggcctcgggcagtgcgggcagcacgaacggcgcgatcggggagcaggcgcggctacgctccgcctcagtgatgtcgccgggaggatctccgcgcggctacctcctcttccgccgccttcctcccacgccttcacctccctcccccgccgcgctctgcggcgaaaaggagcgggctcccaggccacctcccctctctccacccaggggccgcgcgtcagtggacctgcagcccaggcaacggggctgcggacggcgcgcgtgccctgcctcgcctcacgccggtagctgatgctcccgcggcagctgccaccccagcgccccagccacggcttcagaggctctcgcacgctggctttttttttttccccccgctttggtgaactcgcagtacttgggctgagcccgaaatctcgcgagatgctgcaggcgtcagtgcggcttcccactaggcgcgtggtacccgaggccgggccggagccgcaggccagccgcgattccttcgggcgatgctgggggctttccggtcggggccgcagccgcttccggagccgcgggcgaggtgcaagcggtcttctctgtcttctttatggccagtaaaattctccagaagagatttatggcagcctcactcccagtagtttctgcatttagtgagataaggaatggattttcttctgtgtattgctgacacgaacaggagacggaaatactgagtagaagagggcggttccctggctaaggccccaccctcaagcctggatacccgcggccctaaatgagaagaggcgtttctgtttggggcccaaaaagttgctttttgacccaccacgccccctatcctgcccccatataaaccccaaaccccaacctccagagcataccagcaggtgaggagatacgaggcaagccgactgacggcaaaacgacgtagcagagaaagagagaagaggagggacgtctggacaccgagagatgtttggctcggggcagtcagagcggagtccagcccctgggcggcccaactccaggggaagatcaccttcccacttcatccatccccacccttccagctccccatccatcctgctgaaagccatttccaccactcaataaaacctcgcattcatccttcaagtccgtgtgtgacccgatttttcctggattctggaaaagagctcggaatacagaaagctgtcccctggtcctttgcccttgtgaaaaagcagaaggtccattgagctggttaacactccagctgtctgtggtggccaagctgaaagagctttgtaacactggggttgcaggcacccacctctagacgctaccgcagagccagagcccaaagccctcaccccggcctctgcacttgcccatctgcgtgctccccctctcgcaaggggtttctgcagagggggctactgaacaggtgagccacacccctgtcgcacgccctgcaaggggaatcagggaactcttccgtttcattgctttgaccacatcctataaatcttgttctccttgtctttcagctccaatttgtttatacattcagtttttacttttgactttactcatgatttattatagaaagatgtttaacaattttcaagcaaatggaataatttttgctcctctttcgttgttaatttattattcattggagttagaaaattgttgctaaaataaattctgcattttga

SEQ ID NO: 5329 - protein, 102 aa, Homo sapiens
MLPRQLPPQRPSHGFRGSRTLAFFFSPRFGELAVLGLSPKSREMLQASVRLPTRRVVPEAGPEPQASRDSFGRCWGLSGRGRSRFRSRGRGASGLLCLLYGQ

SEQ ID NO: 5330 - DNA, 1164 bp, Homo sapiens
acccgcggtcccgcagcggcgcgcggctgacgctccctcagcgatccggccctccgcggctcctgcgcgaccccacgcaaaagcgccccgtgcgaagagcgcggccagccagtccgcaaagggcctcgggcagtgcgggcagcacgaacggcgcgatcggggagcaggcgcggctacgctccgcctcagtgatgtcgccgggaggatctccgcgcggctacctcctcttccgccgccttcctcccacgccttcacctccctcccccgccgcgctctgcggcgaaaaggagcgggctcccaggccacctcccctctctccacccaggggccgcgcgtcagtggacctgcagcccaggcaacggggctgcggacggcgcgcgtgccctgcctcgcctcacgccggtagctgatgctcccgcggcagctgccaccccagcgccccagccacggcttcagaggctctcgcacgctggctttttttttttccccccgctttggtgaactcgcagtacttgggctgagcccgaaatctcgcgagatgctgcaggcgtcagtgcggcttcccactaggcgcgtggtacccgaggccgggccggagccgcaggccagccgcgattccttcgggcgatgctgggggctttccggtcggggccgcagccgcttccggagccgcgggcgagtcgattcaccatgatcttggctggctgtcttcttccttcatggctgctagtaatgacaattcagtggctgtttcttcagctgtgcaaagttggaacatgtttgggagttcaacggcattggtttctggtgcaagcggtcttctctgtcttctttatggccagtaaaattctccagaagagatttatggcagcctcactcccagtagtttctgcatttagtgagataaggaatggattttcttctgtgtattgctgacacgaacaggagacggaaatactgagtagaagagggcggttccctggctaaggccccaccctcaagcctggatacccgcggccctaaatgagaagaggcgtttctgtttggggcccaaaaagttgctttttgacccaccacgccccctatcctgcccccatataaaccccaaaccccaacctccagagcataccagcaggtgaggagatacgaggcaagccgactgac

SEQ ID NO: 5331 - protein, 102 aa, Homo sapiens
MLGAFRSGPQPLPEPRASRFTMILAGCLLPSWLLVMTIQWLFLQLCKVGTCLGVQRHWFLVQAVFSVFFMASKILQKRFMAASLPVVSAFSEIRNGFSSVYC

SEQ ID NO: 5332 - DNA, 814 bp, Homo sapiens
gtggtacccgaggccgggccggagccgcaggccagccgcgattccttcgggcgatgctgggggctttccggtcggggccgcagccgcttccggagccgcgggcgaggtgcgttccccagcctggtttgctctgggctctgacccgccgccgcgaatctccgctcgtaactccgggcctgaacctggaggagggaggatttcctctgtgcagctttcgagcggtagactcaccctgccaggcagacctagattggcataaccagagatcagttccagttgtgatgcagtgggtgtctacacacttctgatgacacctttattttaaaagctgatgttccaagtcgattcaccatgatcttggctggctgtcttcttccttcatggctgctagtaatgacaattcagtggctgtttcttcagctgtgcaaagttggaacatgtttgggagttcaacggcattggtttctggtgcaagcggtcttctctgtcttctttatggccagtaaaattctccagaagagatttatggcagcctcactcccagtagtttctgcatttagtgagataaggaatggattttcttctgtgtattgctgacacgaacaggagacggaaatactgagtagaagagggcggttccctggctaaggccccaccctcaagcctggatacccgcggccctaaatgagaagaggcgtttctgtttggggcccaaaaagttgctttttgacccaccacgccccctatcctgcccccatataaaccccaaaccccaacctccagagcataccagcaggtgaggagatacgaggca

SEQ ID NO: 5333 - protein, 81 aa, Homo sapiens
MILAGCLLPSWLLVMTIQWLFLQLCKVGTCLGVQRHWFLVQAVFSVFFMASKILQKRFMAASLPVVSAFSEIRNGFSSVYC

SEQ ID NO: 5334 - DNA, 1125 bp, Homo sapiens
acccgcggtcccgcagcggcgcgcggctgacgctccctcagcgatccggccctccgcggctcctgcgcgaccccacgcaaaagcgccccgtgcgaagagcgcggccagccagtccgcaaagggcctcgggcagtgcgggcagcacgaacggcgcgatcggggagcaggcgcggctacgctccgcctcagtgatgtcgccgggaggatctccgcgcggctacctcctcttccgccgccttcctcccacgccttcacctccctcccccgccgcgctctgcggcgaaaaggagcgggctcccaggccacctcccctctctccacccaggggccgcgcgtcagtggacctgcagcccaggcaacggggctgcggacggcgcgcgtgccctgcctcgcctcacgccggtagctgatgctcccgcggcagctgccaccccagcgccccagccacggcttcagaggctctcgcacgctggctttttttttttccccccgctttggtgaactcgcagtacttgggctgagcccgaaatctcgcgagatgctgcaggcgtcagtgcggcttcccactaggcgcgtggtacccgaggccgggccggagccgcaggccagccgcgattccttcgggcgatgctgggggctttccggtcggggccgcagccgcttccggagccgcgggcgaggtgcgttccccagcctggtttgctctgggctctgacccgccgccgcgaatctccgctcgtaactccgggcctgaacctggaggagggaggatttcctctgtgcagctttcgagcggtagactcaccctgccaggcagacctagattggcataaccagagatcagttccagttgtgatgcagtgggtgtctacacacttctgatgacacctttattttaaaagctgatgttccaaggaatggattttcttctgtgtattgctgacacgaacaggagacggaaatactgagtagaagagggcggttccctggctaaggccccaccctcaagcctggatacccgcggccctaaatgagaagaggcgtttctgtttggggcccaaaaagttgctttttgacccaccacgccccctatcctgcccccatataaaccccaaaccccaacct

SEQ ID NO: 5335 - protein, 101 aa, Homo sapiens [sequence omitted]

SEQ ID NO: 5336 - DNA, 488 bp, Homo sapiens
ggatttcctctgtgcagctttcgagcggtagactcaccctgccaggcagacctagattggcataaccagagatcagttccagttgtgatgcagtgggtgtctacacacttctgatgacacctttattttaaaagctgatgttccaagatttttagggcagtttttagtgtcattatgttgctgctacatatttggaagatggaacaagcccagacaaaggaggattcttttttactcatcttaaatccattttattttccttcatctgagccccttaaaactaatgtgttactggaatggattttcttctgtgtattgctgacacgaacaggagacggaaatactgagtagaagagggcggttccctggctaaggccccaccctcaagcctggatacccgcggccctaaatgagaagaggcgtttctgtttggggcccaaaaagttgctttttgacccaccacgccccctatcctgcccccatataaa

SEQ ID NO: 5337 - protein, 58 aa, Homo sapiens
MLLLHIWKMEQAQTKEDSFLLILNPFYFPSSEPLKTNVLLEWIFFCVLLTRTGDGNTE

SEQ ID NO: 5338 - DNA, 348 bp, Homo sapiens
gaagaactctgttcacctggcataattagattcaacattgttaaaatgtctggattcataatcacagctcttgggaacattaataaattgtggaggccattttgtttgcattccacaaaggatgatctttttgtaaagcttgctgtgcaggggagatttttgggctctcttccaagatgactcagctcttgtctggctgttctatgaattggttacttggaaaataatgtaaataacaactgcaatggtaaattacaagtagggacagcaagcatcctggacatctagcatgcaaaaaagccctgcccattaaggcaggcatttaggtcagttgctgatgctatggag

SEQ ID NO: 5339 - protein, 44 aa, Homo sapiens
MSGFIITALGNINKLWRPFCLHSTKDDLFVKLAVQGRFLGSLPR

SEQ ID NO: 5340 - DNA, 821 bp, Homo sapiens
aggattttgctacttgataatgtgtgtggggtctagaagtcaaggaagactctctaggttcaggaagaggatggagtattgatcaaaacaggaaggtcagaaaagaacccctctgggaagagttggtgctgaagatgagatggagtaagagaggcatgttgggctgtcagtttcactcaggacccatggcagaatattgctaccaacggaccataacaaaaacaagaagaattgaaacattttggaggccggaaacaccacattgatatttctctccagtgtgaaatattttaacctgaaaaacttctagatgcaattttcagataaaataggcctattctaatgaatccaagacaagaagaatctttcaagtgttgctaaccagaactgagcagatccaagtagcaatcgtagccaagccattagtccatgtatggagagaccagagagggcatccccacgtggtgatgcctcaagcttcaggagcactcgaccagagtcagtgtagcccttggcagctggtgaagcacaacctgggacaaatggaagctttagcaatgagccgataggtcaaggctaaccagaaagaatgcagctgggtaatgcaagctatcctatcttgtaattaaaagggttttctgtgtggttacctgacgtagttactaaatggcttgcatgaaataacatgcagcattctgcagttactgtgcaattaccttatatcatcaccctacagtcaaaagacaaaaagaaaattcagggtgaagcttttaaccgcaatttgtagcaaagatgtttggaataaaaacacattgcttgtt

SEQ ID NO: 5341 - protein, 43 aa, Homo sapiens
MRWSKRGMLGCQFHSGPMAEYCYQRTITKTRRIETFWRPETPH

SEQ ID NO: 5342 - DNA, 1101 bp, Homo sapiens
acccgcggtcccgcagcggcgcgcggctgacgctccctcagcgatccggccctccgcggctcctgcgcgaccccacgcaaaagcgccccgtgcgaagagcgcggccagccagtccgcaaagggcctcgggcagtgcgggcagcacgaacggcgcgatcggggagcaggcgcggctacgctccgcctcagtgatgtcgccgggaggatctccgcgcggctacctcctcttccgccgccttcctcccacgccttcacctccctcccccgccgcgctctgcggcgaaaaggagcgggctcccaggccacctcccctctctccacccaggggccgcgcgtcagtggacctgcagcccaggcaacggggctgcggacggcgcgcgtgccctgcctcgcctcacgccggtagctgatgctcccgcggcagctgccaccccagcgccccagccacggcttcagaggctctcgcacgctggctttttttttttccccccgctttggtgaactcgcagtacttgggctgagcccgaaatctcgcgagatgctgcaggcgtcagtgcggcttcccactaggcgcgtggtacccgaggccgggccggagccgcaggccagccgcgattccttcgggcgatgctgggggctttccggtcggggccgcagccgcttccggagccgcgggcgaggtgcgttccccagcctggtttgctctgggctctgacccgccgccgcgaatctccgctcgtaactccgggcctgaacctggaggagggaggatttcctctgtgcagctttcgagcggtagactcaccctgccaggcagacctagattggcataaccagagatcagttccagttgtgatgcagtgggtgtctacacacttctgatgacacctttattttaaaagctgatgttccaaggattttgctacttgataatgtgtgtggggtctagaagtcaaggaagactctctaggttcaggaagaggatggagtattgatcaaaacaggaaggtcagaaaagaacccctctgggaagagttggtgctgaagatgagatggagtaagagaggcatgttgggctgtcagtttcactcaggacccatg

SEQ ID NO: 5343 - protein, 101 aa, Homo sapiens [sequence omitted]

SEQ ID NO: 5344 - DNA, 2951 bp, Homo sapiens
tggtacccgaggccgggccggagccgcaggccagccgcgattccttcgggcgatgctgggggctttccggtcggggccgcagccgcttccggagccgcgggcgaggtgcaagcggtcttctctgtcttctttatggccagtaaaattctccagaagagatttatggcagcctcactcccagtagtttctgcatttagtgagataagccacagcaattgtctgctattttaaaagcactgtgatgcttaaatattccagctgctacatcggacaggtgtctgatgatcctgagaacagtcatcaaaaagtagaacttgagcctggaatacattctctggcatagccatagtcaatcaccagtataattaatgtaaatggacactggatagcttttttgtgaattctgatgcagcacaaagagactttaattgtttccaaaaagaaaatgtctgagattaaaatctagagttttatgacttagaggaaattttatagctttactccaaaaagggtaaggcacaaaatattctgtgccaaaggatgcatatttggtatttttcctatgaatcccttagtgtaagtggcatgatgaaattttcttggtttcaacacagatgatgtgttgaggtagtgttgaggctgagaggtgggtgggatgggtcttggagaaggaaaagatttgttttgcaaggtttgtggagagctgatgcggtagtgaggctaagacgaggggtatttacttgctacttacattgagtccactaacatctgcagcactttgcttgcattatccacgcaattatcacgggaaacctataaaataagtattcctctcctcattttacaaatagggaagcagataagatttagaaaatttcccaaactcacacaattattaaatgacagaactaggactcaaacccaggttttattaattttagagacatgtttttaaccacttggacactgccaaccatggaattgttggtatgaaaaaaacgtactcttgagttatattatccatggtcttaatatcagagaagtgcagttgagtcgctattaaagaatatggtaaaattataaaatggatactatacaaaggtataaaaatattataaatacttatgtttggggtaaaaggatcaaagtagccatgctcagtggaagggtaaggaactcttagcagagattgattaattgggagataattgattaattgggagttgattgattaattgggatttattaatttgggagtaggtaggaagataggaagttgtataaaataagggagagataacttagtacctggaaaaaaagaaatggaaataggtagaagctaagagttcaattaaaaaaaaggaataaaagatattggaagggaacgatgaatgtagcatggaagatccaagatgatgggagttcaggggctaattacagctatggggaaaaagtaatgtataagctggaagccagagataagagccatgtaaatgaagaagttgggccccaataggaaagaattataaggactagaaggagcaggagccatgtggaaaaatatcatgtagtacttttaagcttgatctgtcatctgtagcaaaaccagcatgcttgagtactgaattgacctgactgaactatgttgaaatgtactgtggttttatatccatatgcacttggtctgtggagttgtgggaaaagcatcagtgagtaggaagcccaaggatttgggtcaagtattaaatatgctatttactgtctagctatgtgaccttatataagtcacttgtggtctctgagccttcatgtattcatccataagatgagttgttgtttatattaaatgggatgtggtatgttaaagagctgaatgcatagtgatacagaattactttctgtaatactattttttaaatattttaaatgaaaaattaatgaacttataaattaaaagattcaaaagggataaaaaggtatacaatgaaaagcaattctccttcccaccagtaactctgtcctactccttaggacattcaccataaacagatatcctgaattcttctagaaatattatatataaaatcttatatttcttatgtttcttttttactattttaaaggggataaactaaactttgctttttttcatataataatatattctggagatcattttctaaaagcacatgtaaacatacctcattattataaaggtttgaaaatatcaatttatttgacctgtcccctctcgatagataattagattgtatccatccctttggttattaccaacagacactaatcacttatcatgtacatatagcctgttttttagcattgttagacaaagtaggcatattcctttccatccaagaactcataacctagtaattgtagttggctgatagctcattgcccatacacaaggatctaacacaacctcttgaataaacatcccccttattcagaaatgccttttcctatttccatattgcaactttgcttacaaatttccaatctgtctttctgtttacagaagatatacaaaattccttttgtatgatctctttatatctcttgattttcttttgtgtttgctaccaaagggcctgcacatagtgagaagattgtgcatgatctgtgagctctaccacacctggaattagggatcaccaatatgagaaaaaaaattggaggtacaaataacattatcatatgtaattggcatataaattacagatgtatctatgactaaaaaccctgtggatataaaccaaatgcagataaatataataaaatatataaaaatataatcaaataatgatagtgctattcaaatacttcaaatttgcacagtgatttatttcttaaaatatgttaacacatgtgagccaatacactgaggtcactggataaataaacagattcttgcaagtgctttggaaatg

SEQ ID NO: 5345 - protein, 43 aa, Homo sapiens
MLGAFRSGPQPLPEPRARCKRSSLSSLWPVKFSRRDLWQPHSQ

SEQ ID NO: 5346 - DNA, 967 bp, Homo sapiens
ccagcctggtttgctctgggctctgacccgccgccgcgaatctccgctcgtaactccgggcctgaacctggaggagggaggatttcctctgtgcagctttcgagcggtagactcaccctgccaggcagacctagattggcataaccagagatcagttccagttgtgatgcagtgggtgtctacacacttctgatgacacctttattttaaaagctgatgttccaagagtcggggtttcaccgtgttagccaggatggtctcgatctcctgacctcgtgatccgcccacctccgcctctccaagtgctgggattacaggcatgagccaccgcgcccggcccttgtatttttaaactttgactttatggagacgaacaccatcgtttgctgaacacttgaaacatgatgaaagagccacagagttggcagaactgtttgaaaatgctatttttagggcagtttttagtgtcattatgttgctgctacatatttggaagatggaacaagcccagacaaaggaggattcttttttactcatcttaaatccattttattttccttcatctgagccccttaaaactaatgtgttactggtgcaagcggtcttctctgtcttctttatggccagtaaaattctccagaagagatttatggcagcctcactcccagtagtttctgcatttagtgagataagccacagcaattgtctgctattttaaaagcactgtgatgcttaaatattccagctgctacatcggacaggtgtctgatgatcctgagaacagtcatcaaaaagtagaacttgagcctggaatacattctctggcatagccatagtcaatcaccagtataattaatgtaaatggacactggatagcttttttgtgaattctgatgcagcacaaagagactttaattgtttccaaaaagaaaatgtctgagattaaaatctagagttttatgactta

SEQ ID NO: 5347 - protein, 81 aa, Homo sapiens
MLLLHIWKMEQAQTKEDSFLLILNPFYFPSSEPLKTNVLLVQAVFSVFFMASKILQKRFMAASLPVVSAFSEISHSNCLLF

SEQ ID NO: 5348 - DNA, 1290 bp, Homo sapiens
acccgcggtcccgcagcggcgcgcggctgacgctccctcagcgatccggccctccgcggctcctgcgcgaccccacgcaaaagcgccccgtgcgaagagcgcggccagccagtccgcaaagggcctcgggcagtgcgggcagcacgaacggcgcgatcggggagcaggcgcggctacgctccgcctcagtgatgtcgccgggaggatctccgcgcggctacctcctcttccgccgccttcctcccacgccttcacctccctcccccgccgcgctctgcggcgaaaaggagcgggctcccaggccacctcccctctctccacccaggggccgcgcgtcagtggacctgcagcccaggcaacggggctgcggacggcgcgcgtgccctgcctcgcctcacgccggtagctgatgctcccgcggcagctgccaccccagcgccccagccacggcttcagaggctctcgcacgctggctttttttttttccccccgctttggtgaactcgcagtacttgggctgagcccgaaatctcgcgagatgctgcaggcgtcagtgcggcttcccactaggcgcgtggtacccgaggccgggccggagccgcaggccagccgcgattccttcgggcgatgctgggggctttccggtcggggccgcagccgcttccggagccgcgggcgaggtgcgttccccagcctggtttgctctgggctctgacccgccgccgcgaatctccgctcgtaactccgggcctgaacctggaggagggaggatttcctctgtgcagctttcgagcggtagactcaccctgccaggcagacctagattggcataaccagagatcagttccagttgtgatgcagtgggtgtctacacacttctgatgacacctttattttaaaagctgatgttccaaggtgcaagcggtcttctctgtcttctttatggccagtaaaattctccagaagagatttatggcagcctcactcccagtagtttctgcatttagtgagataagccacagcaattgtctgctattttaaaagcactgtgatgcttaaatattccagctgctacatcggacaggtgtctgatgatcctgagaacagtcatcaaaaagtagaacttgagcctggaatacattctctggcatagccatagtcaatcaccagtataattaatgtaaatggacactggatagcttttttgtgaattctgatgcagcacaaagagactttaattgtttccaaaaagaaaatgtctgagattaaaatctagagttttatgactta

SEQ ID NO: 5349 - protein, 32 aa, Homo sapiens
MASKILQKRFMAASLPVVSAFSEISHSNCLLF

SEQ ID NO: 5350 - DNA, 2973 bp, Homo sapiens
agtgagggcaagggctgggaaaactgagcacgggcacagtgcgggagcgggtgggtgcccagggcagccaggggcgcacgggttgggaggcgccaggcggcccgccctccttgcacgggccggcccagcttccccgcccctggcgtccgctccctcccgctcgcagcttacttaacctggcccgggcggcggaggcgctctcacttccctggagccgcccgcttgcccgtcggtcgctagctcgctcggtgcgcgtcgtcccgctccatggcgctcttcgtgcggctgctggctctcgccctggctctggccctgggccccgccgcgaccctggcgggtcccgccaagtcgccctaccagctggtgctgcagcacagcaggctccggggccgccagcacggccccaacgtgtgtgctgtgcagaaggttattggcactaataggaagtacttcaccaactgcaagcagtggtaccaaaggaaaatctgtggcaaatcaacagtcatcagctacgagtgctgtcctggatatgaaaaggtccctggggagaagggctgtccagcagccctaccactctcaaacctttacgagaccctgggagtcgttggatccaccaccactcagctgtacacggaccgcacggagaagctgaggcctgagatggaggggcccggcagcttcaccatcttcgcccctagcaacgaggcctgggcctccttgccagctgtgagatgacctccgtctgcccgggggactcttatggggaactgccttacttccccgaggggaagtgctggactccctggtcagcaatgtcaacattgagctgctcaatgccctccgctaccatatggtgggcaggcgagtcctgactgatgagctgaaacacggcatgaccctcacctctatgtaccagaattccaacatccagatccaccactatcctaatgggattgtaactgtgaactgtgcccggctgctgaaagccgaccaccatgcaaccaacggggtggtgcacctcatcgataaggtcatctccaccatcaccaacaacatccagcagatcattgagatcgaggacacctttgagacccttcgggctgctgtggctgcatcagggctcaacacgatgcttgaaggtaacggccagtacacgcttttggccccgaccaatgaggccttcgagaagatccctagtgagactttgaaccgtatcctgggcgacccagaagccctgagagacctgctgaacaaccacatcttgaagtcagctatgtgtgctgaagccatcgttgcggggctgtctgtagagaccctggagggcacgacactggaggtgggctgcagcggggacatgctcactatcaacgggaaggcgatcatctccaataaagacatcctagccaccaacggggtgatccactacattgatgagctactcatcccagactcagccaagacactatttgaattggctgcagagtctgatgtgtccacagccattgaccttttcagacaagccggcctcggcaatcatctctctggaagtgagcggttgaccctcctggctcccctgaattctgtattcaaagatggaacccctccaattgatgcccatacaaggaatttgcttcggaaccacataattaaagaccagctggcctctaagtatctgtaccatggacagaccctggaaactctgggcggcaaaaaactgagagtttttgtttatcgtaatagcctctgcattgagaacagctgcatcgcggcccacgacaagagggggaggtacgggaccctgttcacgatggaccgggtgctgacccccccaatggggactgtcatggatgtcctgaagggagacaatcgctttagcatgctggtagctgccatccagtctgcaggactgacggagaccctcaaccgggaaggagtctacacagtctttgctcccacaaatgaagccttccgagccctgccaccaagagaacggagcagactcttgggagatgccaaggaacttgccaacatcctgaaataccacattggtgatgaaatcctggttagcggaggcatcggggccctggtgcggctaaagtctctccaaggtgacaagctggaagtcagcttgaaaaacaatgtggtgagtgtcaacaaggagcctgttgccgagcctgacatcatggccacaaatggcgtggtccatgtcatcaccaatgttctgcagcctccagccaacagacctcaggaaagaggggatgaacttgcagactctgcgcttgagatcttcaaacaagcatcagcgttttccagggcttcccagaggtctgtgcgactagcccctgtctatcaaaagttattagagaggatgaagcattagcttgaagcactacaggaggaatgcaccacggcagctctccgccaatttctctcagatttccacagagactgtttgaatgttttcaaaaccaagtatcacactttaatgtacatgggccgcaccataatgagatgtgagccttgtgcatgtgggggaggagggagagagatgtactttttaaatcatgttccccctaaacatggctgttaacccactgcatgcagaaacttggatgtcactgcctgacattcacttccagagaggacctatcccaaatgtggaattgactgcctatgccaagtccctggaaaaggagcttcagtattgtggggctcataaaacatgaatcaagcaatccagcctcatgggaagtcctggcacagtttttgtaaagcccttgcacagctggagaaatggcatcattataagctatgagttgaaatgttctgtcaaatgtgtctcacatctacacgtggcttggaggcttttatggggccctgtccaggtagaaaagaaatggtatgtagagcttagatttccctattgtgacagagccatggtgtgtttgtaataataaaaccaaagaaacatac

SEQ ID NO: 5351 - protein, 509 aa, Homo sapiens
MVGRRVLTDELKHGMTLTSMYQNSNIQIHHYPNGIVTVNCARLLKADHHATNGVVHLIDKVISTITNNIQQIIEIEDTFETLRAAVAASGLNTMLEGNGQYTLLAPTNEAFEKIPSETLNRILGDPEALRDLLNNHILKSAMCAEAIVAGLSVETLEGTTLEVGCSGDMLTINGKAIISNKDILATNGVIHYIDELLIPDSAKTLFELAAESDVSTAIDLFRQAGLGNHLSGSERLTLLAPLNSVFKDGTPPIDAHTRNLLRNHIIKDQLASKYLYHGQTLETLGGKKLRVFVYRNSLCIENSCIAAHDKRGRYGTLFTMDRVLTPPMGTVMDVLKGDNRFSMLVAAIQSAGLTETLNREGVYTVFAPTNEAFRALPPRERSRLLGDAKELANILKYHIGDEILVSGGIGALVRLKSLQGDKLEVSLKNNVVSVNKEPVAEPDIMATNGVVHVITNVLQPPANRPQERGDELADSALEIFKQASAFSRASQRSVRLAPVYQKLLERMKH

SEQ ID NO: 5352 - DNA, 3364 bp, Homo sapiens
agtgagggcaagggctgggaaaactgagcacgggcacagtgcgggagcgggtgggtgcccagggcagccaggggcgcacgggttgggaggcgccaggcggcccgccctccttgcacgggccggcccagcttccccgcccctggcgtccgctccctcccgctcgcagcttacttaacctggcccgggcggcggaggcgctctcacttccctggagccgcccgcttgcccgtcggtcgctagctcgctcggtgcgcgtcgtcccgctccatggcgctcttcgtgcggctgctggctctcgccctggctctggccctgggccccgccgcgaccctggcgggtcccgccaagtcgccctaccagctggtgctgcagcacagcaggctccggggccgccagcacggccccaacgtgtgtgctgtgcagaaggttattggcactaataggaagtacttcaccaactgcaagcagtggtaccaaaggaaaatctgtggcaaatcaacagtcatcagctacgagtgctgtcctggatatgaaaaggtccctggggagaagggctgtccagcagccctaccactctcaaacctttacgagaccctgggagtcgttggatccaccaccactcagctgtacacggaccgcacggagaagctgaggcctgagatggaggggcccggcagcttcaccatcttcgcccctagcaacgaggcctgggcctccttgccagctgtgagatgacctccgtctgcccgggggactcttatggggaactgccttacttccccgaggggtgggcatgatgaatgggagtctgcagtcatttcctactgtttcaggaagctttctccttaaccccttagaaaaggctgtggaacttgagctaaaatatgtcttaccaggttgcgtctaatgccccccgttccctactgggcagaaagacttgggtgcttcctgaggagggatccttggcagaagagaggcctgggctcacgagggctgagaacatgtttcccagagttgcaaggacccatctcttaaacacagagtctgcagcccctaactgacaccctgtccttcctcctaggaagtgctggactccctggtcagcaatgtcaacattgagctgctcaatgccctccgctaccatatggtgggcaggcgagtcctgactgatgagctgaaacacggcatgaccctcacctctatgtaccagaattccaacatccagatccaccactatcctaatgggattgtaactgtgaactgtgcccggctgctgaaagccgaccaccatgcaaccaacggggtggtgcacctcatcgataaggtcatctccaccatcaccaacaacatccagcagatcattgagatcgaggacacctttgagacccttcgggacgggggtctgcaagaaaatgatgttcccacatagttggcagcacgtgaacagcaattgatccctttgcatcacctcctcttactgtttagatttggctgctgtggctgcatcagggctcaacacgatgcttgaaggtaacggccagtacacgcttttggccccgaccaatgaggccttcgagaagatccctagtgagactttgaaccgtatcctgggcgacccagaagccctgagagacctgctgaacaaccacatcttgaagtcagctatgtgtgctgaagccatcgttgcggggctgtctgtagagaccctggagggcacgacactggaggtgggctgcagcggggacatgctcactatcaacgggaaggcgatcatctccaataaagacatcctagccaccaacggggtgatccactacattgatgagctactcatcccagactcagccaagacactatttgaattggctgcagagtctgatgtgtccacagccattgaccttttcagacaagccggcctcggcaatcatctctctggaagtgagcggttgaccctcctggctcccctgaattctgtattcaaagatggaacccctccaattgatgcccatacaaggaatttgcttcggaaccacataattaaagaccagctggcctctaagtatctgtaccatggacagaccctggaaactctgggcggcaaaaaactgagagtttttgtttatcgtaatagcctctgcattgagaacagctgcatcgcggcccacgacaagagggggaggtacgggaccctgttcacgatggaccgggtgctgacccccccaatggggactgtcatggatgtcctgaagggagacaatcgctttagcatgctggtagctgccatccagtctgcaggactgacggagaccctcaaccgggaaggagtctacacagtctttgctcccacaaatgaagccttccgagccctgccaccaagagaacggagcagactcttgggagatgccaaggaacttgccaacatcctgaaataccacattggtgatgaaatcctggttagcggaggcatcggggccctggtgcggctaaagtctctccaaggtgacaagctggaagtcagcttgaaaaacaatgtggtgagtgtcaacaaggagcctgttgccgagcctgacatcatggccacaaatggcgtggtccatgtcatcaccaatgttctgcagcctccagccaacagacctcaggaaagaggggatgaacttgcagactctgcgcttgagatcttcaaacaagcatcagcgttttccagggcttcccagaggtctgtgcgactagcccctgtctatcaaaagttattagagaggatgaagcattagcttgaagcactacaggaggaatgcaccacggcagctctccgccaatttctctcagatttccacagagactgtttgaatgttttcaaaaccaagtatcacactttaatgtacatgggccgcaccataatgagatgtgagccttgtgcatgtgggggaggagggagagagatgtactttttaaatcatgttccccctaaacatggctgttaacccactgcatgcagaaacttggatgtcactgcctgacattcacttccagagaggacctatcccaaatgtggaattgactgcctatgccaagtccctggaaaaggagcttcagtattgtggggctcataaaacatgaatcaagcaatccagcctcatgggaagtcctggcacagtttttgtaaagcccttgcacagctggagaaatggcatcattataagctatgagttgaaatgttctgtcaaatgtgtctcacatctacacgtggcttggaggcttttatggggccctgtccaggtagaaaagaaatggtatgtagagcttagatttccctattgtgacagagccatggtgtgtttgtaataataaaaccaaagaaacatac

SEQ ID NO: 5353 - protein, 416 aa, Homo sapiens
MLEGNGQYTLLAPTNEAFEKIPSETLNRILGDPEALRDLLNNHILKSAMCAEAIVAGLSVETLEGTTLEVGCSGDMLTINGKAIISNKDILATNGVIHYIDELLIPDSAKTLFELAAESDVSTAIDLFRQAGLGNHLSGSERLTLLAPLNSVFKDGTPPIDAHTRNLLRNHIIKDQLASKYLYHGQTLETLGGKKLRVFVYRNSLCIENSCIAAHDKRGRYGTLFTMDRVLTPPMGTVMDVLKGDNRFSMLVAAIQSAGLTETLNREGVYTVFAPTNEAFRALPPRERSRLLGDAKELANILKYHIGDEILVSGGIGALVRLKSLQGDKLEVSLKNNVVSVNKEPVAEPDIMATNGVVHVITNVLQPPANRPQERGDELADSALEIFKQASAFSRASQRSVRLAPVYQKLLERMKH

SEQ ID NO: 5354 - DNA, 2864 bp, Homo sapiens
agtgagggcaagggctgggaaaactgagcacgggcacagtgcgggagcgggtgggtgcccagggcagccaggggcgcacgggttgggaggcgccaggcggcccgccctccttgcacgggccggcccagcttccccgcccctggcgtccgctccctcccgctcgcagcttacttaacctggcccgggcggcggaggcgctctcacttccctggagccgcccgcttgcccgtcggtcgctagctcgctcggtgcgcgtcgtcccgctccatggcgctcttcgtgcggctgctggctctcgccctggctctggccctgggccccgccgcgaccctggcgggtcccgccaagtcgccctaccagctgtgtgctgtgcagaaggttattggcactaataggaagtacttcaccaactgcaagcagtggtaccaaaggaaaatctgtggcaaatcaacagtcatcagctacgagtgctgtcctggatatgaaaaggtccctggggagaagggctgtccagcagccctaccactctcaaacctttacgagaccctgggagtcgttggatccaccaccactcagctgtacacggaccgcacggagaagctgaggcctgagatggaggggcccggcagcttcaccatcttcgcccctagcaacgaggcctgggcctccttgccagctgaagtgctggactccctggtcagcaatgtcaacattgagctgctcaatgccctccgctaccatatggtgggcaggcgagtcctgactgatgagctgaaacacggcatgaccctcacctctatgtaccagaattccaacatccagatccaccactatcctaatgggattgtaactgtgaactgtgcccggctgctgaaagccgaccaccatgcaaccaacggggtggtgcacctcatcgataaggtcatctccaccatcaccaacaacatccagcagatcattgagatcgaggacacctttgagacccttcgggctgctgtggctgcatcagggctcaacacgatgcttgaaggtaacggccagtacacgcttttggccccgaccaatgaggccttcgagaagatccctagtgagactttgaaccgtatcctgggcgacccagaagccctgagagacctgctgaacaaccacatcttgaagtcagctatgtgtgctgaagccatcgttgcggggctgtctgtagagaccctggagggcacgacactggaggtgggctgcagcggggacatgctcactatcaacgggaaggcgatcatctccaataaagacatcctagccaccaacggggtgatccactacattgatgagctactcatcccagactcagccaagacactatttgaattggctgcagagtctgatgtgtccacagccattgaccttttcagacaagccggcctcggcaatcatctctctggaagtgagcggttgaccctcctggctcccctgaattctgtattcaaagatggaacccctccaattgatgcccatacaaggaatttgcttcggaaccacataattaaagaccagctggcctctaagtatctgtaccatggacagaccctggaaactctgggcggcaaaaaactgagagtttttgtttatcgtaatagcctctgcattgagaacagctgcatcgcggcccacgacaagagggggaggtacgggaccctgttcacgatggaccgggtgctgacccccccaatggggactgtcatggatgtcctgaagggagacaatcgctttagcatgctggtagctgccatccagtctgcaggactgacggagaccctcaaccgggaaggagtctacacagtctttgctcccacaaatgaagccttccgagccctgccaccaagagaacggagcagactcttgggagatgccaaggaacttgccaacatcctgaaataccacattggtgatgaaatcctggttagcggaggcatcggggccctggtgcggctaaagtctctccaaggtgacaagctggaagtcagcttgaaaaacaatgtggtgagtgtcaacaaggagcctgttgccgagcctgacatcatggccacaaatggcgtggtccatgtcatcaccaatgttctgcagcctccagccaacagacctcaggaaagaggggatgaacttgcagactctgcgcttgagatcttcaaacaagcatcagcgttttccagggcttcccagaggtctgtgcgactagcccctgtctatcaaaagttattagagaggatgaagcattagcttgaagcactacaggaggaatgcaccacggcagctctccgccaatttctctcagatttccacagagactgtttgaatgttttcaaaaccaagtatcacactttaatgtacatgggccgcaccataatgagatgtgagccttgtgcatgtgggggaggagggagagagatgtactttttaaatcatgttccccctaaacatggctgttaacccactgcatgcagaaacttggatgtcactgcctgacattcacttccagagaggacctatcccaaatgtggaattgactgcctatgccaagtccctggaaaaggagcttcagtattgtggggctcataaaacatgaatcaagcaatccagcctcatgggaagtcctggcacagtttttgtaaagcccttgcacagctggagaaatggcatcattataagctatgagttgaaatgttctgtcaaatgtgtctcacatctacacgtggcttggaggcttttatggggccctgtccaggtagaaaagaaatggtatgtagagcttagatttccctattgtgacagagccatggtgtgtttgtaataataaaaccaaagaaacatac

SEQ ID NO: 5355 - protein, 667 aa, Homo sapiens
MALFVRLLALALALALGPAATLAGPAKSPYQLCAVQKVIGTNRKYFTNCKQWYQRKICGKSTVISYECCPGYEKVPGEKGCPAALPLSNLYETLGVVGSTTTQLYTDRTEKLRPEMEGPGSFTIFAPSNEAWASLPAEVLDSLVSNVNIELLNALRYHMVGRRVLTDELKHGMTLTSMYQNSNIQIHHYPNGIVTVNCARLLKADHHATNGVVHLIDKVISTITNNIQQIIEIEDTFETLRAAVAASGLNTMLEGNGQYTLLAPTNEAFEKIPSETLNRILGDPEALRDLLNNHILKSAMCAEAIVAGLSVETLEGTTLEVGCSGDMLTINGKAIISNKDILATNGVIHYIDELLIPDSAKTLFELAAESDVSTAIDLFRQAGLGNHLSGSERLTLLAPLNSVFKDGTPPIDAHTRNLLRNHIIKDQLASKYLYHGQTLETLGGKKLRVFVYRNSLCIENSCIAAHDKRGRYGTLFTMDRVLTPPMGTVMDVLKGDNRFSMLVAAIQSAGLTETLNREGVYTVFAPTNEAFRALPPRERSRLLGDAKELANILKYHIGDEILVSGGIGALVRLKSLQGDKLEVSLKNNVVSVNKEPVAEPDIMATNGVVHVITNVLQPPANRPQERGDELADSALEIFKQASAFSRASQRSVRLAPVYQKLLERMKH

SEQ ID NO: 5356 - DNA, 2912 bp, Homo sapiens
agtgagggcaagggctgggaaaactgagcacgggcacagtgcgggagcgggtgggtgcccagggcagccaggggcgcacgggttgggaggcgccaggcggcccgccctccttgcacgggccggcccagcttccccgcccctggcgtccgctccctcccgctcgcagcttacttaacctggcccgggcggcggaggcgctctcacttccctggagccgcccgcttgcccgtcggtcgctagctcgctcggtgcgcgtcgtcccgctccatggcgctcttcgtgcggctgctggctctcgccctggctctggccctgggccccgccgcgaccctggcgggtcccgccaagtcgccctaccagctggtgctgcagcacagcaggctccggggccgccagcacggccccaacgtgtgtgctgtgcagaaggttattggcactaataggaagtacttcaccaactgcaagcagtggtaccaaaggaaaatctgtggcaaatcaacagtcatcagctacgagtgctgtcctggatatgaaaaggtccctggggagaagggctgtccagcagccctaccactctcaaacctttacgagaccctgggagtcgttggatccaccaccactcagctgtacacggaccgcacggagaagctgaggcctgagatggaggggcccggcagcttcaccatcttcgcccctagcaacgaggcctgggcctccttgccagctgaagtgctggactccctggtcagcaatgtcaacattgagctgctcaatgccctccgctaccatatggtgggcaggcgagtcctgactgatgagctgaaacacggcatgaccctcacctctatgtaccagaattccaacatccagatccaccactatcctaatgggattgtaactgtgaactgtgcccggctgctgaaagccgaccaccatgcaaccaacggggtggtgcacctcatcgataaggtcatctccaccatcaccaacaacatccagcagatcattgagatcgaggacacctttgagacccttcgggctgctgtggctgcatcagggctcaacacgatgcttgaaggtaacggccagtacacgcttttggccccgaccaatgaggccttcgagaagatccctagtgagactttgaaccgtatcctgggcgacccagaagccctgagagacctgctgaacaaccacatcttgaagtcagctatgtgtgctgaagccatcgttgcggggctgtctgtagagaccctggagggcacgacactggaggtgggctgcagcggggacatgctcactatcaacgggaaggcgatcatctccaataaagacatcctagccaccaacggggtgatccactacattgatgagctactcatcccagactcagccaagacactatttgaattggctgcagagtctgatgtgtccacagccattgaccttttcagacaagccggcctcggcaatcatctctctggaagtgagcggttgaccctcctggctcccctgaattctgtattcaaagatggaacccctccaattgatgcccatacaaggaatttgcttcggaaccacataattaaagaccagctggcctctaagtatctgtaccatggacagaccctggaaactctgggcggcaaaaaactgagagtttttgtttatcgtaatagcctctgcattgagaacagctgcatcgcggcccacgacaagagggggaggtacgggaccctgttcacgatggaccgggtgctgacccccccaatggggactgtcatggatgtcctgaagggagacaatcgctttagcatgctggtagctgccatccagtctgcaggactgacggagaccctcaaccgggaaggagtctacacagtctttgctcccacaaatgaagccttccgagccctgccaccaagagaacggagcagactcttgggagatgccaaggaacttgccaacatcctgaaataccacattggtgatgaaatcctggttagcggaggcatcggggccctggtgcggctaaagtctctccaaggtgacaagctggaagtcagcttgaaaaacaatgtggtgagtgtcaacaaggagcctgttgccgagcctgacatcatggccacaaatggcgtggtccatgtcatcaccaatgttctgcagcctccagccaacagacctcaggaaagaggggatgaacttgcagactctgcgcttgagatcttcaaacaagcatcagcgttttccagggcttcccagaggtctgtgcgactagcccctgtctatcaaaagttattagagaggatgaagcattagcttgaagcactacaggaggaatgcaccacggcagctctccgccaatttctctcagatttccacagagactgtttgaatgttttcaaaaccaagtatcacactttaatgtacatgggccgcaccataatgagatgtgagccttgtgcatgtgggggaggagggagagagatgtactttttaaatcatgttccccctaaacatggctgttaacccactgcatgcagaaacttggatgtcactgcctgacattcacttccagagaggacctatcccaaatgtggaattgactgcctatgccaagtccctggaaaaggagcttcagtattgtggggctcataaaacatgaatcaagcaatccagcctcatgggaagtcctggcacagtttttgtaaagcccttgcacagctggagaaatggcatcattataagctatgagttgaaatgttctgtcaaatgtgtctcacatctacacgtggcttggaggcttttatggggccctgtccaggtagaaaagaaatggtatgtagagcttagatttccctattgtgacagagccatggtgtgtttgtaataataaaaccaaagaaacatac

SEQ ID NO: 5357 - protein, 683 aa, Homo sapiens; identical to SEQ ID NO: 676

SEQ ID NO: 5358 - DNA, 2988 bp, Homo sapiens
agtgagggcaagggctgggaaaactgagcacgggcacagtgcgggagcgggtgggtgcccagggcagccaggggcgcacgggttgggaggcgccaggcggcccgccctccttgcacgggccggcccagcttccccgcccctggcgtccgctccctcccgctcgcagcttacttaacctggcccgggcggcggaggcgctctcacttccctggagccgcccgcttgcccgtcggtcgctagctcgctcggtgcgcgtcgtcccgctccatggcgctcttcgtgcggctgctggctctcgccctggctctggccctgggccccgccgcgaccctggcgggtcccgccaagtcgccctaccagctggtgctgcagcacagcaggctccggggccgccagcacggccccaacgtgtgtgctgtgcagaaggttattggcactaataggaagtacttcaccaactgcaagcagtggtaccaaaggaaaatctgtggcaaatcaacagtcatcagctacgagtgctgtcctggatatgaaaaggtccctggggagaagggctgtccagcagccctaccactctcaaacctttacgagaccctgggagtcgttggatccaccaccactcagctgtacacggaccgcacggagaagctgaggcctgagatggaggggcccggcagcttcaccatcttcgcccctagcaacgaggcctgggcctccttgccagctgtgagatgacctccgtctgcccgggggactcttatggggaactgccttacttccccgaggggaagtgctggactccctggtcagcaatgtcaacattgagctgctcaatgccctccgctaccatatggtgggcaggcgagtcctgactgatgagctgaaacacggcatgaccctcacctctatgtaccagaattccaacatccagatccaccactatcctaatgggattgtaactgtgaactgtgcccggctgctgaaagccgaccaccatgcaaccaacggggtggtgcacctcatcgataaggtcatctccaccatcaccaacaacatccagcagatcattgagatcgaggacacctttgagacccttcgggctgctgtggctgcatcagggctcaacacgatgcttgaaggtaacggccagtacacgcttttggccccgaccaatgaggccttcgagaagatccctagtgagactttgaaccgtatcctgggcgacccagaagccctgagagacctgctgaacaaccacatcttgaagtcagctatgtgtgctgaagccatcgttgcggggctgtctgtagagaccctggagggcacgacactggaggtgggctgcagcggggacatgctcactatcaacgggaaggcgatcatctccaataaagacatcctagccaccaacggggtgatccactacattgatgagctactcatcccagactcagccaagacactatttgaattggctgcagagtctgatgtgtccacagccattgaccttttcagacaagccggcctcggcaatcatctctctggaagtgagcggttgaccctcctggctcccctgaattctgtattcaaagatggaacccctccaattgatgcccatacaaggaatttgcttcggaaccacataattaaagaccagctggcctctaagtatctgtaccatggacagaccctggaaactctgggcggcaaaaaactgagagtttttgtttatcgtaatagcctctgcattgagaacagctgcatcgcggcccacgacaagagggggaggtacgggaccctgttcacgatggaccgggtgctgacccccccaatggggactgtcatggatgtcctgaagggagacaatcgctttagcatgctggtagctgccatccagtctgcaggactgacggagaccctcaaccgggaaggagtctacacagtctttgctcccacaaatgaagccttccgagccctgccaccaagagaacggagcagactcttgggagatgccaaggaacttgccaacatcctgaaataccacattggtgatgaaatcctggttagcggaggcatcggggccctggtgcggctaaagtctctccaaggtgacaagctggaagtcagcttgaaaaacaatgtggtgagtgtcaacaaggagcctgttgccgagcctgacatcatggccacaaatggcgtggtccatgtcatcaccaatgttctgcagcctccagccaacagacctcaggaaagaggggatgaacttgcagactctgcgcttgagatcttcaaacaagcatcagcgttttccagggcttcccagaggtctgtgcgactagcccctgtctatcaaaagttattagagaggatgaagcattagcttgaagcactacaggaggaatgcaccacggcagctctccgccaatttctctcagatttccacagagactgtttgaatgttttcaaaaccaagtatcacactttaatgtacatgggccgcaccataatgagatgtgagccttgtgcatgtgggggaggagggagagagatgtactttttaaatcatgttccccctaaacatggctgttaacccactgcatgcagaaacttggatgtcactgcctgacattcacttccagagaggacctatcccaaatgtggaattgactgcctatgccaagtccctggaaaaggagcttcagtattgtggggctcataaaacatgaatcaagcaatccagcctcatgggaagtcctggcacagtttttgtaaagcccttgcacagctggagaaatggcatcattataagctatgagttgaaatgttctgtcaaatgtgtctcacatctacacgtggcttggaggcttttatggggccctgtccaggtagaaaagaaatggtatgtagagcttagatttccctattgtgacagagccatggtgtgtttgtaataataaaaccaaagaaacatacgtcctgtgtgcatgg

SEQ ID NO: 5359 - protein, 509 aa, Homo sapiens; identical to SEQ ID NO: 5351

SEQ ID NO: 5360 - DNA, 2927 bp, Homo sapiens
agtgagggcaagggctgggaaaactgagcacgggcacagtgcgggagcgggtgggtgcccagggcagccaggggcgcacgggttgggaggcgccaggcggcccgccctccttgcacgggccggcccagcttccccgcccctggcgtccgctccctcccgctcgcagcttacttaacctggcccgggcggcggaggcgctctcacttccctggagccgcccgcttgcccgtcggtcgctagctcgctcggtgcgcgtcgtcccgctccatggcgctcttcgtgcggctgctggctctcgccctggctctggccctgggccccgccgcgaccctggcgggtcccgccaagtcgccctaccagctggtgctgcagcacagcaggctccggggccgccagcacggccccaacgtgtgtgctgtgcagaaggttattggcactaataggaagtacttcaccaactgcaagcagtggtaccaaaggaaaatctgtggcaaatcaacagtcatcagctacgagtgctgtcctggatatgaaaaggtccctggggagaagggctgtccagcagccctaccactctcaaacctttacgagaccctgggagtcgttggatccaccaccactcagctgtacacggaccgcacggagaagctgaggcctgagatggaggggcccggcagcttcaccatcttcgcccctagcaacgaggcctgggcctccttgccagctgaagtgctggactccctggtcagcaatgtcaacattgagctgctcaatgccctccgctaccatatggtgggcaggcgagtcctgactgatgagctgaaacacggcatgaccctcacctctatgtaccagaattccaacatccagatccaccactatcctaatgggattgtaactgtgaactgtgcccggctgctgaaagccgaccaccatgcaaccaacggggtggtgcacctcatcgataaggtcatctccaccatcaccaacaacatccagcagatcattgagatcgaggacacctttgagacccttcgggctgctgtggctgcatcagggctcaacacgatgcttgaaggtaacggccagtacacgcttttggccccgaccaatgaggccttcgagaagatccctagtgagactttgaaccgtatcctgggcgacccagaagccctgagagacctgctgaacaaccacatcttgaagtcagctatgtgtgctgaagccatcgttgcggggctgtctgtagagaccctggagggcacgacactggaggtgggctgcagcggggacatgctcactatcaacgggaaggcgatcatctccaataaagacatcctagccaccaacggggtgatccactacattgatgagctactcatcccagactcagccaagacactatttgaattggctgcagagtctgatgtgtccacagccattgaccttttcagacaagccggcctcggcaatcatctctctggaagtgagcggttgaccctcctggctcccctgaattctgtattcaaagatggaacccctccaattgatgcccatacaaggaatttgcttcggaaccacataattaaagaccagctggcctctaagtatctgtaccatggacagaccctggaaactctgggcggcaaaaaactgagagtttttgtttatcgtaatagcctctgcattgagaacagctgcatcgcggcccacgacaagagggggaggtacgggaccctgttcacgatggaccgggtgctgacccccccaatggggactgtcatggatgtcctgaagggagacaatcgctttagcatgctggtagctgccatccagtctgcaggactgacggagaccctcaaccgggaaggagtctacacagtctttgctcccacaaatgaagccttccgagccctgccaccaagagaacggagcagactcttgggagatgccaaggaacttgccaacatcctgaaataccacattggtgatgaaatcctggttagcggaggcatcggggccctggtgcggctaaagtctctccaaggtgacaagctggaagtcagcttgaaaaacaatgtggtgagtgtcaacaaggagcctgttgccgagcctgacatcatggccacaaatggcgtggtccatgtcatcaccaatgttctgcagcctccagccaacagacctcaggaaagaggggatgaacttgcagactctgcgcttgagatcttcaaacaagcatcagcgttttccagggcttcccagaggtctgtgcgactagcccctgtctatcaaaagttattagagaggatgaagcattagcttgaagcactacaggaggaatgcaccacggcagctctccgccaatttctctcagatttccacagagactgtttgaatgttttcaaaaccaagtatcacactttaatgtacatgggccgcaccataatgagatgtgagccttgtgcatgtgggggaggagggagagagatgtactttttaaatcatgttccccctaaacatggctgttaacccactgcatgcagaaacttggatgtcactgcctgacattcacttccagagaggacctatcccaaatgtggaattgactgcctatgccaagtccctggaaaaggagcttcagtattgtggggctcataaaacatgaatcaagcaatccagcctcatgggaagtcctggcacagtttttgtaaagcccttgcacagctggagaaatggcatcattataagctatgagttgaaatgttctgtcaaatgtgtctcacatctacacgtggcttggaggcttttatggggccctgtccaggtagaaaagaaatggtatgtagagcttagatttccctattgtgacagagccatggtgtgtttgtaataataaaaccaaagaaacatacgtcctgtgtgcatgg

SEQ ID NO: 5361 - protein, 683 aa, Homo sapiens; identical to SEQ ID NO: 676

SEQ ID NO: 5362 - DNA, 2879 bp, Homo sapiens
agtgagggcaagggctgggaaaactgagcacgggcacagtgcgggagcgggtgggtgcccagggcagccaggggcgcacgggttgggaggcgccaggcggcccgccctccttgcacgggccggcccagcttccccgcccctggcgtccgctccctcccgctcgcagcttacttaacctggcccgggcggcggaggcgctctcacttccctggagccgcccgcttgcccgtcggtcgctagctcgctcggtgcgcgtcgtcccgctccatggcgctcttcgtgcggctgctggctctcgccctggctctggccctgggccccgccgcgaccctggcgggtcccgccaagtcgccctaccagctgtgtgctgtgcagaaggttattggcactaataggaagtacttcaccaactgcaagcagtggtaccaaaggaaaatctgtggcaaatcaacagtcatcagctacgagtgctgtcctggatatgaaaaggtccctggggagaagggctgtccagcagccctaccactctcaaacctttacgagaccctgggagtcgttggatccaccaccactcagctgtacacggaccgcacggagaagctgaggcctgagatggaggggcccggcagcttcaccatcttcgcccctagcaacgaggcctgggcctccttgccagctgaagtgctggactccctggtcagcaatgtcaacattgagctgctcaatgccctccgctaccatatggtgggcaggcgagtcctgactgatgagctgaaacacggcatgaccctcacctctatgtaccagaattccaacatccagatccaccactatcctaatgggattgtaactgtgaactgtgcccggctgctgaaagccgaccaccatgcaaccaacggggtggtgcacctcatcgataaggtcatctccaccatcaccaacaacatccagcagatcattgagatcgaggacacctttgagacccttcgggctgctgtggctgcatcagggctcaacacgatgcttgaaggtaacggccagtacacgcttttggccccgaccaatgaggccttcgagaagatccctagtgagactttgaaccgtatcctgggcgacccagaagccctgagagacctgctgaacaaccacatcttgaagtcagctatgtgtgctgaagccatcgttgcggggctgtctgtagagaccctggagggcacgacactggaggtgggctgcagcggggacatgctcactatcaacgggaaggcgatcatctccaataaagacatcctagccaccaacggggtgatccactacattgatgagctactcatcccagactcagccaagacactatttgaattggctgcagagtctgatgtgtccacagccattgaccttttcagacaagccggcctcggcaatcatctctctggaagtgagcggttgaccctcctggctcccctgaattctgtattcaaagatggaacccctccaattgatgcccatacaaggaatttgcttcggaaccacataattaaagaccagctggcctctaagtatctgtaccatggacagaccctggaaactctgggcggcaaaaaactgagagtttttgtttatcgtaatagcctctgcattgagaacagctgcatcgcggcccacgacaagagggggaggtacgggaccctgttcacgatggaccgggtgctgacccccccaatggggactgtcatggatgtcctgaagggagacaatcgctttagcatgctggtagctgccatccagtctgcaggactgacggagaccctcaaccgggaaggagtctacacagtctttgctcccacaaatgaagccttccgagccctgccaccaagagaacggagcagactcttgggagatgccaaggaacttgccaacatcctgaaataccacattggtgatgaaatcctggttagcggaggcatcggggccctggtgcggctaaagtctctccaaggtgacaagctggaagtcagcttgaaaaacaatgtggtgagtgtcaacaaggagcctgttgccgagcctgacatcatggccacaaatggcgtggtccatgtcatcaccaatgttctgcagcctccagccaacagacctcaggaaagaggggatgaacttgcagactctgcgcttgagatcttcaaacaagcatcagcgttttccagggcttcccagaggtctgtgcgactagcccctgtctatcaaaagttattagagaggatgaagcattagcttgaagcactacaggaggaatgcaccacggcagctctccgccaatttctctcagatttccacagagactgtttgaatgttttcaaaaccaagtatcacactttaatgtacatgggccgcaccataatgagatgtgagccttgtgcatgtgggggaggagggagagagatgtactttttaaatcatgttccccctaaacatggctgttaacccactgcatgcagaaacttggatgtcactgcctgacattcacttccagagaggacctatcccaaatgtggaattgactgcctatgccaagtccctggaaaaggagcttcagtattgtggggctcataaaacatgaatcaagcaatccagcctcatgggaagtcctggcacagtttttgtaaagcccttgcacagctggagaaatggcatcattataagctatgagttgaaatgttctgtcaaatgtgtctcacatctacacgtggcttggaggcttttatggggccctgtccaggtagaaaagaaatggtatgtagagcttagatttccctattgtgacagagccatggtgtgtttgtaataataaaaccaaagaaacatacgtcctgtgtgcatgg

SEQ ID NO: 5363 - protein, 667 aa, Homo sapiens; identical to SEQ ID NO: 5355

SEQ ID NO: 5364 - DNA, 479 bp, Homo sapiens
agatggaacccctccaattgatgcccatacaaggaatttgcttcggaaccacataattaaagaccagctggcctctaagtatctgtaccatggacagaccctggaaactctgggcggcaaaaaactgagagtttttgtttatcgtaatagcctctgcattgagaacagctgcatcgcggcccacgacaagagggggaggtacgggaccctgttcacgatggaccgggtgctgacccccccaatggggactgtcatggattcctggcacagtttttgtaaagcccttgcacagctggagaaatggcatcattataagctatgagttgaaatgttctgtcaaatgtgtctcacatctacacgtggcttggaggcttttatggggccctgtccaggtagaaaagaaatggtatgtagagcttagatttccctattgtgacagagccatggtgtgtttgtaataataaaaccaaagaaacata

SEQ ID NO: 5365 - protein, 34 aa, Homo sapiens
MDRVLTPPMGTVMDSWHSFCKALAQLEKWHHYKL

SEQ ID NO: 5366 - DNA, 1039 bp, Homo sapiens
ggccaactgactgctggggcagatttgtggtcatgaacatgtgctttgtgtcctctgaccattagacagattgagatgccaaggaacttgccaacatcctgaaataccacattggtgatgaaatcctggttagcggaggcatcggggccctggtgcggctaaagtctctccaaggtgacaagctggaagtcagcttgaaaaacaatgtggtgagtgtcaacaaggagcctgttgccgagcctgacatcatggccacaaatggcgtggtccatgtcatcaccaatgttctgcagcctccagccaacagacctcaggaaagaggggatgaacttgcagactctgcgcttgagatcttcaaacaagcatcagcgttttccagggcttcccagaggtctgtgcgactagcccctgtctatcaaaagttattagagaggatgaagcattagcttgaagcactacaggaggaatgcaccacggcagctctccgccaatttctctcagatttccacagagactgtttgaatgttttcaaaaccaagtatcacactttaatgtacatgggccgcaccataatgagatgtgagccttgtgcatgtgggggaggagggagagagatgtactttttaaatcatgttccccctaaacatggctgttaacccactgcatgcagaaacttggatgtcactgcctgacattcacttccagagaggacctatcccaaatgtggaattgactgcctatgccaagtccctggaaaaggagcttcagtattgtggggctcataaaacatgaatcaagcaatccagcctcatgggaagtcctggcacagtttttgtaaagcccttgcacagctggagaaatggcatcattataagctatgagttgaaatgttctgtcaaatgtgtctcacatctacacgtggcttggaggcttttatggggccctgtccaggtagaaaagaaatggtatgtagagcttagatttccctattgtgacagagccatggtgtgtttgtaataataaaaccaaagaaacatac

SEQ ID NO: 5367 - protein, 65 aa, Homo sapiens
MATNGVVHVITNVLQPPANRPQERGDELADSALEIFKQASAFSRASQRSVRLAPVYQKLLERMKH

SEQ ID NO: 5368 - DNA, 1054 bp, Homo sapiens
ggccaactgactgctggggcagatttgtggtcatgaacatgtgctttgtgtcctctgaccattagacagattgagatgccaaggaacttgccaacatcctgaaataccacattggtgatgaaatcctggttagcggaggcatcggggccctggtgcggctaaagtctctccaaggtgacaagctggaagtcagcttgaaaaacaatgtggtgagtgtcaacaaggagcctgttgccgagcctgacatcatggccacaaatggcgtggtccatgtcatcaccaatgttctgcagcctccagccaacagacctcaggaaagaggggatgaacttgcagactctgcgcttgagatcttcaaacaagcatcagcgttttccagggcttcccagaggtctgtgcgactagcccctgtctatcaaaagttattagagaggatgaagcattagcttgaagcactacaggaggaatgcaccacggcagctctccgccaatttctctcagatttccacagagactgtttgaatgttttcaaaaccaagtatcacactttaatgtacatgggccgcaccataatgagatgtgagccttgtgcatgtgggggaggagggagagagatgtactttttaaatcatgttccccctaaacatggctgttaacccactgcatgcagaaacttggatgtcactgcctgacattcacttccagagaggacctatcccaaatgtggaattgactgcctatgccaagtccctggaaaaggagcttcagtattgtggggctcataaaacatgaatcaagcaatccagcctcatgggaagtcctggcacagtttttgtaaagcccttgcacagctggagaaatggcatcattataagctatgagttgaaatgttctgtcaaatgtgtctcacatctacacgtggcttggaggcttttatggggccctgtccaggtagaaaagaaatggtatgtagagcttagatttccctattgtgacagagccatggtgtgtttgtaataataaaaccaaagaaacatacgtcctgtgtgcatgg

SEQ ID NO: 5369 - protein, 65 aa, Homo sapiens; identical to SEQ ID NO: 5367

SEQ ID NO: 5370 - DNA, 1849 bp, Homo sapiens
aggttaatctaacttttcttgcttatttcagctatgatctgaaaggaatggaagcacaaaatgatgaataaggtatttttaacaaagatacatgggtaaattaacagcagtaatgtaaaaaagactgagggagcaacaatgtggaaagggaaggaaaggaagctgtataggaacaatcacacaaataatcatcaaaattaaactttataaatctaaacatagtatctacaacctttatgaaggttaagttttgttaaattgtctaagttttgcatttttacaattttcactgtagagaaaaaaatattaatagttaccaaaggaataaaagactaaaataatttgttatacatctgcaaatagctccttaaatttggaacactaatttcataatgatatttggatccataaatgtgaaactgtcacactgaatgtaggtactgttttccccacaatggatactactgcattggcatctagcagaaattgtaagctatttggaatgttactaaacctactgggactaaggttttcaatcttttgtctttcaaattaaaattaaaaactaattcactctgggcaattcaggtactctaaggaaattcaagtactctagttttaaatacgaattttcaaaaacgcaacccaagtaccctttcctctcaacttctgtgaggccaagccacgacctccacctattcaatctttgctgctagataacaacccttttggtagtgctaggcaacaggcatgatgtgacaaacctagacatcaaaacttttccacagaaagataaggtaaacaagatatacttagcgccacacccatttaaatgcacaagcaaccaaaattgctccctccccccgcaacaccccccccccccccccaaagctccagctggtcaggaaacattgtctttacaatcaagataaacatctggctcagggtgttcagccattcctcacctacaggcttgcctaagccccattctccaatgccatcaccaccagaaccggaacattctgttgggaagccggcaaacgtccaaataccccaagtatcctcgcccgagttctgcaaccaaaaatctgttttggctactgagcatgctcagacttaagacgggcgcgccacatgggagttttcaaagcttaggctccaaactccacgtagtaacagcagctgaaaggaggagaggggaaaaggggaggggaagagactggaatattaatttgagccctgatattgaagtataggacccggccagcggctgaatatggtgaaggcaaaaagacgctgctttggcattctctttgcagcacagagaagtttacatgaagtagaagaaatccttgcagtggtgaaaactgacatggcaagtggcagaaaccaggtctaactaccagctgattgcagtagccggtcacaactgcccagagtgtaattcccaccgataagcgcggatccttatctttgaaacacaaagcgacggcggcacggattcatcaagccattggacagcttcgcagtgcagcagcccaggctgcccggccgagcaccgcagtcctatcaaggtttgctgtagctcagaaggctctgcctacatgactactgcataccctactgggagaattggaagaatgtgatgatggtaggagtcacccagcatagaagcatgagtgaatgacatcccagagatctgcaaaggatcctggtagccacttcaaagactttttctcccttcctcagacaatcatggcacatggacatcagaggaagaaatggcgaagtttgtatgactcctccagcagagtccttggaaacaataaagcttcctttccaaattctg

SEQ ID NO: 5371 - protein, 95 aa, Homo sapiens
MHKQPKLLPPPATPPPPPQSSSWSGNIVFTIKINIWLRVFSHSSPTGLPKPHSPMPSPPEPEHSVGKPANVQIPQVSSPEFCNQKSVLATEHAQT

SEQ ID NO: 5372 - DNA, 463 bp, Homo sapiens
atccgggtcctgggcgagcgggcgccgtgcgcgtgtcccgcggccgagctgctaataaagttgcagcgaggagaagcgcagcgacggcgtcgggagagcgcgcctagccggctcgcgaaaaggaagctgttgaagttattgaagtacctgttgctatattctaagaaattaaaattccagcagtaaagcgattgttgggctggaaacaaggtgatgaggaggagaaatgggcagaaaaggcagttgatgctttggtgaagaaactaaaaaagaaaaagggtgccatggaggaactggagaaagccttgagcagtccaggacagccgagtaaatgtgtcactattcccagatctttagatggacgcctgcaggtttctcacagaaaaggcttaccccatgttatatattgtcgtgtttggcgctggccggatttgcagagtcatcatgagctaaagccgttgga

SEQ ID NO: 5373 - protein, 58 aa, Homo sapiens
MEELEKALSSPGQPSKCVTIPRSLDGRLQVSHRKGLPHVIYCRVWRWPDLQSHHELKP

SEQ ID NO: 5374 - DNA, 6512 bp, Homo sapiens
atccgggtcctgggcgagcgggcgccgtgcgcgtgtcccgcggccgagctgctaataaagttgcagcgaggagaagcgcagcgacggcgtcgggagagcgcgcctagccggctcgcgaaaaggaagctgttgaagttattgaagtacctgttgctatattctaagaaattaaaatgtccagaaatctgcctctgacttgacccaatgaaagaagcatatggcacttgtgaagataaatgttactcctccctttttaattggaacttctgcttaggacctgtgtatgacgtttcacctgtgatctgttctttcggtagccactgactttgagttacaggaaggtctccgaagatttgtgtcaaatgacgtcaatggccagcttgttttcttttactagtccagcagtaaagcgattgttgggctggaaacaaggtgatgaggaggagaaatgggcagaaaaggcagttgatgctttggtgaagaaactaaaaaagaaaaagggtgccatggaggaactggagaaagccttgagcagtccaggacagccgagtaaatgtgtcactattcccagatctttagatggacgcctgcaggtttctcacagaaaaggcttaccccatgttatatattgtcgtgtttggcgctggccggatttgcagagtcatcatgagctaaagccgttggatatttgtgaatttccttttggatctaagcaaaaagaagtttgtatcaacccataccactataagagagtggagagtccagtcttacctccagtattagtgcctcgtcataatgaattcaatccacaacacagccttctggttcagtttaggaacctgagccacaatgaaccacacatgccacaaaatgccacgtttccagattctttccaccagcccaacaacactccttttcccttatctccaaacagcccttatcccccttctcctgctagcagcacatatcccaactccccagcaagttctggaccaggaagtccatttcagctcccagctgatacgcctcctcctgcctatatgccacctgatgatcagatgggtcaagataattcccagcctatggatacaagcaataatatgattcctcagattatgcccagtatatccagcagggatgttcagcctgttgcctatgaagagcctaaacattggtgttcaatagtctactatgaattaaacaatcgtgttggagaagcttttcatgcatcttctactagtgtgttagtagatggattcacagatccttcaaataacaaaagtagattctgcttgggtttgttgtcaaatgttaatcgtaattcgacaattgaaaacactaggcgacatattggaaaaggtgttcatctgtactatgttggtggagaggtgtatgcggaatgcctcagtgacagcagcatatttgtacagagtaggaactgcaactttcatcatggctttcatcccaccactgtctgtaagattcccagcagctgcagcctcaaaatttttaacaatcaggagtttgctcagcttctggctcaatctgtcaaccatgggtttgaggcagtatatgagctcaccaaaatgtgtaccattcggatgagttttgtcaagggttggggagcagaatatcaccggcaggatgtaaccagcaccccatgttggattgagattatcttcatgggcctcttcagtggctggataaagtccttactcagatgggctcccctctgaaccccatatcttctgtttcataatgcagaagtattcttttcaattatattgttagtggacttgttttaattttagagaaactttgagtacagatactgtgagcttacattgaaaacagatattacagcttatttttttctacataattgtgaccaatacatttgtattttgtgatgaatctacatttgtttgtattcatgttcatgtgattaactcttagaagtgttgtaaaagatgcagagtaagtattatgccccagttcagaaatttggcattgatcttaaactggaacatgcttttactttattgccctaacaattttttattaaatttatttgaaaatgcatcacatgatgaaaaattatagtagcttataagagggcatatacagtgaagagtaagttttccctcctactctcgatcttccagaagctgtacttttaccagtttctttgtcccaccaacttaaaaaaaaaaagtacaattcattgttttgcaaaagtgtatggtaggggcttaaaagaaactataaagttttatttgaatgaacactatgcactgctgtaactggtagtgttcagtaaaagcaaaatgatagttttctagatgacataaaatttacatttaatacagataagtgttcttcagtgtaatgtgacttcatgctatatatcttttgtaagacatttccttttttaaaaaaatttttgcaaataactgatctcaagtatatgtcatttactcaaaatctgtcataagcattactttatagctagtgacagtgcatgcacagccttgttcaactatgtttgctgcttttggacaatgttgcaagaactctatttttgacatgcattaatcttttattttgcacttttatgggtgacagtttttagcataacctttgataaaatacactcaagtgacttggacttagatgcttatccttacgtccttggtaccttttttgtattaacaaacactgcaatttatagattacatttgtaggaagttatgcttttttctggtttttgttttactttcaacctaggttataagactgttattctatagctccaacttaaggtgcctttttaattccctacagttttatgggtgttatcagtgctggagaatcatgtagttaatcccattgctcttacaagtgtcagcttacttgtatcagcctccctacgcaaggacctatgcactggagccgtaggaggctcttcagttgggccccaaggataaggctactgatttgatactaaatgaatcagcagtggatgtagggatagctgattttaaaacactcggctgggcacagtggctcacacctgtaatcccagcactttgggaggctgaggcaggcagatcatgatgtcaggagtttgagaccagcctggccaatatggtgaaaccctgtctctacaaaaaatacaaaaattagctgggcatggtggtgcgtgcctgaagtcccagctactcgggaagctgaggcagaagaatcacttgaacctgggaggcggaggttgtggtgagccgagatcgcaccactgcactccagcctgggcgacagagcgagactctgcctcaaaaaacaaaacaaaacaaaacactcacccatcaacgaatatagactcttctctcatttatcgatgatcctctttttccattttttaagtacttatgtggaagctagtctcccaaaacacaatctttagagagaaaagacatgaacgaactccaaaatatccatttaatcaatcatgtttttggctttggataaagaactttgaaccagtttttttctcaggagctgtcaaatggacacttaattatgacatgagaatgaagaaattattttggaaaaaaaaaatgacctaatttacctatcagtgaaagctttattttctggtgccttttgaaagtatatggagtcatatcattcttctgtttaaaatgttagtttggtttgactttccactttgtcctttctgctcttgtgaagaaaaaaaaaagcattttcgaggaaagaattatgcaatttcttttgttttctgtgtcattatttattgctttttcaatgtgcagccagtggatggttttagttctttcagatgaactgccatttgtgtttcagctcacagttctttgctgggtaaaagaaatactttctgacagtcacctgagccttaaatgtaagtattacatgacatgcattctgtttcttccagagttctgtctgccacacgaaagagaatatttgcttacttgatagaactttggcattttcatcattcttttacttaaccaggcttatggcatgatctctggaacaaatttgtaggaaaaaattactccaattgaatgactgatgtatgtaatcaacttcattgggctgcagtaaactagtggaaattagagagttgttttattggtgttttctactgtgagttaattaaaaattgtttttatttggggtcattatgtcacagtcttgagttaacaagatcttacgtgattggccttttctttgttttctcttaggagttgtgtctcatgaatgacagtactaaagctattaacaactaagagtttgacagagaactataagcctgttgtatctcctaaaagttgtcaactccccacccttggactttaaatgaaaattttattcagtccagctattcttacagtccctaaggattttcatatatctatgtataggagataaaatttgctagtaagatttttaaaaactggctagtgaaaggaaagtacctctgaaagaaaccattttagcaaattatggttatatgttttaatttaatctacagaatgttttatagtaaaattctagcaccactagaataatcacatagcatgtacaatatatttatgctggctgaaaagacagaatctgggaataataaaattgcaaccagtttggtaatgcaaacagcagaatagaatgaaatctcagtaatgaattaaagcaacaaaaagatattgattggcaaaaagcaagatataagagattcatttgcttaacatttctacataatatttatggtctggtcagtattggtctggtcagtattgcctggctgacgtgaaatgtaaactagtaggcgtgttattgatctgctaaaactaaccctctttttaagaggagatttaaggaagacgtcaatcaaaatgtcaaatatgtgtgtcagaatataaataatttttcacattgtattgttgctatataaaaaaaataatagaattggttgggtttctgaggtgaaatccagagtaagagtactagacagttcaacaagccacatctaatggcacagatagaggatgtagctattttatacctttcataacatttgagagtaagatatccttcaggatgtgaagtgattattaagtactcatacctgaaatctgttgtcaagattagaactggggttcatgttaaaaaccttccatattacctgagggtacctgtggggaacagttccttcccctgtgtggtagtattttgttggaagagaatgtttatacaaaaaatgaaattcttccaacagcagagaaactctaaaaagtttgatagtacctatcaaagtgctgtacttctgtgatagagaacatctgatgtaccaatttagatctatttctttatactttttctaatcaattgcttaatagtactttggatgattatcacctttgccacttaaaatatataaatatcctttttacttcatgaggaaggaagaattttttgataattactgagttcagccttttgtgatgacttatattttggacttacattttaactttaaagaatgtcagatcccttctttgtcttactagttaaatcctcacctaatctcttgggtatgaatataaatgtgtgtcatcgttatattgttcagctagatgagcaagtatcttagggtagtaggtagcctggtggttttagaagtgtttggtgatttttatggagagagttttcctaagtggtggtttataggtggtatcagatattattagggcagctttttggggagtaatctcaggtctcccagagcagcagcatttttctcattgatataagtaagattcttaggagcttttcttatcacacaagatgcctgaatcgaatgtgagaattgaaggcatttcttctgcataaacaaagaattctacctgctggacagaaacctggaaagttctttggaattcgctgaattacagtttagtatgtcctgattacagagtgacaatatttatcaagcctttgttatattggattatcttctctcttaaaatacaactgtattataattgaaatgacagcccaaaattggatggtttaccaaaaccaatgaaagggatttcacacatcaatttttatttctgttttgaagagcacatgctatataataattgctagtagcaactgcagtaaaacaggtgataagttattttctctgaaaagatccagtcctagagcaggattcttcgatcattcatggcagagtgaaaaaggtttgtatggttcttgtccaaataactcagttcttaaaattcttaaaatgatcgtaaaccattatcctttaaaggtttatttgaagatgctgttaaagtacagaattttgtgtacaggtagatttttccgtccctcattaatagtgccttcttaattaatacagactggtgttagctataacaaaactccagtaaggccaaagaatcccaagttctttgtgg

SEQ ID NO: 5375 - protein, 457 aa, Homo sapiens
MTSMASLFSFTSPAVKRLLGWKQGDEEEKWAEKAVDALVKKLKKKKGAMEELEKALSSPGQPSKCVTIPRSLDGRLQVSHRKGLPHVIYCRVWRWPDLQSHHELKPLDICEFPFGSKQKEVCINPYHYKRVESPVLPPVLVPRHNEFNPQHSLLVQFRNLSHNEPHMPQNATFPDSFHQPNNTPFPLSPNSPYPPSPASSTYPNSPASSGPGSPFQLPADTPPPAYMPPDDQMGQDNSQPMDTSNNMIPQIMPSISSRDVQPVAYEEPKHWCSIVYYELNNRVGEAFHASSTSVLVDGFTDPSNNKSRFCLGLLSNVNRNSTIENTRRHIGKGVHLYYVGGEVYAECLSDSSIFVQSRNCNFHHGFHPTTVCKIPSSCSLKIFNNQEFAQLLAQSVNHGFEAVYELTKMCTIRMSFVKGWGAEYHRQDVTSTPCWIEIIFMGLFSGWIKSLLRWAPL

SEQ ID NO: 5376 - DNA, 7017 bp, Homo sapiens
atccgggtcctgggcgagcgggcgccgtgcgcgtgtcccgcggccgagctgctaataaagttgcagcgaggagaagcgcagcgacggcgtcgggagagcgcgcctagccggctcgcgaaaaggaagctgttgaagttattgaagtacctgttgctatattctaagaaattaaaatgtccagaaatctgcctctgacttgacccaatgaaagaagcatatggcacttgtgaagataaatgttactcctccctttttaattggaacttctgcttaggacctgtgtatgacgtttcacctgtgatctgttctttcggtagccactgactttgagttacaggaaggtctccgaagatttgtgtcaaatgacgtcaatggccagcttgttttcttttactagtccagcagtaaagcgattgttgggctggaaacaaggtgatgaggaggagaaatgggcagaaaaggcagttgatgctttggtgaagaaactaaaaaagaaaaagggtgccatggaggaactggagaaagccttgagcagtccaggacagccgagtaaatgtgtcactattcccagatctttagatggacgcctgcaggtttctcacagaaaaggcttaccccatgttatatattgtcgtgtttggcgctggccggatttgcagagtcatcatgagctaaagccgttggatatttgtgaatttccttttggatctaagcaaaaagaagtttgtatcaacccataccactataagagagtggagagtccagtcttacctccagtattagtgcctcgtcataatgaattcaatccacaacacagccttctggttcagtttaggaacctgagccacaatgaaccacacatgccacaaaatgccacgtttccagattctttccaccagcccaacaacactccttttcccttatctccaaacagcccttatcccccttctcctgctagcagcacatatcccaactccccagcaagttctggaccaggaagtccatttcagctcccagctgatacgcctcctcctgcctatatgccacctgatgatcagatgggtcaagataattcccagcctatggatacaagcaataatatgattcctcagattatgcccagtatatccagcagggatgttcagcctgttgcctatgaagagcctaaacattggtgttcaatagtctactatgaattaaacaatcgtgttggagaagcttttcatgcatcttctactagtgtgttagtagatggattcacagatccttcaaataacaaaagtagattctgcttgggtttgttgtcaaatgttaatcgtaattcgacaattgaaaacactaggcgacatattggaaaaggtgttcatctgtactatgttggtggagaggtgtatgcggaatgcctcagtgacagcagcatatttgtacagagtaggaactgcaactttcatcatggctttcatcccaccactgtctgtaagattcccagcagctgcagcctcaaaatttttaacaatcaggagtttgctcagcttctggctcaatctgtcaaccatgggtttgaggcagtatatgagctcaccaaaatgtgtaccattcggatgagttttgtcaagggttggggagcagaatatcaccggcaggatgtaaccagcaccccatgttggattgagattatcttcatgggcctcttcagtggctggataaagtccttactcagatgggctcccctctgaaccccatatcttctgtttcataatgcagaagtattcttttcaattatattgttagtggacttgttttaattttagagaaactttgagtacagatactgtgagcttacattgaaaacagatattacagcttatttttttctacataattgtgaccaatacatttgtattttgtgatgaatctacatttgtttgtattcatgttcatgtgattaactcttagaagtgttgtaaaagatgcagagtaagtattatgccccagttcagaaatttggcattgatcttaaactggaacatgcttttactttattgccctaacaattttttattaaatttatttgaaaatgcatcacatgatgaaaaattatagtagcttataagagggcatatacagtgaagagtaagttttccctcctactctcgatcttccagaagctgtacttttaccagtttctttgtcccaccaacttaaaaaaaaaaagtacaattcattgttttgcaaaagtgtatggtaggggcttaaaagaaactataaagttttatttgaatgaacactatgcactgctgtaactggtagtgttcagtaaaagcaaaatgatagttttctagatgacataaaatttacatttaatacagataagtgttcttcagtgtaatgtgacttcatgctatatatcttttgtaagacatttccttttttaaaaaaatttttgcaaataactgatctcaagtatatgtcatttactcaaaatctgtcataagcattactttatagctagtgacagtgcatgcacagccttgttcaactatgtttgctgcttttggacaatgttgcaagaactctatttttgacatgcattaatcttttattttgcacttttatgggtgacagtttttagcataacctttgataaaatacactcaagtgacttggacttagatgcttatccttacgtccttggtaccttttttgtattaacaaacactgcaatttatagattacatttgtaggaagttatgcttttttctggtttttgttttactttcaacctaggttataagactgttattctatagctccaacttaaggtgcctttttaattccctacagttttatgggtgttatcagtgctggagaatcatgtagttaatcccattgctcttacaagtgtcagcttacttgtatcagcctccctacgcaaggacctatgcactggagccgtaggaggctcttcagttgggccccaaggataaggctactgatttgatactaaatgaatcagcagtggatgtagggatagctgattttaaaacactcggctgggcacagtggctcacacctgtaatcccagcactttgggaggctgaggcaggcagatcatgatgtcaggagtttgagaccagcctggccaatatggtgaaaccctgtctctacaaaaaatacaaaaattagctgggcatggtggtgcgtgcctgaagtcccagctactcgggaagctgaggcagaagaatcacttgaacctgggaggcggaggttgtggtgagccgagatcgcaccactgcactccagcctgggcgacagagcgagactctgcctcaaaaaacaaaacaaaacaaaacactcacccatcaacgaatatagactcttctctcatttatcgatgatcctctttttccattttttaagtacttatgtggaagctagtctcccaaaacacaatctttagagagaaaagacatgaacgaactccaaaatatccatttaatcaatcatgtttttggctttggataaagaactttgaaccagtttttttctcaggagctgtcaaatggacacttaattatgacatgagaatgaagaaattattttggaaaaaaaaaatgacctaatttacctatcagtgaaagctttattttctggtgccttttgaaagtatatggagtcatatcattcttctgtttaaaatgttagtttggtttgactttccactttgtcctttctgctcttgtgaagaaaaaaaaaagcattttcgaggaaagaattatgcaatttcttttgttttctgtgtcattatttattgctttttcaatgtgcagccagtggatggttttagttctttcagatgaactgccatttgtgtttcagctcacagttctttgctgggtaaaagaaatactttctgacagtcacctgagccttaaatgtaagtattacatgacatgcattctgtttcttccagagttctgtctgccacacgaaagagaatatttgcttacttgatagaactttggcattttcatcattcttttacttaaccaggcttatggcatgatctctggaacaaatttgtaggaaaaaattactccaattgaatgactgatgtatgtaatcaacttcattgggctgcagtaaactagtggaaattagagagttgttttattggtgttttctactgtgagttaattaaaaattgtttttatttggggtcattatgtcacagtcttgagttaacaagatcttacgtgattggccttttctttgttttctcttaggagttgtgtctcatgaatgacagtactaaagctattaacaactaagagtttgacagagaactataagcctgttgtatctcctaaaagttgtcaactccccacccttggactttaaatgaaaattttattcagtccagctattcttacagtccctaaggattttcatatatctatgtataggagataaaatttgctagtaagatttttaaaaactggctagtgaaaggaaagtacctctgaaagaaaccattttagcaaattatggttatatgttttaatttaatctacagaatgttttatagtaaaattctagcaccactagaataatcacatagcatgtacaatatatttatgctggctgaaaagacagaatctgggaataataaaattgcaaccagtttggtaatgcaaacagcagaatagaatgaaatctcagtaatgaattaaagcaacaaaaagatattgattggcaaaaagcaagatataagagattcatttgcttaacatttctacataatatttatggtctggtcagtattggtctggtcagtattgcctggctgacgtgaaatgtaaactagtaggcgtgttattgatctgctaaaactaaccctctttttaagaggagatttaaggaagacgtcaatcaaaatgtcaaatatgtgtgtcagaatataaataatttttcacattgtattgttgctatataaaaaaaataatagaattggttgggtttctgaggtgaaatccagagtaagagtactagacagttcaacaagccacatctaatggcacagatagaggatgtagctattttatacctttcataacatttgagagtaagatatccttcaggatgtgaagtgattattaagtactcatacctgaaatctgttgtcaagattagaactggggttcatgttaaaaaccttccatattacctgagggtacctgtggggaacagttccttcccctgtgtggtagtattttgttggaagagaatgtttatacaaaaaatgaaattcttccaacagcagagaaactctaaaaagtttgatagtacctatcaaagtgctgtacttctgtgatagagaacatctgatgtaccaatttagatctatttctttatactttttctaatcaattgcttaatagtactttggatgattatcacctttgccacttaaaatatataaatatcctttttacttcatgaggaaggaagaattttttgataattactgagttcagccttttgtgatgacttatattttggacttacattttaactttaaagaatgtcagatcccttctttgtcttactagttaaatcctcacctaatctcttgggtatgaatataaatgtgtgtcatcgttatattgttcagctagatgagcaagtatcttagggtagtaggtagcctggtggttttagaagtgtttggtgatttttatggagagagttttcctaagtggtggtttataggtggtatcagatattattagggcagctttttggggagtaatctcaggtctcccagagcagcagcatttttctcattgatataagtaagattcttaggagcttttcttatcacacaagatgcctgaatcgaatgtgagaattgaaggcatttcttctgcataaacaaagaattctacctgctggacagaaacctggaaagttctttggaattcgctgaattacagtttagtatgtcctgattacagagtgacaatatttatcaagcctttgttatattggattatcttctctcttaaaatacaactgtattataattgaaatgacagcccaaaattggatggtttaccaaaaccaatgaaagggatttcacacatcaatttttatttctgttttgaagagcacatgctatataataattgctagtagcaactgcagtaaaacaggtgataagttattttctctgaaaagatccagtcctagagcaggattcttcgatcattcatggcagagtgaaaaaggtttgtatggttcttgtccaaataactcagttcttaaaattcttaaaatgatcgtaaaccattatcctttaaaggtttatttgaagatgctgttaaagtacagaattttgtgtacaggtagatttttccgtccctcattaatagtgccttcttaattaatacagactggtgttagctataacaaaactccagtaaggccaaagaatcccaagttctttgtggaaaaaaaaaaaaaatcttttagggtcagattttcccttctaatatcattgaagatgatgttgcattgatttattcataaagtattttaactataggaactctagaagataatggttaggcaagtgattttttttttaaatatggttggcgtaagttgtattttgaaattcacttattttaaaatcgaagaggattgtaatcatggaaatagaatgtttgtatctacctgcccacattttcttaaaaagatatttcatatacagataatgaagaccaagctagtggctgcactgtaggtctgctgcttatttgtatttgttgtgcttctgtttatgttgtagaagctgaaattctagcaacatgcttcaattctgttattttgatacttatgaaaatgtattaggttttactatattgtgcttttgaaagccataactcttaagaactttgtttttgcatattgtttgctaattctttactttaataaacctcaaaacctgcttaa

SEQ ID NO: 5377 - protein, 457 aa, Homo sapiens; identical to SEQ ID NO: 5375

SEQ ID NO: 5378 - DNA, 6942 bp, Homo sapiens
atccgggtcctgggcgagcgggcgccgtgcgcgtgtcccgcggccgagctgctaataaagttgcagcgaggagaagcgcagcgacggcgtcgggagagcgcgcctagccggctcgcgagacttgacccaatgaaagaagcatatggcacttgtgaagataaatgttactcctccctttttaattggaacttctgcttaggacctgtgtatgacgtttcacctgtgatctgttctttcggtagccactgactttgagttacaggaaggtctccgaagatttgtgtcaaatgacgtcaatggccagcttgttttcttttactagtccagcagtaaagcgattgttgggctggaaacaaggtgatgaggaggagaaatgggcagaaaaggcagttgatgctttggtgaagaaactaaaaaagaaaaagggtgccatggaggaactggagaaagccttgagcagtccaggacagccgagtaaatgtgtcactattcccagatctttagatggacgcctgcaggtttctcacagaaaaggcttaccccatgttatatattgtcgtgtttggcgctggccggatttgcagagtcatcatgagctaaagccgttggatatttgtgaatttccttttggatctaagcaaaaagaagtttgtatcaacccataccactataagagagtggagagtccagtcttacctccagtattagtgcctcgtcataatgaattcaatccacaacacagccttctggttcagtttaggaacctgagccacaatgaaccacacatgccacaaaatgccacgtttccagattctttccaccagcccaacaacactccttttcccttatctccaaacagcccttatcccccttctcctgctagcagcacatatcccaactccccagcaagttctggaccaggaagtccatttcagctcccagctgatacgcctcctcctgcctatatgccacctgatgatcagatgggtcaagataattcccagcctatggatacaagcaataatatgattcctcagattatgcccagtatatccagcagggatgttcagcctgttgcctatgaagagcctaaacattggtgttcaatagtctactatgaattaaacaatcgtgttggagaagcttttcatgcatcttctactagtgtgttagtagatggattcacagatccttcaaataacaaaagtagattctgcttgggtttgttgtcaaatgttaatcgtaattcgacaattgaaaacactaggcgacatattggaaaaggtgttcatctgtactatgttggtggagaggtgtatgcggaatgcctcagtgacagcagcatatttgtacagagtaggaactgcaactttcatcatggctttcatcccaccactgtctgtaagattcccagcagctgcagcctcaaaatttttaacaatcaggagtttgctcagcttctggctcaatctgtcaaccatgggtttgaggcagtatatgagctcaccaaaatgtgtaccattcggatgagttttgtcaagggttggggagcagaatatcaccggcaggatgtaaccagcaccccatgttggattgagattatcttcatgggcctcttcagtggctggataaagtccttactcagatgggctcccctctgaaccccatatcttctgtttcataatgcagaagtattcttttcaattatattgttagtggacttgttttaattttagagaaactttgagtacagatactgtgagcttacattgaaaacagatattacagcttatttttttctacataattgtgaccaatacatttgtattttgtgatgaatctacatttgtttgtattcatgttcatgtgattaactcttagaagtgttgtaaaagatgcagagtaagtattatgccccagttcagaaatttggcattgatcttaaactggaacatgcttttactttattgccctaacaattttttattaaatttatttgaaaatgcatcacatgatgaaaaattatagtagcttataagagggcatatacagtgaagagtaagttttccctcctactctcgatcttccagaagctgtacttttaccagtttctttgtcccaccaacttaaaaaaaaaaagtacaattcattgttttgcaaaagtgtatggtaggggcttaaaagaaactataaagttttatttgaatgaacactatgcactgctgtaactggtagtgttcagtaaaagcaaaatgatagttttctagatgacataaaatttacatttaatacagataagtgttcttcagtgtaatgtgacttcatgctatatatcttttgtaagacatttccttttttaaaaaaatttttgcaaataactgatctcaagtatatgtcatttactcaaaatctgtcataagcattactttatagctagtgacagtgcatgcacagccttgttcaactatgtttgctgcttttggacaatgttgcaagaactctatttttgacatgcattaatcttttattttgcacttttatgggtgacagtttttagcataacctttgataaaatacactcaagtgacttggacttagatgcttatccttacgtccttggtaccttttttgtattaacaaacactgcaatttatagattacatttgtaggaagttatgcttttttctggtttttgttttactttcaacctaggttataagactgttattctatagctccaacttaaggtgcctttttaattccctacagttttatgggtgttatcagtgctggagaatcatgtagttaatcccattgctcttacaagtgtcagcttacttgtatcagcctccctacgcaaggacctatgcactggagccgtaggaggctcttcagttgggccccaaggataaggctactgatttgatactaaatgaatcagcagtggatgtagggatagctgattttaaaacactcggctgggcacagtggctcacacctgtaatcccagcactttgggaggctgaggcaggcagatcatgatgtcaggagtttgagaccagcctggccaatatggtgaaaccctgtctctacaaaaaatacaaaaattagctgggcatggtggtgcgtgcctgaagtcccagctactcgggaagctgaggcagaagaatcacttgaacctgggaggcggaggttgtggtgagccgagatcgcaccactgcactccagcctgggcgacagagcgagactctgcctcaaaaaacaaaacaaaacaaaacactcacccatcaacgaatatagactcttctctcatttatcgatgatcctctttttccattttttaagtacttatgtggaagctagtctcccaaaacacaatctttagagagaaaagacatgaacgaactccaaaatatccatttaatcaatcatgtttttggctttggataaagaactttgaaccagtttttttctcaggagctgtcaaatggacacttaattatgacatgagaatgaagaaattattttggaaaaaaaaaatgacctaatttacctatcagtgaaagctttattttctggtgccttttgaaagtatatggagtcatatcattcttctgtttaaaatgttagtttggtttgactttccactttgtcctttctgctcttgtgaagaaaaaaaaaagcattttcgaggaaagaattatgcaatttcttttgttttctgtgtcattatttattgctttttcaatgtgcagccagtggatggttttagttctttcagatgaactgccatttgtgtttcagctcacagttctttgctgggtaaaagaaatactttctgacagtcacctgagccttaaatgtaagtattacatgacatgcattctgtttcttccagagttctgtctgccacacgaaagagaatatttgcttacttgatagaactttggcattttcatcattcttttacttaaccaggcttatggcatgatctctggaacaaatttgtaggaaaaaattactccaattgaatgactgatgtatgtaatcaacttcattgggctgcagtaaactagtggaaattagagagttgttttattggtgttttctactgtgagttaattaaaaattgtttttatttggggtcattatgtcacagtcttgagttaacaagatcttacgtgattggccttttctttgttttctcttaggagttgtgtctcatgaatgacagtactaaagctattaacaactaagagtttgacagagaactataagcctgttgtatctcctaaaagttgtcaactccccacccttggactttaaatgaaaattttattcagtccagctattcttacagtccctaaggattttcatatatctatgtataggagataaaatttgctagtaagatttttaaaaactggctagtgaaaggaaagtacctctgaaagaaaccattttagcaaattatggttatatgttttaatttaatctacagaatgttttatagtaaaattctagcaccactagaataatcacatagcatgtacaatatatttatgctggctgaaaagacagaatctgggaataataaaattgcaaccagtttggtaatgcaaacagcagaatagaatgaaatctcagtaatgaattaaagcaacaaaaagatattgattggcaaaaagcaagatataagagattcatttgcttaacatttctacataatatttatggtctggtcagtattggtctggtcagtattgcctggctgacgtgaaatgtaaactagtaggcgtgttattgatctgctaaaactaaccctctttttaagaggagatttaaggaagacgtcaatcaaaatgtcaaatatgtgtgtcagaatataaataatttttcacattgtattgttgctatataaaaaaaataatagaattggttgggtttctgaggtgaaatccagagtaagagtactagacagttcaacaagccacatctaatggcacagatagaggatgtagctattttatacctttcataacatttgagagtaagatatccttcaggatgtgaagtgattattaagtactcatacctgaaatctgttgtcaagattagaactggggttcatgttaaaaaccttccatattacctgagggtacctgtggggaacagttccttcccctgtgtggtagtattttgttggaagagaatgtttatacaaaaaatgaaattcttccaacagcagagaaactctaaaaagtttgatagtacctatcaaagtgctgtacttctgtgatagagaacatctgatgtaccaatttagatctatttctttatactttttctaatcaattgcttaatagtactttggatgattatcacctttgccacttaaaatatataaatatcctttttacttcatgaggaaggaagaattttttgataattactgagttcagccttttgtgatgacttatattttggacttacattttaactttaaagaatgtcagatcccttctttgtcttactagttaaatcctcacctaatctcttgggtatgaatataaatgtgtgtcatcgttatattgttcagctagatgagcaagtatcttagggtagtaggtagcctggtggttttagaagtgtttggtgatttttatggagagagttttcctaagtggtggtttataggtggtatcagatattattagggcagctttttggggagtaatctcaggtctcccagagcagcagcatttttctcattgatataagtaagattcttaggagcttttcttatcacacaagatgcctgaatcgaatgtgagaattgaaggcatttcttctgcataaacaaagaattctacctgctggacagaaacctggaaagttctttggaattcgctgaattacagtttagtatgtcctgattacagagtgacaatatttatcaagcctttgttatattggattatcttctctcttaaaatacaactgtattataattgaaatgacagcccaaaattggatggtttaccaaaaccaatgaaagggatttcacacatcaatttttatttctgttttgaagagcacatgctatataataattgctagtagcaactgcagtaaaacaggtgataagttattttctctgaaaagatccagtcctagagcaggattcttcgatcattcatggcagagtgaaaaaggtttgtatggttcttgtccaaataactcagttcttaaaattcttaaaatgatcgtaaaccattatcctttaaaggtttatttgaagatgctgttaaagtacagaattttgtgtacaggtagatttttccgtccctcattaatagtgccttcttaattaatacagactggtgttagctataacaaaactccagtaaggccaaagaatcccaagttctttgtggaaaaaaaaaaaaaatcttttagggtcagattttcccttctaatatcattgaagatgatgttgcattgatttattcataaagtattttaactataggaactctagaagataatggttaggcaagtgattttttttttaaatatggttggcgtaagttgtattttgaaattcacttattttaaaatcgaagaggattgtaatcatggaaatagaatgtttgtatctacctgcccacattttcttaaaaagatatttcatatacagataatgaagaccaagctagtggctgcactgtaggtctgctgcttatttgtatttgttgtgcttctgtttatgttgtagaagctgaaattctagcaacatgcttcaattctgttattttgatacttatgaaaatgtattaggttttactatattgtgcttttgaaagccataactcttaagaactttgtttttgcatattgtttgctaattctttactttaataaacctcaaaacctgcttaa

SEQ ID NO: 5379 - protein, 457 aa, Homo sapiens; identical to SEQ ID NO: 5375

SEQ ID NO: 5380 - DNA, 7101 bp, Homo sapiens
atccgggtcctgggcgagcgggcgccgtgcgcgtgtcccgcggccgagctgctaataaagttgcagcgaggagaagcgcagcgacggcgtcgggagagcgcgcctagccggctcgcgaaaaggaagctgttgaagttattgaagtacctgttgctatattctaagaaattaaaatgtccagaaatctgcctctaaatgggatctcactatgttgctcagactggacgtgattgaactcctgggctcaagtgagtctcccgaataactgggattacaggacttgacccaatgaaagaagcatatggcacttgtgaagataaatgttactcctccctttttaattggaacttctgcttaggacctgtgtatgacgtttcacctgtgatctgttctttcggtagccactgactttgagttacaggaaggtctccgaagatttgtgtcaaatgacgtcaatggccagcttgttttcttttactagtccagcagtaaagcgattgttgggctggaaacaaggtgatgaggaggagaaatgggcagaaaaggcagttgatgctttggtgaagaaactaaaaaagaaaaagggtgccatggaggaactggagaaagccttgagcagtccaggacagccgagtaaatgtgtcactattcccagatctttagatggacgcctgcaggtttctcacagaaaaggcttaccccatgttatatattgtcgtgtttggcgctggccggatttgcagagtcatcatgagctaaagccgttggatatttgtgaatttccttttggatctaagcaaaaagaagtttgtatcaacccataccactataagagagtggagagtccagtcttacctccagtattagtgcctcgtcataatgaattcaatccacaacacagccttctggttcagtttaggaacctgagccacaatgaaccacacatgccacaaaatgccacgtttccagattctttccaccagcccaacaacactccttttcccttatctccaaacagcccttatcccccttctcctgctagcagcacatatcccaactccccagcaagttctggaccaggaagtccatttcagctcccagctgatacgcctcctcctgcctatatgccacctgatgatcagatgggtcaagataattcccagcctatggatacaagcaataatatgattcctcagattatgcccagtatatccagcagggatgttcagcctgttgcctatgaagagcctaaacattggtgttcaatagtctactatgaattaaacaatcgtgttggagaagcttttcatgcatcttctactagtgtgttagtagatggattcacagatccttcaaataacaaaagtagattctgcttgggtttgttgtcaaatgttaatcgtaattcgacaattgaaaacactaggcgacatattggaaaaggtgttcatctgtactatgttggtggagaggtgtatgcggaatgcctcagtgacagcagcatatttgtacagagtaggaactgcaactttcatcatggctttcatcccaccactgtctgtaagattcccagcagctgcagcctcaaaatttttaacaatcaggagtttgctcagcttctggctcaatctgtcaaccatgggtttgaggcagtatatgagctcaccaaaatgtgtaccattcggatgagttttgtcaagggttggggagcagaatatcaccggcaggatgtaaccagcaccccatgttggattgagattatcttcatgggcctcttcagtggctggataaagtccttactcagatgggctcccctctgaaccccatatcttctgtttcataatgcagaagtattcttttcaattatattgttagtggacttgttttaattttagagaaactttgagtacagatactgtgagcttacattgaaaacagatattacagcttatttttttctacataattgtgaccaatacatttgtattttgtgatgaatctacatttgtttgtattcatgttcatgtgattaactcttagaagtgttgtaaaagatgcagagtaagtattatgccccagttcagaaatttggcattgatcttaaactggaacatgcttttactttattgccctaacaattttttattaaatttatttgaaaatgcatcacatgatgaaaaattatagtagcttataagagggcatatacagtgaagagtaagttttccctcctactctcgatcttccagaagctgtacttttaccagtttctttgtcccaccaacttaaaaaaaaaaagtacaattcattgttttgcaaaagtgtatggtaggggcttaaaagaaactataaagttttatttgaatgaacactatgcactgctgtaactggtagtgttcagtaaaagcaaaatgatagttttctagatgacataaaatttacatttaatacagataagtgttcttcagtgtaatgtgacttcatgctatatatcttttgtaagacatttccttttttaaaaaaatttttgcaaataactgatctcaagtatatgtcatttactcaaaatctgtcataagcattactttatagctagtgacagtgcatgcacagccttgttcaactatgtttgctgcttttggacaatgttgcaagaactctatttttgacatgcattaatcttttattttgcacttttatgggtgacagtttttagcataacctttgataaaatacactcaagtgacttggacttagatgcttatccttacgtccttggtaccttttttgtattaacaaacactgcaatttatagattacatttgtaggaagttatgcttttttctggtttttgttttactttcaacctaggttataagactgttattctatagctccaacttaaggtgcctttttaattccctacagttttatgggtgttatcagtgctggagaatcatgtagttaatcccattgctcttacaagtgtcagcttacttgtatcagcctccctacgcaaggacctatgcactggagccgtaggaggctcttcagttgggccccaaggataaggctactgatttgatactaaatgaatcagcagtggatgtagggatagctgattttaaaacactcggctgggcacagtggctcacacctgtaatcccagcactttgggaggctgaggcaggcagatcatgatgtcaggagtttgagaccagcctggccaatatggtgaaaccctgtctctacaaaaaatacaaaaattagctgggcatggtggtgcgtgcctgaagtcccagctactcgggaagctgaggcagaagaatcacttgaacctgggaggcggaggttgtggtgagccgagatcgcaccactgcactccagcctgggcgacagagcgagactctgcctcaaaaaacaaaacaaaacaaaacactcacccatcaacgaatatagactcttctctcatttatcgatgatcctctttttccattttttaagtacttatgtggaagctagtctcccaaaacacaatctttagagagaaaagacatgaacgaactccaaaatatccatttaatcaatcatgtttttggctttggataaagaactttgaaccagtttttttctcaggagctgtcaaatggacacttaattatgacatgagaatgaagaaattattttggaaaaaaaaaatgacctaatttacctatcagtgaaagctttattttctggtgccttttgaaagtatatggagtcatatcattcttctgtttaaaatgttagtttggtttgactttccactttgtcctttctgctcttgtgaagaaaaaaaaaagcattttcgaggaaagaattatgcaatttcttttgttttctgtgtcattatttattgctttttcaatgtgcagccagtggatggttttagttctttcagatgaactgccatttgtgtttcagctcacagttctttgctgggtaaaagaaatactttctgacagtcacctgagccttaaatgtaagtattacatgacatgcattctgtttcttccagagttctgtctgccacacgaaagagaatatttgcttacttgatagaactttggcattttcatcattcttttacttaaccaggcttatggcatgatctctggaacaaatttgtaggaaaaaattactccaattgaatgactgatgtatgtaatcaacttcattgggctgcagtaaactagtggaaattagagagttgttttattggtgttttctactgtgagttaattaaaaattgtttttatttggggtcattatgtcacagtcttgagttaacaagatcttacgtgattggccttttctttgttttctcttaggagttgtgtctcatgaatgacagtactaaagctattaacaactaagagtttgacagagaactataagcctgttgtatctcctaaaagttgtcaactccccacccttggactttaaatgaaaattttattcagtccagctattcttacagtccctaaggattttcatatatctatgtataggagataaaatttgctagtaagatttttaaaaactggctagtgaaaggaaagtacctctgaaagaaaccattttagcaaattatggttatatgttttaatttaatctacagaatgttttatagtaaaattctagcaccactagaataatcacatagcatgtacaatatatttatgctggctgaaaagacagaatctgggaataataaaattgcaaccagtttggtaatgcaaacagcagaatagaatgaaatctcagtaatgaattaaagcaacaaaaagatattgattggcaaaaagcaagatataagagattcatttgcttaacatttctacataatatttatggtctggtcagtattggtctggtcagtattgcctggctgacgtgaaatgtaaactagtaggcgtgttattgatctgctaaaactaaccctctttttaagaggagatttaaggaagacgtcaatcaaaatgtcaaatatgtgtgtcagaatataaataatttttcacattgtattgttgctatataaaaaaaataatagaattggttgggtttctgaggtgaaatccagagtaagagtactagacagttcaacaagccacatctaatggcacagatagaggatgtagctattttatacctttcataacatttgagagtaagatatccttcaggatgtgaagtgattattaagtactcatacctgaaatctgttgtcaagattagaactggggttcatgttaaaaaccttccatattacctgagggtacctgtggggaacagttccttcccctgtgtggtagtattttgttggaagagaatgtttatacaaaaaatgaaattcttccaacagcagagaaactctaaaaagtttgatagtacctatcaaagtgctgtacttctgtgatagagaacatctgatgtaccaatttagatctatttctttatactttttctaatcaattgcttaatagtactttggatgattatcacctttgccacttaaaatatataaatatcctttttacttcatgaggaaggaagaattttttgataattactgagttcagccttttgtgatgacttatattttggacttacattttaactttaaagaatgtcagatcccttctttgtcttactagttaaatcctcacctaatctcttgggtatgaatataaatgtgtgtcatcgttatattgttcagctagatgagcaagtatcttagggtagtaggtagcctggtggttttagaagtgtttggtgatttttatggagagagttttcctaagtggtggtttataggtggtatcagatattattagggcagctttttggggagtaatctcaggtctcccagagcagcagcatttttctcattgatataagtaagattcttaggagcttttcttatcacacaagatgcctgaatcgaatgtgagaattgaaggcatttcttctgcataaacaaagaattctacctgctggacagaaacctggaaagttctttggaattcgctgaattacagtttagtatgtcctgattacagagtgacaatatttatcaagcctttgttatattggattatcttctctcttaaaatacaactgtattataattgaaatgacagcccaaaattggatggtttaccaaaaccaatgaaagggatttcacacatcaatttttatttctgttttgaagagcacatgctatataataattgctagtagcaactgcagtaaaacaggtgataagttattttctctgaaaagatccagtcctagagcaggattcttcgatcattcatggcagagtgaaaaaggtttgtatggttcttgtccaaataactcagttcttaaaattcttaaaatgatcgtaaaccattatcctttaaaggtttatttgaagatgctgttaaagtacagaattttgtgtacaggtagatttttccgtccctcattaatagtgccttcttaattaatacagactggtgttagctataacaaaactccagtaaggccaaagaatcccaagttctttgtggaaaaaaaaaaaaaatcttttagggtcagattttcccttctaatatcattgaagatgatgttgcattgatttattcataaagtattttaactataggaactctagaagataatggttaggcaagtgattttttttttaaatatggttggcgtaagttgtattttgaaattcacttattttaaaatcgaagaggattgtaatcatggaaatagaatgtttgtatctacctgcccacattttcttaaaaagatatttcatatacagataatgaagaccaagctagtggctgcactgtaggtctgctgcttatttgtatttgttgtgcttctgtttatgttgtagaagctgaaattctagcaacatgcttcaattctgttattttgatacttatgaaaatgtattaggttttactatattgtgcttttgaaagccataactcttaagaactttgtttttgcatattgtttgctaattctttactttaataaacctcaaaacctgcttaa

SEQ ID NO: 5381 - protein, 457 aa, Homo sapiens; identical to SEQ ID NO: 5375

SEQ ID NO: 5382 - DNA, 6714 bp, Homo sapiens
atccgggtcctgggcgagcgggcgccgtgcgcgtgtcccgcggccgagctgctaataaagttgcagcgaggagaagcgcagcgacggcgtcgggagagcgcgcctagccggctcgcgaaaaggaagctgttgaagttattgaagtacctgttgctatattctaagaaattaaaatgtccagaaatctgcctctgacttgacccaatgaaagaagcatatggcacttgtgaagataaatgttactcctccctttttaattggaacttctgcttaggacctgtgtatgacgtttcacctgtgatctgttctttcggtagccactgactttgagttacaggaaggtctccgaagatttgtgtcaaatgacgtcaatggccagcttgttttcttttactagtccagcagtaaagcgattgttgggctggaaacaaggtgatgaggaggagaaatgggcagaaaaggcagttgatgctttggtgaagaaactaaaaaagaaaaagggtgccatggaggaactggagaaagccttgagcagtccaggacagccgagtaaatgtgtcactattcccagatctttagatggacgcctgcaggtttctcacagaaaaggcttaccccatgttatatattgtcgtgtttggcgctggccggatttgcagagtcatcatgagctaaagccgttggatatttgtgaatttccttttggatctaagcaaaaagaagtttgtatcaacccataccactataagagagtggagagtccagtcttacctccagtattagtgcctcgtcataatgaattcaatccacaacacagccttctggttcagtttaggaacctgagccacaatgaaccacacatgccacaaaatgccacgtttccagattctttccaccagcccaacaacactccttttcccttatctccaaacagcccttatcccccttctcctgctagcagcacatatcccaactccccagcaagttctggaccaggaagtccatttcagctcccagctgatacgcctcctcctgcctatatgccacctgatgatcagatgggtcaagataattcccagcctatggatacaagcaataatatgattcctcagattatgcccagtatatccagcagggatgttcagcctgttgcctatgaagagcctaaacattggtgttcaatagtctactatgaattaaacaatcgtgttggagaagcttttcatgcatcttctactagtgtgttagtagatggattcacagatccttcaaataacaaaagtagattctgcttgggtttgttgtcaaatgttaatcgtaattcgacaattgaaaacactaggcgacatattggaaaaggtgttcatctgtactatgttggtggagaggtgtatgcggaatgcctcagtgacagcagcatatttgtacagagtaggaactgcaactttcatcatggctttcatcccaccactgtctgtaagattcccagcagctgcagcctcaaaatttttaacaatcaggagtttgctcagcttctggctcaatctgtcaaccatgggtttgaggcagtatatgagctcaccaaaatgtgtaccattcggatgagttttgtcaagggttggggagcagaatatcaccggcaggatgtaaccagcaccccatgttggattgagattatcttcatgggcctcttcagtggctggataaagtccttactcagatgggctcccctctgaaccccatatcttctgtttcataatgcagaagtattcttttcaattatattgttagtggacttgttttaattttagagaaactttgagtacagatactgtgagcttacattgaaaacagatattacagcttatttttttctacataattgtgaccaatacatttgtattttgtgatgaatctacatttgtttgtattcatgttcatgtgattaactcttagaagtgttgtaaaagatgcagagtaagtattatgccccagttcagaaatttggcattgatcttaaactggaacatgcttttactttattgccctaacaattttttattaaatttatttgaaaatgcatcacatgatgaaaaattatagtagcttataagagggcatatacagtgaagagtaagttttccctcctactctcgatcttccagaagctgtacttttaccagtttctttgtcccaccaacttaaaaaaaaaaagtacaattcattgttttgcaaaagtgtatggtaggggcttaaaagaaactataaagttttatttgaatgaacactatgcactgctgtaactggtagtgttcagtaaaagcaaaatgatagttttctagatgacataaaatttacatttaatacagataagtgttcttcagtgtaatgtgacttcatgctatatatcttttgtaagacatttccttttttaaaaaaatttttgcaaataactgatctcaagtatatgtcatttactcaaaatctgtcataagcattactttatagctagtgacagtgcatgcacagccttgttcaactatgtttgctgcttttggacaatgttgcaagaactctatttttgacatgcattaatcttttattttgcacttttatgggtgacagtttttagcataacctttgataaaatacactcaagtgacttggacttagatgcttatccttacgtccttggtaccttttttgtattaacaaacactgcaatttatagattacatttgtaggaagttatgcttttttctggtttttgttttactttcaacctaggttataagactgttattctatagctccaacttaaggtgcctttttaattccctacagttttatgggtgttatcagtgctggagaatcatgtagttaatcccattgctcttacaagtgtcagcttacttgtatcagcctccctacgcaaggacctatgcactggagccgtaggaggctcttcagttgggccccaaggataaggctactgatttgatactaaatgaatcagcagtggatgtagggatagctgattttaaaacactcctcacccatcaacgaatatagactcttctctcatttatcgatgatcctctttttccattttttaagtacttatgtggaagctagtctcccaaaacacaatctttagagagaaaagacatgaacgaactccaaaatatccatttaatcaatcatgtttttggctttggataaagaactttgaaccagtttttttctcaggagctgtcaaatggacacttaattatgacatgagaatgaagaaattattttggaaaaaaaaaatgacctaatttacctatcagtgaaagctttattttctggtgccttttgaaagtatatggagtcatatcattcttctgtttaaaatgttagtttggtttgactttccactttgtcctttctgctcttgtgaagaaaaaaaaaagcattttcgaggaaagaattatgcaatttcttttgttttctgtgtcattatttattgctttttcaatgtgcagccagtggatggttttagttctttcagatgaactgccatttgtgtttcagctcacagttctttgctgggtaaaagaaatactttctgacagtcacctgagccttaaatgtaagtattacatgacatgcattctgtttcttccagagttctgtctgccacacgaaagagaatatttgcttacttgatagaactttggcattttcatcattcttttacttaaccaggcttatggcatgatctctggaacaaatttgtaggaaaaaattactccaattgaatgactgatgtatgtaatcaacttcattgggctgcagtaaactagtggaaattagagagttgttttattggtgttttctactgtgagttaattaaaaattgtttttatttggggtcattatgtcacagtcttgagttaacaagatcttacgtgattggccttttctttgttttctcttaggagttgtgtctcatgaatgacagtactaaagctattaacaactaagagtttgacagagaactataagcctgttgtatctcctaaaagttgtcaactccccacccttggactttaaatgaaaattttattcagtccagctattcttacagtccctaaggattttcatatatctatgtataggagataaaatttgctagtaagatttttaaaaactggctagtgaaaggaaagtacctctgaaagaaaccattttagcaaattatggttatatgttttaatttaatctacagaatgttttatagtaaaattctagcaccactagaataatcacatagcatgtacaatatatttatgctggctgaaaagacagaatctgggaataataaaattgcaaccagtttggtaatgcaaacagcagaatagaatgaaatctcagtaatgaattaaagcaacaaaaagatattgattggcaaaaagcaagatataagagattcatttgcttaacatttctacataatatttatggtctggtcagtattggtctggtcagtattgcctggctgacgtgaaatgtaaactagtaggcgtgttattgatctgctaaaactaaccctctttttaagaggagatttaaggaagacgtcaatcaaaatgtcaaatatgtgtgtcagaatataaataatttttcacattgtattgttgctatataaaaaaaataatagaattggttgggtttctgaggtgaaatccagagtaagagtactagacagttcaacaagccacatctaatggcacagatagaggatgtagctattttatacctttcataacatttgagagtaagatatccttcaggatgtgaagtgattattaagtactcatacctgaaatctgttgtcaagattagaactggggttcatgttaaaaaccttccatattacctgagggtacctgtggggaacagttccttcccctgtgtggtagtattttgttggaagagaatgtttatacaaaaaatgaaattcttccaacagcagagaaactctaaaaagtttgatagtacctatcaaagtgctgtacttctgtgatagagaacatctgatgtaccaatttagatctatttctttatactttttctaatcaattgcttaatagtactttggatgattatcacctttgccacttaaaatatataaatatcctttttacttcatgaggaaggaagaattttttgataattactgagttcagccttttgtgatgacttatattttggacttacattttaactttaaagaatgtcagatcccttctttgtcttactagttaaatcctcacctaatctcttgggtatgaatataaatgtgtgtcatcgttatattgttcagctagatgagcaagtatcttagggtagtaggtagcctggtggttttagaagtgtttggtgatttttatggagagagttttcctaagtggtggtttataggtggtatcagatattattagggcagctttttggggagtaatctcaggtctcccagagcagcagcatttttctcattgatataagtaagattcttaggagcttttcttatcacacaagatgcctgaatcgaatgtgagaattgaaggcatttcttctgcataaacaaagaattctacctgctggacagaaacctggaaagttctttggaattcgctgaattacagtttagtatgtcctgattacagagtgacaatatttatcaagcctttgttatattggattatcttctctcttaaaatacaactgtattataattgaaatgacagcccaaaattggatggtttaccaaaaccaatgaaagggatttcacacatcaatttttatttctgttttgaagagcacatgctatataataattgctagtagcaactgcagtaaaacaggtgataagttattttctctgaaaagatccagtcctagagcaggattcttcgatcattcatggcagagtgaaaaaggtttgtatggttcttgtccaaataactcagttcttaaaattcttaaaatgatcgtaaaccattatcctttaaaggtttatttgaagatgctgttaaagtacagaattttgtgtacaggtagatttttccgtccctcattaatagtgccttcttaattaatacagactggtgttagctataacaaaactccagtaaggccaaagaatcccaagttctttgtggaaaaaaaaaaaaaatcttttagggtcagattttcccttctaatatcattgaagatgatgttgcattgatttattcataaagtattttaactataggaactctagaagataatggttaggcaagtgattttttttttaaatatggttggcgtaagttgtattttgaaattcacttattttaaaatcgaagaggattgtaatcatggaaatagaatgtttgtatctacctgcccacattttcttaaaaagatatttcatatacagataatgaagaccaagctagtggctgcactgtaggtctgctgcttatttgtatttgttgtgcttctgtttatgttgtagaagctgaaattctagcaacatgcttcaattctgttattttgatacttatgaaaatgtattaggttttactatattgtgcttttgaaagccataactcttaagaactttgtttttgcatattgtttgctaattctttactttaataaacctcaaaacctgcttaa

SEQ ID NO: 5383 - protein, 457 aa, Homo sapiens; identical to SEQ ID NO: 5375

SEQ ID NO: 5384 - DNA, 5939 bp, Homo sapiens
gttgcagcgaggagaagcgcagcgacggcgtcgggagagcgcgcctagccggctcgcgaatgttcagcctgttgcctatgaagagcctaaacattggtgttcaatagtctactatgaattaaacaatcgtgttggagaagcttttcatgcatcttctactagtgtgttagtagatggattcacagatccttcaaataacaaaagtagattctgcttgggtttgttgtcaaatgttaatcgtaattcgacaattgaaaacactaggcgacatattggaaaaggtgttcatctgtactatgttggtggagaggtgtatgcggaatgcctcagtgacagcagcatatttgtacagagtaggaactgcaactttcatcatggctttcatcccaccactgtctgtaagattcccagcagctgcagcctcaaaatttttaacaatcaggagtttgctcagcttctggctcaatctgtcaaccatgggtttgaggcagtatatgagctcaccaaaatgtgtaccattcggatgagttttgtcaagggttggggagcagaatatcaccggcaggatgtaaccagcaccccatgttggattgagattatcttcatgggcctcttcagtggctggataaagtccttactcagatgggctcccctctgaaccccatatcttctgtttcataatgcagaagtattcttttcaattatattgttagtggacttgttttaattttagagaaactttgagtacagatactgtgagcttacattgaaaacagatattacagcttatttttttctacataattgtgaccaatacatttgtattttgtgatgaatctacatttgtttgtattcatgttcatgtgattaactcttagaagtgttgtaaaagatgcagagtaagtattatgccccagttcagaaatttggcattgatcttaaactggaacatgcttttactttattgccctaacaattttttattaaatttatttgaaaatgcatcacatgatgaaaaattatagtagcttataagagggcatatacagtgaagagtaagttttccctcctactctcgatcttccagaagctgtacttttaccagtttctttgtcccaccaacttaaaaaaaaaaagtacaattcattgttttgcaaaagtgtatggtaggggcttaaaagaaactataaagttttatttgaatgaacactatgcactgctgtaactggtagtgttcagtaaaagcaaaatgatagttttctagatgacataaaatttacatttaatacagataagtgttcttcagtgtaatgtgacttcatgctatatatcttttgtaagacatttccttttttaaaaaaatttttgcaaataactgatctcaagtatatgtcatttactcaaaatctgtcataagcattactttatagctagtgacagtgcatgcacagccttgttcaactatgtttgctgcttttggacaatgttgcaagaactctatttttgacatgcattaatcttttattttgcacttttatgggtgacagtttttagcataacctttgataaaatacactcaagtgacttggacttagatgcttatccttacgtccttggtaccttttttgtattaacaaacactgcaatttatagattacatttgtaggaagttatgcttttttctggtttttgttttactttcaacctaggttataagactgttattctatagctccaacttaaggtgcctttttaattccctacagttttatgggtgttatcagtgctggagaatcatgtagttaatcccattgctcttacaagtgtcagcttacttgtatcagcctccctacgcaaggacctatgcactggagccgtaggaggctcttcagttgggccccaaggataaggctactgatttgatactaaatgaatcagcagtggatgtagggatagctgattttaaaacactcggctgggcacagtggctcacacctgtaatcccagcactttgggaggctgaggcaggcagatcatgatgtcaggagtttgagaccagcctggccaatatggtgaaaccctgtctctacaaaaaatacaaaaattagctgggcatggtggtgcgtgcctgaagtcccagctactcgggaagctgaggcagaagaatcacttgaacctgggaggcggaggttgtggtgagccgagatcgcaccactgcactccagcctgggcgacagagcgagactctgcctcaaaaaacaaaacaaaacaaaacactcacccatcaacgaatatagactcttctctcatttatcgatgatcctctttttccattttttaagtacttatgtggaagctagtctcccaaaacacaatctttagagagaaaagacatgaacgaactccaaaatatccatttaatcaatcatgtttttggctttggataaagaactttgaaccagtttttttctcaggagctgtcaaatggacacttaattatgacatgagaatgaagaaattattttggaaaaaaaaaatgacctaatttacctatcagtgaaagctttattttctggtgccttttgaaagtatatggagtcatatcattcttctgtttaaaatgttagtttggtttgactttccactttgtcctttctgctcttgtgaagaaaaaaaaaagcattttcgaggaaagaattatgcaatttcttttgttttctgtgtcattatttattgctttttcaatgtgcagccagtggatggttttagttctttcagatgaactgccatttgtgtttcagctcacagttctttgctgggtaaaagaaatactttctgacagtcacctgagccttaaatgtaagtattacatgacatgcattctgtttcttccagagttctgtctgccacacgaaagagaatatttgcttacttgatagaactttggcattttcatcattcttttacttaaccaggcttatggcatgatctctggaacaaatttgtaggaaaaaattactccaattgaatgactgatgtatgtaatcaacttcattgggctgcagtaaactagtggaaattagagagttgttttattggtgttttctactgtgagttaattaaaaattgtttttatttggggtcattatgtcacagtcttgagttaacaagatcttacgtgattggccttttctttgttttctcttaggagttgtgtctcatgaatgacagtactaaagctattaacaactaagagtttgacagagaactataagcctgttgtatctcctaaaagttgtcaactccccacccttggactttaaatgaaaattttattcagtccagctattcttacagtccctaaggattttcatatatctatgtataggagataaaatttgctagtaagatttttaaaaactggctagtgaaaggaaagtacctctgaaagaaaccattttagcaaattatggttatatgttttaatttaatctacagaatgttttatagtaaaattctagcaccactagaataatcacatagcatgtacaatatatttatgctggctgaaaagacagaatctgggaataataaaattgcaaccagtttggtaatgcaaacagcagaatagaatgaaatctcagtaatgaattaaagcaacaaaaagatattgattggcaaaaagcaagatataagagattcatttgcttaacatttctacataatatttatggtctggtcagtattggtctggtcagtattgcctggctgacgtgaaatgtaaactagtaggcgtgttattgatctgctaaaactaaccctctttttaagaggagatttaaggaagacgtcaatcaaaatgtcaaatatgtgtgtcagaatataaataatttttcacattgtattgttgctatataaaaaaaataatagaattggttgggtttctgaggtgaaatccagagtaagagtactagacagttcaacaagccacatctaatggcacagatagaggatgtagctattttatacctttcataacatttgagagtaagatatccttcaggatgtgaagtgattattaagtactcatacctgaaatctgttgtcaagattagaactggggttcatgttaaaaaccttccatattacctgagggtacctgtggggaacagttccttcccctgtgtggtagtattttgttggaagagaatgtttatacaaaaaatgaaattcttccaacagcagagaaactctaaaaagtttgatagtacctatcaaagtgctgtacttctgtgatagagaacatctgatgtaccaatttagatctatttctttatactttttctaatcaattgcttaatagtactttggatgattatcacctttgccacttaaaatatataaatatcctttttacttcatgaggaaggaagaattttttgataattactgagttcagccttttgtgatgacttatattttggacttacattttaactttaaagaatgtcagatcccttctttgtcttactagttaaatcctcacctaatctcttgggtatgaatataaatgtgtgtcatcgttatattgttcagctagatgagcaagtatcttagggtagtaggtagcctggtggttttagaagtgtttggtgatttttatggagagagttttcctaagtggtggtttataggtggtatcagatattattagggcagctttttggggagtaatctcaggtctcccagagcagcagcatttttctcattgatataagtaagattcttaggagcttttcttatcacacaagatgcctgaatcgaatgtgagaattgaaggcatttcttctgcataaacaaagaattctacctgctggacagaaacctggaaagttctttggaattcgctgaattacagtttagtatgtcctgattacagagtgacaatatttatcaagcctttgttatattggattatcttctctcttaaaatacaactgtattataattgaaatgacagcccaaaattggatggtttaccaaaaccaatgaaagggatttcacacatcaatttttatttctgttttgaagagcacatgctatataataattgctagtagcaactgcagtaaaacaggtgataagttattttctctgaaaagatccagtcctagagcaggattcttcgatcattcatggcagagtgaaaaaggtttgtatggttcttgtccaaataactcagttcttaaaattcttaaaatgatcgtaaaccattatcctttaaaggtttatttgaagatgctgttaaagtacagaattttgtgtacaggtagatttttccgtccctcattaatagtgccttcttaattaatacagactggtgttagctataacaaaactccagtaaggccaaagaatcccaagttctttgtggaaaaaaaaaaaaaatcttttagggtcagattttcccttctaatatcattgaagatgatgttgcattgatttattcataaagtattttaactataggaactctagaagataatggttaggcaagtgattttttttttaaatatggttggcgtaagttgtattttgaaattcacttattttaaaatcgaagaggattgtaatcatggaaatagaatgtttgtatctacctgcccacattttcttaaaaagatatttcatatacagataatgaagaccaagctagtggctgcactgtaggtctgctgcttatttgtatttgttgtgcttctgtttatgttgtagaagctgaaattctagcaacatgcttcaattctgttattttgatacttatgaaaatgtattaggttttactatattgtgcttttgaaagccataactcttaagaactttgtttttgcatattgtttgctaattctttactttaataaacctcaaaacctgcttaa

SEQ ID NO: 5385 - protein, 117 aa, Homo sapiens
MDSQILQITKVDSAWVCCQMLIVIRQLKTLGDILEKVFICTMLVERCMRNASVTAAYLYRVGTATFIMAFIPPLSVRFPAAAASKFLTIRSLLSFWLNLSTMGLRQYMSSPKCVPFG

SEQ ID NO: 5386 - DNA, 2686 bp, Homo sapiens
ttttctcttaggagttgtgtctcatgaatgacagtactaaagctattaacaactaagagtttgacagagaactataagcctgttgtatctcctaaaagttgtcaactccccacccttggactttaaatgaaaattttattcagtccagctattcttacagtccctaaggattttcatatatctatgtataggagataaaatttgctagtaagatttttaaaaactggctagtgaaaggaaagtacctctgaaagaaaccattttagcaaattatggttatatgttttaatttaatctacagaatgttttatagtaaaattctagcaccactagaataatcacatagcatgtacaatatatttatgctggctgaaaagacagaatctgggaataataaaattgcaaccagtttggtaatgcaaacagcagaatagaatgaaatctcagtaatgaattaaagcaacaaaaagatattgattggcaaaaagcaagatataagagattcatttgcttaacatttctacataatatttatggtctggtcagtattggtctggtcagtattgcctggctgacgtgaaatgtaaactagtaggcgtgttattgatctgctaaaactaaccctctttttaagaggagatttaaggaagacgtcaatcaaaatgtcaaatatgtgtgtcagaatataaataatttttcacattgtattgttgctatataaaaaaaataatagaattggttgggtttctgaggtgaaatccagagtaagagtactagacagttcaacaagccacatctaatggcacagatagaggatgtagctattttatacctttcataacatttgagagtaagatatccttcaggatgtgaagtgattattaagtactcatacctgaaatctgttgtcaagattagaactggggttcatgttaaaaaccttccatattacctgagggtacctgtggggaacagttccttcccctgtgtggtagtattttgttggaagagaatgtttatacaaaaaatgaaattcttccaacagcagagaaactctaaaaagtttgatagtacctatcaaagtgctgtacttctgtgatagagaacatctgatgtaccaatttagatctatttctttatactttttctaatcaattgcttaatagtactttggatgattatcacctttgccacttaaaatatataaatatcctttttacttcatgaggaaggaagaattttttgataattactgagttcagccttttgtgatgacttatattttggacttacattttaactttaaagaatgtcagatcccttctttgtcttactagttaaatcctcacctaatctcttgggtatgaatataaatgtgtgtcatcgttatattgttcagctagatgagcaagtatcttagggtagtagtggtggtttataggtggtatcagatattattagggcagctttttggggagtaatctcaggtctcccagagcagcagcatttttctcattgatataagtaagattcttaggagcttttcttatcacacaagatgcctgaatcgaatgtgagaattgaaggcatttcttctgcataaacaaagaattctacctgctggacagaaacctggaaagttctttggaattcgctgaattacagtttagtatgtcctgattacagagtgacaatatttatcaagcctttgttatattggattatcttctctcttaaaatacaactgtattataattgaaatgacagcccaaaattggatggtttaccaaaaccaatgaaagggatttcacacatcaatttttatttctgttttgaagagcacatgctatataataattgctagtagcaactgcagtaaaacaggtgataagttattttctctgaaaagatccagtcctagagcaggattcttcgatcattcatggcagagtgaaaaaggtttgtatggttcttgtccaaataactcagttcttaaaattcttaaaatgatcgtaaaccattatcctttaaaggtttatttgaagatgctgttaaagtacagaattttgtgtacaggtagatttttccgtccctcattaatagtgccttcttaattaatacagactggtgttagctataacaaaactccagtaaggccaaagaatcccaagttctttgtggaaaaaaaaaaaaaatcttttagggtcagattttcccttctaatatcattgaagatgatgttgcattgatttattcataaagtattttaactataggaactctagaagataatggttaggcaagtgattttttttttaaatatggttggcgtaagttgtattttgaaattcacttattttaaaatcgaagaggattgtaatcatggaaatagaatgtttgtatctacctgcccacattttcttaaaaagatatttcatatacagataatgaagaccaagctagtggctgcactgtaggtctgctgcttatttgtatttgttgtgcttctgtttatgttgtagaagctgaaattctagcaacatgcttcaattctgttattttgatacttatgaaaatgtattaggttttactatattgtgcttttgaaagccataactcttaagaactttgtttttgcatattgtttgctaattctttactttaataaacctcaaaacctgcttaa

SEQ ID NO: 5387 - protein, 61 aa, Homo sapiens [sequence omitted]

SEQ ID NO: 5388 - DNA, 1696 bp, Homo sapiens; identical to SEQ ID NO: 683

SEQ ID NO: 5389 - protein, 103 aa, Homo sapiens
MYGDIFNATGGPEAAVGSALAPGATVKAEGALPLELATARGMRDGAATKPDLPTYLLLFFLLLLSVALVVLFIGCQLRHSAFAALPHDRSLRDARAPWKTRPV

SEQ ID NO: 5390 - DNA, 562 bp, Homo sapiens
agccacggccgccgggcgccccgtcccgacctagccaagagcagccagcttgagcctggtagggagggcacgacaccggggatcgctggcccctgggaacacggtgccctgacccaaagacccttcctgaactagagtggcaacccgagaggaaagggagaccgaggcgtcgggagcctgtgtagggtctcgatcccagtacctgtaggtaccgtgattctgatcccctggccaaatctttcttcccgtctggactcgcaggccctgtggctgtttcccacagctgctacggcctctcttgctccttgacaccgaggaggaccccactaggatccgagcgtcgtgaactcacctgaactttggaaggttggcactggggggccgcatccccctgggaaatgactgaacgcggggtttcagtgggtcccgcctgggtctaaggacccagtttcttctgtgagcacgggcagtgggaggccggtggaaaggcgcaggggcccacctacgcgtctcacatcttcaggggcgcatttctacaataaaaactcacccaattagacct

SEQ ID NO: 5391 - protein, 57 aa, Homo sapiens
SGNPRGKGDRGVGSLCRVSIPVPVGTVILIPWPNLSSRLDSQALWLFPTAATASLAP

SEQ ID NO: 5392 - DNA, 999 bp, Homo sapiens
aaagcacagggtcacaggaagactgacgggcaaagacacagttacagacctatgaacagagccacacgccaaacagggacaaaccgttgagcagttgggaagatgtggcaaaacaggacttatattccttatggcaacgatgggctgagctgagtgtctgcagcctgctttaggcagggcacggctgtgcagtctgtcatcgtccctcgtcactcccatcaatgctggcaccaacctcacttctatttatcgcctcatctgatcggctgtttcttatagcagaaacgtctgcaaggcatgtgaatttgtaaccatcaccctcctcacagggttgctgtgaggatccggtggactgatgcatgcaaagccccgagcacagtgcctggtacacggcaaaagctgaatacttctggccagccctaggaatatttccttgggagcagagggctcttctggaagcttctggaagatgaatggcatcttcgcacacctgctccgaacaggcattgtttgggactcagcgccctctggtggctgctctccccactcacacttagcctcttccttggttggggggacactttgaggcctcattcctgcccctccccttcctttcacatggaggaaagttctagaatggggtgggagaaaactttccacttgttctgcatttcctttacctccttcctgaccttaggtctgggcacaggaggaggggcttggaggtggaggctggagcttctgggggtcctggctgcatgactctaaggagggtggtgccttcgtccccacccaacccccaccgcatcggcccattctcctcccgaagcatccctgggccacaggttcccaaggccacctccagactgggcccgcgagtggggcggccctggtagcgtatccacagaagttattatgaggtaattttatttctttccattttaggtaaaaatagtaaatacaagataatcttaataaaggtaaaaatacatcatttgg

SEQ ID NO: 5393 - protein, 47 aa, Homo sapiens [sequence omitted]

SEQ ID NO: 5394 - DNA, 1257 bp, Homo sapiens
attgtgcatggttttagtgagagcaaactccccttctctgtgccatctgtagaaaaactacaccaagtcctgcttagaagtctgctttccgaatgttggggctgtgtctctgctcctcaggttgggctccgttgttaaatcgtggcctttgagggtgtgttgttgtttcccttgttccacaggaggatgcagatgtggaatggaagttcgcccgagcaaaactctggctgtcttactttgatgaaggaagaactctacctgctccttttaatctagtgccaagtcctaaatcattttattatctcataatgagaatcaagatgtgcctcataaaactctgcaaatctaaggccaaaagctgtgaaaatgaccttgaaatgggcatgctgaattccaaattcaagaagactcgctaccaggctggcatgaggaattctgaaaatctgacagcaaataacactttgagcaagcccaccagataccagaaaatcatgaaacggctcataaaaagatacgtcctgaaagcccaggtggacagagaaaatgacgaagtcaatgaaggcgagctgaaggaaatcaagcaagatatctccagcctgcgctatgagcttcttgaggaaaaatctcaagctactggtgagctggcagacctgattcaacaactcagcgagaagtttggaaagaacttaaacaaagaccacctgagggtgaacaagggcaaagacatttagcagcccacatcggcgtctgtgacttctaccagcattccaaggccaggttggatgccctcgcccccatccttggtggggaggggtccccagcccactcctctaggacacgaaggggatctcctggctcagtctcttgcagcatgactgacatctccagcccgctggcctgcctagacccagaactgctgtgaatctaggtggttgggtaagaaaagctaccatgggaggaggggaggaacagccccctgacgagtgtgagacctttggtccagccacagtgaaacccatccctgtggccagagcaggaaaaggccatcttgggtgcacacctgtgccctcccactgcaggtgggactgcagctctggctgtgtcctgggaagacaaacacctcaacccacaaactccttctcactccctccctgccacccccaacacatccaaacagaaccaggaggtgacctgtgatctattcttaagtgccagatgagaacacagcctaatagcaaaatagttctatttgtttat

SEQ ID NO: 5395 - protein, 140 aa, Homo sapiens
MRIKMCLIKLCKSKAKSCENDLEMGMLNSKFKKTRYQAGMRNSENLTANNTLSKPTRYQKIMKRLIKRYVLKAQVDRENDEVNEGELKEIKQDISSLRYELLEEKSQATGELADLIQQLSEKFGKNLNKDHLRVNKGKDI

SEQ ID NO: 5396 - DNA, 2950 bp, Homo sapiens
aggttgaggaacagcaccttcaaaaacatgcagcgccggcacacaacgctgagggagaagggccgtcgccaggccatccggggtcccgcctacatgttcaacgagaagggcaccagtctgacgcccgaggaggagcgcttcctggactcggctgagtatggcaacatcccggtggtccggaaaatgctggaggagtccaagacccttaacttcaactgtgtggactacatggggcagaacgctctgcagctggccgtgggcaacgagcacctagaggtcacggagctgctgctgaagaaggagaacctggcacgggtgggggacgcgctgctgctggccatcagcaagggctatgtgcgcatcgtggaggccatcctcaaccacccggccttcgcgcagggccagcgcctgacgctcagcccgctggaacaggagctgcgcgacgacgacttctatgcctacgacgaggacggcacgcgcttctcccacgacatcacgcccatcatcctggcggcgcactgccaggagtatgagatcgtgcacatcctgctgctcaagggcgcccgcatcgagcggccccacgactacttctgcaagtgcaatgagtgcaccgagaaacagcggaaagactccttcagccactcgcgctcgcgcatgaacgcctacaaaggactggcgagtgctgcctacttgtccctgtccagcgaagaccctgtcctcaccgccctggagctcagcaacgagttagccagactagccaacattgagactgaatttaagaacgattacaggaagttatctatgcaatgcaaggattttgtagtgggcgtgctggacctgtgccgagacacagaagaggtggaagcaattttaaacggtgatgtgaacttccaagtctggtccgaccaccaccgtccaagtctgagccggatcaaactcgccattaaatatgaagtcaagaagctaggacgaaccctgaggagccctttcatgaagtttgtagctcatgcagtttcttttacaatcttcttgggattattagttgtgaatgcatctgaccgatttgaaggtgttaaaaccctgccaaacgaaaccttcacagactacccaaaacaaatcttcagagtgaaaaccacacagttctcctggacagaaatgctcattatgaagtgggtcttaggaatgatttggtccgaatgcaaggaaatctgggaggaggggccacgggagtacgtgctgcacttgtggaacctgctagatttcgggatgctgtccatcttcgtggcctccttcacagcacgcttcatggccttcctgaaggccacggaggcacagctgtacgtggaccagcacgtgcaggacgacacgctgcacaatgtctcgcttccgccggaagtggcatacttcacctacgccagggacaagtggtggccttcagaccctcagatcatatcggaagggctctacgcgatagccgtcgtgctgagcttctctcgcattgcatacattctgccagccaacgagagttttgggcccctgcagatctcgctagggagaactgtgaaagatatcttcaagttcatggtcattttcatcatggtatttgtggccttcatgattgggatgttcaacctgtactcttactaccgaggtgccaaatacaacccagcgtttacaacggttgaagaaagttttaaaactttgttttggtccatattcggcttatctgaagtaatctcagtggtgctgaaatacgaccacaaattcatcgagaacattggctacgttctctacggcgtttataacgtcaccatggtggtagtgttgctcaacatgctaatagccatgataaacaactcctatcaggaaattgaggaggatgcagatgtggaatggaagttcgcccgagcaaaactctggctgtcttactttgatgaaggaagaactctacctgctccttttaatctagtgccaagtcctaaatcattttattatctcataatgagaatcaagatgtgcctcataaaactctgcaaatctaaggccaaaagctgtgaaaatgaccttgaaatgggcatgctgaattccaaattcaagaagactcgctaccaggctggcatgaggaattctgaaaatctgacagcaaataacactttgagcaagcccaccagataccagaaaatcatgaaacggctcataaaaagatacgtcctgaaagcccaggtggacagagaaaatgacgaagtcaatgaaggcgagctgaaggaaatcaagcaagatatctccagcctgcgctatgagcttcttgaggaaaaatctcaagctactggtgagctggcagacctgattcaacaactcagcgagaagtttggaaagaacttaaacaaagaccacctgagggtgaacaagggcaaagacatttagcagcccacatcggcgtctgtgacttctaccagcattccaaggccaggttggatgccctcgcccccatccttggtggggaggggtccccagcccactcctctaggacacgaaggggatctcctggctcagtctcttgcagcatgactgacatctccagcccgctggcctgcctagacccagaactgctgtgaatctaggtggttgggtaagaaaagctaccatgggaggaggggaggaacagccccctgacgagtgtgagacctttggtccagccacagtgaaacccatccctgtggccagagcaggaaaaggccatcttgggtgcacacctgtgccctcccactgcaggtgggactgcagctctggctgtgtcctgggaagacaaacacctcaacccacaaactccttctcactccctccctgccacccccaacacatccaaacagaaccaggaggtgacctgtgatctattcttaagtgccagatgagaacacagcctaatagcaaaatagttctatttgtttat

SEQ ID NO: 5397 - protein, 798 aa, Homo sapiens
MQRRHTTLREKGRRQAIRGPAYMFNEKGTSLTPEEERFLDSAEYGNIPVVRKMLEESKTLNFNCVDYMGQNALQLAVGNEHLEVTELLLKKENLARVGDALLLAISKGYVRIVEAILNHPAFAQGQRLTLSPLEQELRDDDFYAYDEDGTRFSHDITPIILAAHCQEYEIVHILLLKGARIERPHDYFCKCNECTEKQRKDSFSHSRSRMNAYKGLASAAYLSLSSEDPVLTALELSNELARLANIETEFKNDYRKLSMQCKDFVVGVLDLCRDTEEVEAILNGDVNFQVWSDHHRPSLSRIKLAIKYEVKKLGRTLRSPFMKFVAHAVSFTIFLGLLVVNASDRFEGVKTLPNETFTDYPKQIFRVKTTQFSWTEMLIMKWVLGMIWSECKEIWEEGPREYVLHLWNLLDFGMLSIFVASFTARFMAFLKATEAQLYVDQHVQDDTLHNVSLPPEVAYFTYARDKWWPSDPQIISEGLYAIAVVLSFSRIAYILPANESFGPLQISLGRTVKDIFKFMVIFIMVFVAFMIGMFNLYSYYRGAKYNPAFTTVEESFKTLFWSIFGLSEVISVVLKYDHKFIENIGYVLYGVYNVTMVVVLLNMLIAMINNSYQEIEEDADVEWKFARAKLWLSYFDEGRTLPAPFNLVPSPKSFYYLIMRIKMCLIKLCKSKAKSCENDLEMGMLNSKFKKTRYQAGMRNSENLTANNTLSKPTRYQKIMKRLIKRYVLKAQVDRENDEVNEGELKEIKQDISSLRYELLEEKSQATGELADLIQQLSEKFGKNLNKDHLRVNKGKDI

SEQ ID NO: 5398 - DNA, 2767 bp, Homo sapiens
aggttgaggaacagcaccttcaaaaacatgcagcgccggcacacaacgctgagggagaagggccgtcgccaggccatccggggtcccgcctacatgttcaacgagaagggcaccagtctgacgcccgaggaggagcgcttcctggactcggctgagtatggcaacatcccggtggtccggaaaatgctggaggagtccaagacccttaacttcaactgtgtggactacatggggcagaacgctctgcagctggccgtgggcaacgagcacctagaggtcacggagctgctgctgaagaaggagaacctggcacgggtgggggacgcgctgctgctggccatcagcaagggctatgtgcgcatcgtggaggccatcctcaaccacccggccttcgcgcagggccagcgcctgacgctcagcccgctggaacaggagctgcgcgacgacgacttctatgcctacgacgaggacggcacgcgcttctcccacgacatcacgcccatcatcctggcggcgcactgccaggagtatgagatcgtgcacatcctgctgctcaagggcgcccgcatcgagcggccccacgactacttctgcaagtgcaatgagtgcaccgagaaacagcggaaagactccttcagccactcgcgctcgcgcatgaacgcctacaaaggactggcgagtgctgcctacttgtccctgtccagcgaagaccctgtcctcaccgccctggagctcagcaacgagttagccagactagccaacattgagactgaatttaagctaggacgaaccctgaggagccctttcatgaagtttgtagctcatgcagtttcttttacaatcttcttgggattattagttgtgaatgcatctgaccgatttgaaggtgttaaaaccctgccaaacgaaaccttcacagactacccaaaacaaatcttcagagtgaaaaccacacagttctcctggacagaaatgctcattatgaagtgggtcttaggaatgatttggtccgaatgcaaggaaatctgggaggaggggccacgggagtacgtgctgcacttgtggaacctgctagatttcgggatgctgtccatcttcgtggcctccttcacagcacgcttcatggccttcctgaaggccacggaggcacagctgtacgtggaccagcacgtgcaggacgacacgctgcacaatgtctcgcttccgccggaagtggcatacttcacctacgccagggacaagtggtggccttcagaccctcagatcatatcggaagggctctacgcgatagccgtcgtgctgagcttctctcgcattgcatacattctgccagccaacgagagttttgggcccctgcagatctcgctagggagaactgtgaaagatatcttcaagttcatggtcattttcatcatggtatttgtggccttcatgattgggatgttcaacctgtactcttactaccgaggtgccaaatacaacccagcgtttacaacggttgaagaaagttttaaaactttgttttggtccatattcggcttatctgaagtaatctcagtggtgctgaaatacgaccacaaattcatcgagaacattggctacgttctctacggcgtttataacgtcaccatggtggtagtgttgctcaacatgctaatagccatgataaacaactcctatcaggaaattgaggaggatgcagatgtggaatggaagttcgcccgagcaaaactctggctgtcttactttgatgaaggaagaactctacctgctccttttaatctagtgccaagtcctaaatcattttattatctcataatgagaatcaagatgtgcctcataaaactctgcaaatctaaggccaaaagctgtgaaaatgaccttgaaatgggcatgctgaattccaaattcaagaagactcgctaccaggctggcatgaggaattctgaaaatctgacagcaaataacactttgagcaagcccaccagataccagaaaatcatgaaacggctcataaaaagatacgtcctgaaagcccaggtggacagagaaaatgacgaagtcaatgaaggcgagctgaaggaaatcaagcaagatatctccagcctgcgctatgagcttcttgaggaaaaatctcaagctactggtgagctggcagacctgattcaacaactcagcgagaagtttggaaagaacttaaacaaagaccacctgagggtgaacaagggcaaagacatttagcagcccacatcggcgtctgtgacttctaccagcattccaaggccaggttggatgccctcgcccccatccttggtggggaggggtccccagcccactcctctaggacacgaaggggatctcctggctcagtctcttgcagcatgactgacatctccagcccgctggcctgcctagacccagaactgctgtgaatctaggtggttgggtaagaaaagctaccatgggaggaggggaggaacagccccctgacgagtgtgagacctttggtccagccacagtgaaacccatccctgtggccagagcaggaaaaggccatcttgggtgcacacctgtgccctcccactgcaggtgggactgcagctctggctgtgtcctgggaagacaaacacctcaacccacaaactccttctcactccctccctgccacccccaacacatccaaacagaaccaggaggtgacctgtgatctattcttaagtgccagatgagaacacagcctaatagcaaaatagttctatttgtttat

SEQ ID NO: 5399 - protein, 737 aa, Homo sapiens
MQRRHTTLREKGRRQAIRGPAYMFNEKGTSLTPEEERFLDSAEYGNIPVVRKMLEESKTLNFNCVDYMGQNALQLAVGNEHLEVTELLLKKENLARVGDALLLAISKGYVRIVEAILNHPAFAQGQRLTLSPLEQELRDDDFYAYDEDGTRFSHDITPIILAAHCQEYEIVHILLLKGARIERPHDYFCKCNECTEKQRKDSFSHSRSRMNAYKGLASAAYLSLSSEDPVLTALELSNELARLANIETEFKLGRTLRSPFMKFVAHAVSFTIFLGLLVVNASDRFEGVKTLPNETFTDYPKQIFRVKTTQFSWTEMLIMKWVLGMIWSECKEIWEEGPREYVLHLWNLLDFGMLSIFVASFTARFMAFLKATEAQLYVDQHVQDDTLHNVSLPPEVAYFTYARDKWWPSDPQIISEGLYAIAVVLSFSRIAYILPANESFGPLQISLGRTVKDIFKFMVIFIMVFVAFMIGMFNLYSYYRGAKYNPAFTTVEESFKTLFWSIFGLSEVISVVLKYDHKFIENIGYVLYGVYNVTMVVVLLNMLIAMINNSYQEIEEDADVEWKFARAKLWLSYFDEGRTLPAPFNLVPSPKSFYYLIMRIKMCLIKLCKSKAKSCENDLEMGMLNSKFKKTRYQAGMRNSENLTANNTLSKPTRYQKIMKRLIKRYVLKAQVDRENDEVNEGELKEIKQDISSLRYELLEEKSQATGELADLIQQLSEKFGKNLNKDHLRVNKGKDI

SEQ ID NO: 5400 - DNA, 2550 bp, Homo sapiens
aggttgaggaacagcaccttcaaaaacatgcagcgccggcacacaacgctgagggagaagggccgtcgccaggccatccggggtcccgcctacatgttcaacgagaagggcaccagtctgacgcccgaggaggagcgcttcctggactcggctgagtatggcaacatcccggtggtccggaaaatgctggaggagtccaagacccttaacttcaactgtgtggactacatggggcagaacgctctgcagctggccgtgggcaacgagcacctagaggtcacggagctgctgctgaagaaggagaacctggcacgggtgggggacgcgctgctgctggccatcagcaagggctatgtgcgcatcgtggaggccatcctcaaccacccggccttcgcgcagggccagcgcctgacgctcagcccgctggaacaggagctgcgcgacgacgacttctatgcctacgacgaggacggcacgcgcttctcccacgacatcacgcccatcatcctggcggcgcactgccaggagtatgagatcgtgcacatcctgctgctcaagggcgcccgcatcgagcggccccacgactacttctgcaagtgcaatgagtgcaccgagaaacagcggaaagactccttcagccactcgcgctcgcgcatgaacgcctacaaaggactggcgagtgctgcctacttgtccctgtccagcgaagaccctgtcctcaccgccctggagctcagcaacgagttagccagactagccaacattgagactgaatttaaggaatgatttggtccgaatgcaaggaaatctgggaggaggggccacgggagtacgtgctgcacttgtggaacctgctagatttcgggatgctgtccatcttcgtggcctccttcacagcacgcttcatggccttcctgaaggccacggaggcacagctgtacgtggaccagcacgtgcaggacgacacgctgcacaatgtctcgcttccgccggaagtggcatacttcacctacgccagggacaagtggtggccttcagaccctcagatcatatcggaagggctctacgcgatagccgtcgtgctgagcttctctcgcattgcatacattctgccagccaacgagagttttgggcccctgcagatctcgctagggagaactgtgaaagatatcttcaagttcatggtcattttcatcatggtatttgtggccttcatgattgggatgttcaacctgtactcttactaccgaggtgccaaatacaacccagcgtttacaacggttgaagaaagttttaaaactttgttttggtccatattcggcttatctgaagtaatctcagtggtgctgaaatacgaccacaaattcatcgagaacattggctacgttctctacggcgtttataacgtcaccatggtggtagtgttgctcaacatgctaatagccatgataaacaactcctatcaggaaattgaggaggatgcagatgtggaatggaagttcgcccgagcaaaactctggctgtcttactttgatgaaggaagaactctacctgctccttttaatctagtgccaagtcctaaatcattttattatctcataatgagaatcaagatgtgcctcataaaactctgcaaatctaaggccaaaagctgtgaaaatgaccttgaaatgggcatgctgaattccaaattcaagaagactcgctaccaggctggcatgaggaattctgaaaatctgacagcaaataacactttgagcaagcccaccagataccagaaaatcatgaaacggctcataaaaagatacgtcctgaaagcccaggtggacagagaaaatgacgaagtcaatgaaggcgagctgaaggaaatcaagcaagatatctccagcctgcgctatgagcttcttgaggaaaaatctcaagctactggtgagctggcagacctgattcaacaactcagcgagaagtttggaaagaacttaaacaaagaccacctgagggtgaacaagggcaaagacatttagcagcccacatcggcgtctgtgacttctaccagcattccaaggccaggttggatgccctcgcccccatccttggtggggaggggtccccagcccactcctctaggacacgaaggggatctcctggctcagtctcttgcagcatgactgacatctccagcccgctggcctgcctagacccagaactgctgtgaatctaggtggttgggtaagaaaagctaccatgggaggaggggaggaacagccccctgacgagtgtgagacctttggtccagccacagtgaaacccatccctgtggccagagcaggaaaaggccatcttgggtgcacacctgtgccctcccactgcaggtgggactgcagctctggctgtgtcctgggaagacaaacacctcaacccacaaactccttctcactccctccctgccacccccaacacatccaaacagaaccaggaggtgacctgtgatctattcttaagtgccagatgagaacacagcctaatagcaaaatagttctatttgtttat

SEQ ID NO: 5401 - protein, 413 aa, Homo sapiens
MIWSECKEIWEEGPREYVLHLWNLLDFGMLSIFVASFTARFMAFLKATEAQLYVDQHVQDDTLHNVSLPPEVAYFTYARDKWWPSDPQIISEGLYAIAVVLSFSRIAYILPANESFGPLQISLGRTVKDIFKFMVIFIMVFVAFMIGMFNLYSYYRGAKYNPAFTTVEESFKTLFWSIFGLSEVISVVLKYDHKFIENIGYVLYGVYNVTMVVVLLNMLIAMINNSYQEIEEDADVEWKFARAKLWLSYFDEGRTLPAPFNLVPSPKSFYYLIMRIKMCLIKLCKSKAKSCENDLEMGMLNSKFKKTRYQAGMRNSENLTANNTLSKPTRYQKIMKRLIKRYVLKAQVDRENDEVNEGELKEIKQDISSLRYELLEEKSQATGELADLIQQLSEKFGKNLNKDHLRVNKGKDI

SEQ ID NO: 5402 - DNA, 3115 bp, Homo sapiens
aggttgaggaacagcaccttcaaaaacatgcagcgccggcacacaacgctgagggagaagggccgtcgccaggccatccggggtcccgcctacatgttcaacgagaagggcaccagtctgacgcccgaggaggagcgcttcctggactcggctgagtatggcaacatcccggtggtccggaaaatgctggaggagtccaagacccttaacttcaactgtgtggactacatggggcagaacgctctgcagctggccgtgggcaacgagcacctagaggtcacggagctgctgctgaagaaggagaacctggcacgggtgggggacgcgctgctgctggccatcagcaagggctatgtgcgcatcgtggaggccatcctcaaccacccggccttcgcgcagggccagcgcctgacgctcagcccgctggaacaggagctgcgcgacgacgacttctatgcctacgacgaggacggcacgcgcttctcccacgacatcacgcccatcatcctggcggcgcactgccaggagtatgagatcgtgcacatcctgctgctcaagggcgcccgcatcgagcggccccacgactacttctgcaagtgcaatgagtgcaccgagaaacagcggaaagactccttcagccactcgcgctcgcgcatgaacgcctacaaaggactggcgagtgctgcctacttgtccctgtccagcgaagaccctgtcctcaccgccctggagctcagcaacgagttagccagactagccaacattgagactgaatttaagaacgattacaggaagttatctatgcaatgcaaggattttgtagtgggcgtgctggacctgtgccgagacacagaagaggtggaagcaattttaaacggtgatgtgaacttccaagtctggtccgaccaccaccgtccaagtctgagccggatcaaactcgccattaaatatgaagtcaagaagttcgttgctcatcctaactgtcagcagcaattgcttaccatgtggtatgaaaatctctcaggcttacgtcaacagtctatcgctgtgaaattcctggctgtctttggagtctccataggcctcccttttctcgccatagcctattggattgctccgtgcagcaagctaggacgaaccctgaggagccctttcatgaagtttgtagctcatgcagtttcttttacaatcttcttgggattattagttgtgaatgcatctgaccgatttgaaggtgttaaaaccctgccaaacgaaaccttcacagactacccaaaacaaatcttcagagtgaaaaccacacagttctcctggacagaaatgctcattatgaagtgggtcttaggaatgatttggtccgaatgcaaggaaatctgggaggaggggccacgggagtacgtgctgcacttgtggaacctgctagatttcgggatgctgtccatcttcgtggcctccttcacagcacgcttcatggccttcctgaaggccacggaggcacagctgtacgtggaccagcacgtgcaggacgacacgctgcacaatgtctcgcttccgccggaagtggcatacttcacctacgccagggacaagtggtggccttcagaccctcagatcatatcggaagggctctacgcgatagccgtcgtgctgagcttctctcgcattgcatacattctgccagccaacgagagttttgggcccctgcagatctcgctagggagaactgtgaaagatatcttcaagttcatggtcattttcatcatggtatttgtggccttcatgattgggatgttcaacctgtactcttactaccgaggtgccaaatacaacccagcgtttacaacggttgaagaaagttttaaaactttgttttggtccatattcggcttatctgaagtaatctcagtggtgctgaaatacgaccacaaattcatcgagaacattggctacgttctctacggcgtttataacgtcaccatggtggtagtgttgctcaacatgctaatagccatgataaacaactcctatcaggaaattgaggaggatgcagatgtggaatggaagttcgcccgagcaaaactctggctgtcttactttgatgaaggaagaactctacctgctccttttaatctagtgccaagtcctaaatcattttattatctcataatgagaatcaagatgtgcctcataaaactctgcaaatctaaggccaaaagctgtgaaaatgaccttgaaatgggcatgctgaattccaaattcaagaagactcgctaccaggctggcatgaggaattctgaaaatctgacagcaaataacactttgagcaagcccaccagataccagaaaatcatgaaacggctcataaaaagatacgtcctgaaagcccaggtggacagagaaaatgacgaagtcaatgaaggcgagctgaaggaaatcaagcaagatatctccagcctgcgctatgagcttcttgaggaaaaatctcaagctactggtgagctggcagacctgattcaacaactcagcgagaagtttggaaagaacttaaacaaagaccacctgagggtgaacaagggcaaagacatttagcagcccacatcggcgtctgtgacttctaccagcattccaaggccaggttggatgccctcgcccccatccttggtggggaggggtccccagcccactcctctaggacacgaaggggatctcctggctcagtctcttgcagcatgactgacatctccagcccgctggcctgcctagacccagaactgctgtgaatctaggtggttgggtaagaaaagctaccatgggaggaggggaggaacagccccctgacgagtgtgagacctttggtccagccacagtgaaacccatccctgtggccagagcaggaaaaggccatcttgggtgcacacctgtgccctcccactgcaggtgggactgcagctctggctgtgtcctgggaagacaaacacctcaacccacaaactccttctcactccctccctgccacccccaacacatccaaacagaaccaggaggtgacctgtgatctattcttaagtgccagatgagaacacagcctaatagcaaaatagttctatttgtttat

SEQ ID NO: 5403 - protein, 853 aa, Homo sapiens
MQRRHTTLREKGRRQAIRGPAYMFNEKGTSLTPEEERFLDSAEYGNIPVVRKMLEESKTLNFNCVDYMGQNALQLAVGNEHLEVTELLLKKENLARVGDALLLAISKGYVRIVEAILNHPAFAQGQRLTLSPLEQELRDDDFYAYDEDGTRFSHDITPIILAAHCQEYEIVHILLLKGARIERPHDYFCKCNECTEKQRKDSFSHSRSRMNAYKGLASAAYLSLSSEDPVLTALELSNELARLANIETEFKNDYRKLSMQCKDFVVGVLDLCRDTEEVEAILNGDVNFQVWSDHHRPSLSRIKLAIKYEVKKFVAHPNCQQQLLTMWYENLSGLRQQSIAVKFLAVFGVSIGLPFLAIAYWIAPCSKLGRTLRSPFMKFVAHAVSFTIFLGLLVVNASDRFEGVKTLPNETFTDYPKQIFRVKTTQFSWTEMLIMKWVLGMIWSECKEIWEEGPREYVLHLWNLLDFGMLSIFVASFTARFMAFLKATEAQLYVDQHVQDDTLHNVSLPPEVAYFTYARDKWWPSDPQIISEGLYAIAVVLSFSRIAYILPANESFGPLQISLGRTVKDIFKFMVIFIMVFVAFMIGMFNLYSYYRGAKYNPAFTTVEESFKTLFWSIFGLSEVISVVLKYDHKFIENIGYVLYGVYNVTMVVVLLNMLIAMINNSYQEIEEDADVEWKFARAKLWLSYFDEGRTLPAPFNLVPSPKSFYYLIMRIKMCLIKLCKSKAKSCENDLEMGMLNSKFKKTRYQAGMRNSENLTANNTLSKPTRYQKIMKRLIKRYVLKAQVDRENDEVNEGELKEIKQDISSLRYELLEEKSQATGELADLIQQLSEKFGKNLNKDHLRVNKGKDI

SEQ ID NO: 5404 - DNA, 2932 bp, Homo sapiens
aggttgaggaacagcaccttcaaaaacatgcagcgccggcacacaacgctgagggagaagggccgtcgccaggccatccggggtcccgcctacatgttcaacgagaagggcaccagtctgacgcccgaggaggagcgcttcctggactcggctgagtatggcaacatcccggtggtccggaaaatgctggaggagtccaagacccttaacttcaactgtgtggactacatggggcagaacgctctgcagctggccgtgggcaacgagcacctagaggtcacggagctgctgctgaagaaggagaacctggcacgggtgggggacgcgctgctgctggccatcagcaagggctatgtgcgcatcgtggaggccatcctcaaccacccggccttcgcgcagggccagcgcctgacgctcagcccgctggaacaggagctgcgcgacgacgacttctatgcctacgacgaggacggcacgcgcttctcccacgacatcacgcccatcatcctggcggcgcactgccaggagtatgagatcgtgcacatcctgctgctcaagggcgcccgcatcgagcggccccacgactacttctgcaagtgcaatgagtgcaccgagaaacagcggaaagactccttcagccactcgcgctcgcgcatgaacgcctacaaaggactggcgagtgctgcctacttgtccctgtccagcgaagaccctgtcctcaccgccctggagctcagcaacgagttagccagactagccaacattgagactgaatttaagttcgttgctcatcctaactgtcagcagcaattgcttaccatgtggtatgaaaatctctcaggcttacgtcaacagtctatcgctgtgaaattcctggctgtctttggagtctccataggcctcccttttctcgccatagcctattggattgctccgtgcagcaagctaggacgaaccctgaggagccctttcatgaagtttgtagctcatgcagtttcttttacaatcttcttgggattattagttgtgaatgcatctgaccgatttgaaggtgttaaaaccctgccaaacgaaaccttcacagactacccaaaacaaatcttcagagtgaaaaccacacagttctcctggacagaaatgctcattatgaagtgggtcttaggaatgatttggtccgaatgcaaggaaatctgggaggaggggccacgggagtacgtgctgcacttgtggaacctgctagatttcgggatgctgtccatcttcgtggcctccttcacagcacgcttcatggccttcctgaaggccacggaggcacagctgtacgtggaccagcacgtgcaggacgacacgctgcacaatgtctcgcttccgccggaagtggcatacttcacctacgccagggacaagtggtggccttcagaccctcagatcatatcggaagggctctacgcgatagccgtcgtgctgagcttctctcgcattgcatacattctgccagccaacgagagttttgggcccctgcagatctcgctagggagaactgtgaaagatatcttcaagttcatggtcattttcatcatggtatttgtggccttcatgattgggatgttcaacctgtactcttactaccgaggtgccaaatacaacccagcgtttacaacggttgaagaaagttttaaaactttgttttggtccatattcggcttatctgaagtaatctcagtggtgctgaaatacgaccacaaattcatcgagaacattggctacgttctctacggcgtttataacgtcaccatggtggtagtgttgctcaacatgctaatagccatgataaacaactcctatcaggaaattgaggaggatgcagatgtggaatggaagttcgcccgagcaaaactctggctgtcttactttgatgaaggaagaactctacctgctccttttaatctagtgccaagtcctaaatcattttattatctcataatgagaatcaagatgtgcctcataaaactctgcaaatctaaggccaaaagctgtgaaaatgaccttgaaatgggcatgctgaattccaaattcaagaagactcgctaccaggctggcatgaggaattctgaaaatctgacagcaaataacactttgagcaagcccaccagataccagaaaatcatgaaacggctcataaaaagatacgtcctgaaagcccaggtggacagagaaaatgacgaagtcaatgaaggcgagctgaaggaaatcaagcaagatatctccagcctgcgctatgagcttcttgaggaaaaatctcaagctactggtgagctggcagacctgattcaacaactcagcgagaagtttggaaagaacttaaacaaagaccacctgagggtgaacaagggcaaagacatttagcagcccacatcggcgtctgtgacttctaccagcattccaaggccaggttggatgccctcgcccccatccttggtggggaggggtccccagcccactcctctaggacacgaaggggatctcctggctcagtctcttgcagcatgactgacatctccagcccgctggcctgcctagacccagaactgctgtgaatctaggtggttgggtaagaaaagctaccatgggaggaggggaggaacagccccctgacgagtgtgagacctttggtccagccacagtgaaacccatccctgtggccagagcaggaaaaggccatcttgggtgcacacctgtgccctcccactgcaggtgggactgcagctctggctgtgtcctgggaagacaaacacctcaacccacaaactccttctcactccctccctgccacccccaacacatccaaacagaaccaggaggtgacctgtgatctattcttaagtgccagatgagaacacagcctaatagcaaaatagttctatttgtttat

SEQ ID NO: 5405 - protein, 792 aa, Homo sapiens
MQRRHTTLREKGRRQAIRGPAYMFNEKGTSLTPEEERFLDSAEYGNIPVVRKMLEESKTLNFNCVDYMGQNALQLAVGNEHLEVTELLLKKENLARVGDALLLAISKGYVRIVEAILNHPAFAQGQRLTLSPLEQELRDDDFYAYDEDGTRFSHDITPIILAAHCQEYEIVHILLLKGARIERPHDYFCKCNECTEKQRKDSFSHSRSRMNAYKGLASAAYLSLSSEDPVLTALELSNELARLANIETEFKFVAHPNCQQQLLTMWYENLSGLRQQSIAVKFLAVFGVSIGLPFLAIAYWIAPCSKLGRTLRSPFMKFVAHAVSFTIFLGLLVVNASDRFEGVKTLPNETFTDYPKQIFRVKTTQFSWTEMLIMKWVLGMIWSECKEIWEEGPREYVLHLWNLLDFGMLSIFVASFTARFMAFLKATEAQLYVDQHVQDDTLHNVSLPPEVAYFTYARDKWWPSDPQIISEGLYAIAVVLSFSRIAYILPANESFGPLQISLGRTVKDIFKFMVIFIMVFVAFMIGMFNLYSYYRGAKYNPAFTTVEESFKTLFWSIFGLSEVISVVLKYDHKFIENIGYVLYGVYNVTMVVVLLNMLIAMINNSYQEIEEDADVEWKFARAKLWLSYFDEGRTLPAPFNLVPSPKSFYYLIMRIKMCLIKLCKSKAKSCENDLEMGMLNSKFKKTRYQAGMRNSENLTANNTLSKPTRYQKIMKRLIKRYVLKAQVDRENDEVNEGELKEIKQDISSLRYELLEEKSQATGELADLIQQLSEKFGKNLNKDHLRVNKGKDI

SEQ ID NO: 5406 - DNA, 2846 bp, Homo sapiens
aggttgaggaacagcaccttcaaaaacatgcagcgccggcacacaacgctgagggagaagggccgtcgccaggccatccggggtcccgcctacatgttcaacgagaagggcaccagtctgacgcccgaggaggagcgcttcctggactcggctgagtatggcaacatcccggtggtccggaaaatgctggaggagtccaagacccttaacttcaactgtgtggactacatggggcagaacgctctgcagctggccgtgggcaacgagcacctagaggtcacggagctgctgctgaagaaggagaacctggcacgggtgggggacgcgctgctgctggccatcagcaagggctatgtgcgcatcgtggaggccatcctcaaccacccggccttcgcgcagggccagcgcctgacgctcagcccgctggaacaggagctgcgcgacgacgacttctatgcctacgacgaggacggcacgcgcttctcccacgacatcacgcccatcatcctggcggcgcactgccaggagtatgagatcgtgcacatcctgctgctcaagggcgcccgcatcgagcggccccacgactacttctgcaagtgcaatgagtgcaccgagaaacagcggaaagactccttcagccactcgcgctcgcgcatgaacgcctacaaaggactggcgagtgctgcctacttgtccctgtccagcgaagaccctgtcctcaccgccctggagctcagcaacgagttagccagactagccaacattgagactgaatttaagaacgattacaggaagttatctatgcaatgcaaggattttgtagtgggcgtgctggacctgtgccgagacacagaagaggtggaagcaattttaaacggtgatgtgaacttccaagtctggtccgaccaccaccgtccaagtctgagccggatcaaactcgccattaaatatgaagtcaagaagctaggacgaaccctgaggagccctttcatgaagtttgtagctcatgcagtttcttttacaatcttcttgggattattagttgtgaatgcatctgaccgatttgaaggtgttaaaaccctgccaaacgaaaccttcacagactacccaaaacaaatcttcagagtgaaaaccacacagttctcctggacagaaatgctcattatgaagtgggtcttaggaatgatttggtccgaatgcaaggaaatctgggaggaggggccacgggagtacgtgctgcacttgtggaacctgctagatttcgggatgctgtccatcttcgtggcctccttcacagcacgcttcatggccttcctgaaggccacggaggcacagctgtacgtggaccagcacgtgcaggacgacacgctgcacaatgtctcgcttccgccggaagtggcatacttcacctacgccagggacaagtggtggccttcagaccctcagatcatatcggaagggctctacgcgatagccgtcgtgctgagcttctctcgcattgcatacattctgccagccaacgagagttttgggcccctgcagatctcgctagggagaactgtgaaagatatcttcaagttcatggtcattttcatcatggtatttgtggccttcatgattgggatgttcaacctgtactcttactaccgaggtgccaaatacaacccagcgtttacaacggttgaagaaagttttaaaactttgttttggtccatattcggcttatctgaagtaatctcagtggtgctgaaatacgaccacaaattcatcgagaacattggctacgttctctacggcgtttataacgtcaccatggtggtagtgttgctcaacatgctaatagccatgataaacaactcctatcaggaaattgaggaaatcattttattatctcataatgagaatcaagatgtgcctcataaaactctgcaaatctaaggccaaaagctgtgaaaatgaccttgaaatgggcatgctgaattccaaattcaagaagactcgctaccaggctggcatgaggaattctgaaaatctgacagcaaataacactttgagcaagcccaccagataccagaaaatcatgaaacggctcataaaaagatacgtcctgaaagcccaggtggacagagaaaatgacgaagtcaatgaaggcgagctgaaggaaatcaagcaagatatctccagcctgcgctatgagcttcttgaggaaaaatctcaagctactggtgagctggcagacctgattcaacaactcagcgagaagtttggaaagaacttaaacaaagaccacctgagggtgaacaagggcaaagacatttagcagcccacatcggcgtctgtgacttctaccagcattccaaggccaggttggatgccctcgcccccatccttggtggggaggggtccccagcccactcctctaggacacgaaggggatctcctggctcagtctcttgcagcatgactgacatctccagcccgctggcctgcctagacccagaactgctgtgaatctaggtggttgggtaagaaaagctaccatgggaggaggggaggaacagccccctgacgagtgtgagacctttggtccagccacagtgaaacccatccctgtggccagagcaggaaaaggccatcttgggtgcacacctgtgccctcccactgcaggtgggactgcagctctggctgtgtcctgggaagacaaacacctcaacccacaaactccttctcactccctccctgccacccccaacacatccaaacagaaccaggaggtgacctgtgatctattcttaagtgccagatgagaacacagcctaatagcaaaatagttctatttgtttat

SEQ ID NO: 5407 - protein, 636 aa, Homo sapiens
MQRRHTTLREKGRRQAIRGPAYMFNEKGTSLTPEEERFLDSAEYGNIPVVRKMLEESKTLNFNCVDYMGQNALQLAVGNEHLEVTELLLKKENLARVGDALLLAISKGYVRIVEAILNHPAFAQGQRLTLSPLEQELRDDDFYAYDEDGTRFSHDITPIILAAHCQEYEIVHILLLKGARIERPHDYFCKCNECTEKQRKDSFSHSRSRMNAYKGLASAAYLSLSSEDPVLTALELSNELARLANIETEFKNDYRKLSMQCKDFVVGVLDLCRDTEEVEAILNGDVNFQVWSDHHRPSLSRIKLAIKYEVKKLGRTLRSPFMKFVAHAVSFTIFLGLLVVNASDRFEGVKTLPNETFTDYPKQIFRVKTTQFSWTEMLIMKWVLGMIWSECKEIWEEGPREYVLHLWNLLDFGMLSIFVASFTARFMAFLKATEAQLYVDQHVQDDTLHNVSLPPEVAYFTYARDKWWPSDPQIISEGLYAIAVVLSFSRIAYILPANESFGPLQISLGRTVKDIFKFMVIFIMVFVAFMIGMFNLYSYYRGAKYNPAFTTVEESFKTLFWSIFGLSEVISVVLKYDHKFIENIGYVLYGVYNVTMVVVLLNMLIAMINNSYQEIEEIILLSHNENQDVPHKTLQI

SEQ ID NO: 5408 - DNA, 460 bp, Homo sapiens
caggagcctggagagaatggctcggcacagcagatgcagccgtggtggccatggagctgaccagcctcttgggagtgagctggccacctgagcacggtccactcagcccacacaagcagcagcaccacctcgctgacaggagcttcgtcaatgcctgccgcctcctccttccataacgagggaccacctagcagggactttcacttttatttccacagagaaccttgtggttagaagtccaatgggtctaggctgtgggaatcttcttattaaccacaaacagatgtcaaaaggatctttcctaatactgtagatactgcacttggctcgtgtgggagtccactgtctgtggaaacattactcgtctatttttcaggtctgcagagcccagactgaaaaacacattaaaaaaatggttttgtgaaaaataacaattcagacaccctggagcctaaggaaa

SEQ ID NO: 5409 - protein, 41 aa, Homo sapiens
MELTSLLGVSWPPEHGPLSPHKQQHHLADRSFVNACRLLLP

SEQ ID NO: 5410 - DNA, 704 bp, Homo sapiens
cttctcggcttagcggctgaagactgacactgccagatcgcctcggaagccccctagaccatcacggatgccgagcttcgggtaactctcacagtggaggacaacttccatcttcaccatgagctgggaggcaggaggataatctggcttcaggaaggaagaaaatgtttgtagttctgggaactccagctcatttttaccactgcctgacagcctccacagcagggtttgtttgaaccccaagggaaaggatatctcagcagcttcagggagtgactgcgtactttggtgaaaagccccagcgagctcttggtttaagctaaaaggtccagcacgcccactacaaaatccttgcattgcatagataacttcctgtaatcgttctaacagaatagagagaaatcagcggtatgtcacatggaggcccgcagattggcttgcccagcatagcagtgtcgatcagcaactgctcaccacatgtgaccttatggagcacattggatgcacttatggaacgcagcaggatgtgctgggtgcagaaggcggggcaatttctcttgacacgtgacctgaaggacattttctctaggtcagcatgtgtgaaggtgtggtccatgggccacctgcatcagagtcaccttagctgcgtgctaaagttgcagattcccaggtcccaccctagacttactgagtcagaatacctg

SEQ ID NO: 5411 - protein, 97 aa, Homo sapiens
MSHGGPQIGLPSIAVSISNCSPHVTLWSTLDALMERSRMCWVQKAGQFLLTRDLKDIFSRSACVKVWSMGHLHQSHLSCVLKLQIPRSHPRLTESEY

SEQ ID NO: 5412 - DNA, 4868 bp, Homo sapiens
gtagatgagtcccccattcgtgagaggggtccctgggtctagaggcgcgacaggcgccccaggtgcgcgagcgctgcccgtgcccgccgcggggtccccgcctccgggctggggcgctgggacgcctgggtgcccggggctcgcggccgcccgccctcttcgctcatcgccctgcgcgccctgccccgcagatgccggcgatcgcggtgttggcggcggccgccgcggcgtggtgcttcctccaagtcgagagccggcacctggacgcgctcgccggaggcgcgggccccaaccacggcaatttcctagacaatgaccagtggctgagcaccgtctcccagtacgaccgggacaagtactggaaccgctttcgagacgatgattatttcagaaactggaatcccaacaagccctttgaccaagccctggacccatccaaggacccctgcctgaaggtaaaatgcagccctcacaaagtgtgtgtgacccaggactaccagaccgccctgtgtgtcagccgcaagcacctgctccccaggcaaaagaaggggaacgtggcccagaaacactgggttggaccttcgaatttggtcaagtgcaagccctgtcccgtggcacagtcagccatggtctgcggctcagatggccactcctacacatccaagtgcaaattggagttccatgcttgttctactggcaaaagcctcgccaccctctgtgatgggccctgtccctgtctcccagagcctgagccaccaaagcacaaggcagaaaggagtgcctgcacagacaaggagttgcggaaccttgcctcccggctgaaggattggtttggagctctccacgaggatgcgaacagagtcatcaagcccaccagctccaacacagcccaaggcaggtttgacactagcatcctgcccatctgcaaggactccctgggctggatgttcaacaagttggacatgaactatgacctcctgcttgacccttcagagatcaatgccatctacctggataagtacgagccctgtatcaagcctcttttcaactcgtgtgactccttcaaggatggcaagctttctaacaatgagtggtgctactgcttccagaagcctggaggtctcccttgccagaatgaaatgaacagaattcagaagctgagtaaggggaaaagcctgttgggggccttcatacctcggtgtaatgaggagggctattacaaagccacacagtgccacggcagcacggggcagtgctggtgtgtggacaaatatgggaatgagttggctggctccaggaaacagggtgctgtgagctgtgaagaggagcaggaaacctcaggggattttggcagtggtgggtccgtggtcctgctggatgacctagaatatgaacgggagctgggaccaaaggacaaagaggggaagctgagggtgcacacccgagccgtgacagaggatgatgaggatgaggatgatgacaaagaggatgaggtcgggtacatatggtagtgcccacaagaaagaggacacaagttttgcacaaaattgcaagtcacttcctattcctgcatttgtatctaagactccaaggcaccaaggtctcttctccattgttgctctctatacccgacctaaggtttggaagacaactgcttgttcccagaggattctgattttgcatatgtttgtatgggagaaagggtgttgtgttttttttttgttgttgtttattttttggatagggaagtcattggcttaattagagcctccttcctttctgtgagatttttccaacaagcatgtgatttacgtggaattctgacagtgcagggagccccaaccctcttaaatgtcaaagaccctttttgattacccacactggtggttattacagcatggttcccagccttacagtgtctaagtgcttctcttgtgtcctgtagatgttgtgaaaaagaaaaaaacaaaaaatacaccacactgtactttttccccctgcccccgttactgccggtgattattattaaaaattagtttttttcacatcattatatctggcttcctataaacaacagccttaattcagtcaagactccctttggggaattcattttattaaaaattggtgtctggatacttccctgtacatgcataaatatgcatgcatgtacagaaagactgtatgtgtgtgccttgcacacacacccatacctctcagaaaaagtgtttgggtatcttaaaaactcgaaaaacaatgataaatttctcagcttgtccagacctggaacaaaatttctggaataagaaatttgtattaaagtccttttttgcactaacagttggctcttgtagcctgcaggctgaggaagtctcttctctgtgcatcagcagagttactgaaagcctctgattgagaaaaaacctccgtctgcctaaatcacttttctcgcagaagccatgcgactcccacacgacacgggcagcttcacaagccatctctttcatttctgcttgaagccccttggctgcagcaatcctgtctgccataggtttcttccttccttacctactcaagggctttttctaaggcatgcacacatatctcctgttctctgagagtaccatggtgttccttaaaagaagaaaatttctaattctgaactcaatgttttgcttttactccctttctactgacaaatcatgataagggcacaaaagctgtacagatttttttttttaaccactcaatcccaaatggaggcctacaaagaacatcgtaataacacatggaagcaaaccctgggtttttaagagcaaattctgtccccccctcactcccccaagtgacaagatactaatgaagaaagttcttcaccatagtgtttgttttaactaaactcattggagtctagttccaaatttggtagggtcatcatctctacattccttaggatttctctccctatcaagctggcccagatacaagtaccaaacagtagtctctgaagttcccccatttccttcagtaccagtctataagctactgtccgccactgattttcatttatcagggtgtcctaatcagaatcagccacccaagcaagcctctctggcccacatatctatctcttgccttcccccatgaacttcagcctgtccacacaaaagccacataaactcaagcaagaaatatgttcagccaaaacatgattatagtggcagctgaccaatcccccatcccaaattgaccatttagatgtaccaactcaccttaaattagcatgttccaatccagtcggcattgcctgaatacagtagcatcatacctatagttggtcttagataagaaatgaactacttgatatagcaaagtcctttggcttcgtaaataaccctgaggttttgtacttactttccccataggaagacagaccataggcaaactctgttttgggatctcaactccatcacctttgtttcaatattttttttctctcttgaacaaaactgagataatttagaaaacaggtgcttaattgcaataaaattactatgaagtatattaaaaatcacgacattgtaaaatctcactttagatcatcaaagaaaaccattgttactatctcctttgagcttaggaaaatgtacaagagaacaaattaaaattgaaaaattgatttcacttagaaaaacttctaggaacagggtgaaccactgattttaatttgcctaattatcttatgacaagtatcaaattaagatgacacttaaagatccttagcattaacttaatgatggagaagagtgctcaatagacagttcccagtaaggtaatgagatgccattttcagagacattctaagaagatattttgattcattaaaacattaaataaaaagccctcctcagattggaacccccaaatcgatggagccacattaataatacttttcatgcctcactttgacatgacagcattcgatttttttaaagatctttaatactttccatgagtactaaagattgtaatgagttaccttatccttagaagtagaatgtttgctttcttcttcttggaaatagtcctccaaaaagtccacttgtaccagtgacaagaagtcacttgtatagtgaccaagtacacataaaatactgattataaaaatattgtaataaaccacttcctcatttgatacaggtattaagctgaatcctcactaattcacttttgaaaagttcttaatgaacagttttattcttattccatgaacagctcttttaatacaatttccttggtatccaacttaaatcccagaattttgttccaccatggttagttatttgccatatgaatgtattcttgtttctaccaatattctaggcatgagaataccttaatactgagttggagattttgtatctgtttctcctcctttacgcccattttcctacccacagcagcaaatgacaacgtgtctgtccaggtctgtccccctgctcatcccaggatgccactcacatttttttcttcttgttaccttgaccacgctgtacagtaacatccaagagcccattctacagtgggtggttttggtctttttataactttttctcaaagtcactgatgtttgttcctgttaaatgtatagcattgtaatgagagcccatcaaatcctgagtgtcagtttgttgtccctattgtagatgaaatagtgatgtagcaaaaacctagtaaattctgaatgcttttccacgtagacttatctggaatgtgaacacaactctttggttaatagtaaatgcttaactgtagtcctgagtaggtgcatttctgtctgtctcaataaattttactttgtctgcaat

SEQ ID NO: 5413 - protein, 439 aa, Homo sapiens; identical to SEQ ID NO: 687

SEQ ID NO: 5414 - DNA, 4841 bp, Homo sapiens
agcgagcgagcagagcacatcgctgcgggctcacaaagcggccagacgctcggcggcggcgtgtggcaggagcgcaggggcgcgagccggcgatcagccttcccggcgaccgtgccgcgggagctcgagcaactcggactaggggacccgggccggcccccaagatgccggcgatcgcggtgttggcggcggccgccgcggcgtggtgcttcctccaagtcgagagccggcacctggacgcgctcgccggaggcgcgggccccaaccacggcaatttcctagacaatgaccagtggctgagcaccgtctcccagtacgaccgggacaagtactggaaccgctttcgagacgatgattatttcagaaactggaatcccaacaagccctttgaccaagccctggacccatccaaggacccctgcctgaaggtaaaatgcagccctcacaaagtgtgtgtgacccaggactaccagaccgccctgtgtgtcagccgcaagcacctgctccccaggcaaaagaaggggaacgtggcccagaaacactgggttggaccttcgaatttggtcaagtgcaagccctgtcccgtggcacagtcagccatggtctgcggctcagatggccactcctacacatccaagtgcaaattggagttccatgcttgttctactggcaaaagcctcgccaccctctgtgatgggccctgtccctgtctcccagagcctgagccaccaaagcacaaggcagaaaggagtgcctgcacagacaaggagttgcggaaccttgcctcccggctgaaggattggtttggagctctccacgaggatgcgaacagagtcatcaagcccaccagctccaacacagcccaaggcaggtttgacactagcatcctgcccatctgcaaggactccctgggctggatgttcaacaagttggacatgaactatgacctcctgcttgacccttcagagatcaatgccatctacctggataagtacgagccctgtatcaagcctcttttcaactcgtgtgactccttcaaggatggcaagctttctaacaatgagtggtgctactgcttccagaagcctggaggtctcccttgccagaatgaaatgaacagaattcagaagctgagtaaggggaaaagcctgttgggggccttcatacctcggtgtaatgaggagggctattacaaagccacacagtgccacggcagcacggggcagtgctggtgtgtggacaaatatgggaatgagttggctggctccaggaaacagggtgctgtgagctgtgaagaggagcaggaaacctcaggggattttggcagtggtgggtccgtggtcctgctggatgacctagaatatgaacgggagctgggaccaaaggacaaagaggggaagctgagggtgcacacccgagccgtgacagaggatgatgaggatgaggatgatgacaaagaggatgaggtcgggtacatatggtagtgcccacaagaaagaggacacaagttttgcacaaaattgcaagtcacttcctattcctgcatttgtatctaagactccaaggcaccaaggtctcttctccattgttgctctctatacccgacctaaggtttggaagacaactgcttgttcccagaggattctgattttgcatatgtttgtatgggagaaagggtgttgtgttttttttttgttgttgtttattttttggatagggaagtcattggcttaattagagcctccttcctttctgtgagatttttccaacaagcatgtgatttacgtggaattctgacagtgcagggagccccaaccctcttaaatgtcaaagaccctttttgattacccacactggtggttattacagcatggttcccagccttacagtgtctaagtgcttctcttgtgtcctgtagatgttgtgaaaaagaaaaaaacaaaaaatacaccacactgtactttttccccctgcccccgttactgccggtgattattattaaaaattagtttttttcacatcattatatctggcttcctataaacaacagccttaattcagtcaagactccctttggggaattcattttattaaaaattggtgtctggatacttccctgtacatgcataaatatgcatgcatgtacagaaagactgtatgtgtgtgccttgcacacacacccatacctctcagaaaaagtgtttgggtatcttaaaaactcgaaaaacaatgataaatttctcagcttgtccagacctggaacaaaatttctggaataagaaatttgtattaaagtccttttttgcactaacagttggctcttgtagcctgcaggctgaggaagtctcttctctgtgcatcagcagagttactgaaagcctctgattgagaaaaaacctccgtctgcctaaatcacttttctcgcagaagccatgcgactcccacacgacacgggcagcttcacaagccatctctttcatttctgcttgaagccccttggctgcagcaatcctgtctgccataggtttcttccttccttacctactcaagggctttttctaaggcatgcacacatatctcctgttctctgagagtaccatggtgttccttaaaagaagaaaatttctaattctgaactcaatgttttgcttttactccctttctactgacaaatcatgataagggcacaaaagctgtacagatttttttttttaaccactcaatcccaaatggaggcctacaaagaacatcgtaataacacatggaagcaaaccctgggtttttaagagcaaattctgtccccccctcactcccccaagtgacaagatactaatgaagaaagttcttcaccatagtgtttgttttaactaaactcattggagtctagttccaaatttggtagggtcatcatctctacattccttaggatttctctccctatcaagctggcccagatacaagtaccaaacagtagtctctgaagttcccccatttccttcagtaccagtctataagctactgtccgccactgattttcatttatcagggtgtcctaatcagaatcagccacccaagcaagcctctctggcccacatatctatctcttgccttcccccatgaacttcagcctgtccacacaaaagccacataaactcaagcaagaaatatgttcagccaaaacatgattatagtggcagctgaccaatcccccatcccaaattgaccatttagatgtaccaactcaccttaaattagcatgttccaatccagtcggcattgcctgaatacagtagcatcatacctatagttggtcttagataagaaatgaactacttgatatagcaaagtcctttggcttcgtaaataaccctgaggttttgtacttactttccccataggaagacagaccataggcaaactctgttttgggatctcaactccatcacctttgtttcaatattttttttctctcttgaacaaaactgagataatttagaaaacaggtgcttaattgcaataaaattactatgaagtatattaaaaatcacgacattgtaaaatctcactttagatcatcaaagaaaaccattgttactatctcctttgagcttaggaaaatgtacaagagaacaaattaaaattgaaaaattgatttcacttagaaaaacttctaggaacagggtgaaccactgattttaatttgcctaattatcttatgacaagtatcaaattaagatgacacttaaagatccttagcattaacttaatgatggagaagagtgctcaatagacagttcccagtaaggtaatgagatgccattttcagagacattctaagaagatattttgattcattaaaacattaaataaaaagccctcctcagattggaacccccaaatcgatggagccacattaataatacttttcatgcctcactttgacatgacagcattcgatttttttaaagatctttaatactttccatgagtactaaagattgtaatgagttaccttatccttagaagtagaatgtttgctttcttcttcttggaaatagtcctccaaaaagtccacttgtaccagtgacaagaagtcacttgtatagtgaccaagtacacataaaatactgattataaaaatattgtaataaaccacttcctcatttgatacaggtattaagctgaatcctcactaattcacttttgaaaagttcttaatgaacagttttattcttattccatgaacagctcttttaatacaatttccttggtatccaacttaaatcccagaattttgttccaccatggttagttatttgccatatgaatgtattcttgtttctaccaatattctaggcatgagaataccttaatactgagttggagattttgtatctgtttctcctcctttacgcccattttcctacccacagcagcaaatgacaacgtgtctgtccaggtctgtccccctgctcatcccaggatgccactcacatttttttcttcttgttaccttgaccacgctgtacagtaacatccaagagcccattctacagtgggtggttttggtctttttataactttttctcaaagtcactgatgtttgttcctgttaaatgtatagcattgtaatgagagcccatcaaatcctgagtgtcagtttgttgtccctattgtagatgaaatagtgatgtagcaaaaacctagtaaattctgaatgcttttccacgtagacttatctggaatgtgaacacaactctttggttaatagtaaatgcttaactgtagtcctgagtaggtgcatttctgtctgtctcaataaattttactttgtctgcaat

SEQ ID NO: 5415 - protein, 439 aa, Homo sapiens; identical to SEQ ID NO: 687

SEQ ID NO: 5416 - DNA, 4850 bp, Homo sapiens
agcgagcgagcagagcacatcgctgcgggctcacaaagcggccagacgctcggcggcggcgtgtggcaggagcgcaggggcgcgagccggcgatcagccttcccggcgaccgtgccgcgggagctcgagcaactcggactaggggacccgggccggcccccaagatgccggcgatcgcggtgttggcggcggccgccgcggcgtggtgcttcctccaagtcgagagccggcacctggacgcgctcgccggaggcgcgggccccaaccacggcaatttcctagacaatgaccagtggctgagcaccgtctcccagtacgaccgggacaagtactggaaccgctttcgagacgaagttgaggatgattatttcagaaactggaatcccaacaagccctttgaccaagccctggacccatccaaggacccctgcctgaaggtaaaatgcagccctcacaaagtgtgtgtgacccaggactaccagaccgccctgtgtgtcagccgcaagcacctgctccccaggcaaaagaaggggaacgtggcccagaaacactgggttggaccttcgaatttggtcaagtgcaagccctgtcccgtggcacagtcagccatggtctgcggctcagatggccactcctacacatccaagtgcaaattggagttccatgcttgttctactggcaaaagcctcgccaccctctgtgatgggccctgtccctgtctcccagagcctgagccaccaaagcacaaggcagaaaggagtgcctgcacagacaaggagttgcggaaccttgcctcccggctgaaggattggtttggagctctccacgaggatgcgaacagagtcatcaagcccaccagctccaacacagcccaaggcaggtttgacactagcatcctgcccatctgcaaggactccctgggctggatgttcaacaagttggacatgaactatgacctcctgcttgacccttcagagatcaatgccatctacctggataagtacgagccctgtatcaagcctcttttcaactcgtgtgactccttcaaggatggcaagctttctaacaatgagtggtgctactgcttccagaagcctggaggtctcccttgccagaatgaaatgaacagaattcagaagctgagtaaggggaaaagcctgttgggggccttcatacctcggtgtaatgaggagggctattacaaagccacacagtgccacggcagcacggggcagtgctggtgtgtggacaaatatgggaatgagttggctggctccaggaaacagggtgctgtgagctgtgaagaggagcaggaaacctcaggggattttggcagtggtgggtccgtggtcctgctggatgacctagaatatgaacgggagctgggaccaaaggacaaagaggggaagctgagggtgcacacccgagccgtgacagaggatgatgaggatgaggatgatgacaaagaggatgaggtcgggtacatatggtagtgcccacaagaaagaggacacaagttttgcacaaaattgcaagtcacttcctattcctgcatttgtatctaagactccaaggcaccaaggtctcttctccattgttgctctctatacccgacctaaggtttggaagacaactgcttgttcccagaggattctgattttgcatatgtttgtatgggagaaagggtgttgtgttttttttttgttgttgtttattttttggatagggaagtcattggcttaattagagcctccttcctttctgtgagatttttccaacaagcatgtgatttacgtggaattctgacagtgcagggagccccaaccctcttaaatgtcaaagaccctttttgattacccacactggtggttattacagcatggttcccagccttacagtgtctaagtgcttctcttgtgtcctgtagatgttgtgaaaaagaaaaaaacaaaaaatacaccacactgtactttttccccctgcccccgttactgccggtgattattattaaaaattagtttttttcacatcattatatctggcttcctataaacaacagccttaattcagtcaagactccctttggggaattcattttattaaaaattggtgtctggatacttccctgtacatgcataaatatgcatgcatgtacagaaagactgtatgtgtgtgccttgcacacacacccatacctctcagaaaaagtgtttgggtatcttaaaaactcgaaaaacaatgataaatttctcagcttgtccagacctggaacaaaatttctggaataagaaatttgtattaaagtccttttttgcactaacagttggctcttgtagcctgcaggctgaggaagtctcttctctgtgcatcagcagagttactgaaagcctctgattgagaaaaaacctccgtctgcctaaatcacttttctcgcagaagccatgcgactcccacacgacacgggcagcttcacaagccatctctttcatttctgcttgaagccccttggctgcagcaatcctgtctgccataggtttcttccttccttacctactcaagggctttttctaaggcatgcacacatatctcctgttctctgagagtaccatggtgttccttaaaagaagaaaatttctaattctgaactcaatgttttgcttttactccctttctactgacaaatcatgataagggcacaaaagctgtacagatttttttttttaaccactcaatcccaaatggaggcctacaaagaacatcgtaataacacatggaagcaaaccctgggtttttaagagcaaattctgtccccccctcactcccccaagtgacaagatactaatgaagaaagttcttcaccatagtgtttgttttaactaaactcattggagtctagttccaaatttggtagggtcatcatctctacattccttaggatttctctccctatcaagctggcccagatacaagtaccaaacagtagtctctgaagttcccccatttccttcagtaccagtctataagctactgtccgccactgattttcatttatcagggtgtcctaatcagaatcagccacccaagcaagcctctctggcccacatatctatctcttgccttcccccatgaacttcagcctgtccacacaaaagccacataaactcaagcaagaaatatgttcagccaaaacatgattatagtggcagctgaccaatcccccatcccaaattgaccatttagatgtaccaactcaccttaaattagcatgttccaatccagtcggcattgcctgaatacagtagcatcatacctatagttggtcttagataagaaatgaactacttgatatagcaaagtcctttggcttcgtaaataaccctgaggttttgtacttactttccccataggaagacagaccataggcaaactctgttttgggatctcaactccatcacctttgtttcaatattttttttctctcttgaacaaaactgagataatttagaaaacaggtgcttaattgcaataaaattactatgaagtatattaaaaatcacgacattgtaaaatctcactttagatcatcaaagaaaaccattgttactatctcctttgagcttaggaaaatgtacaagagaacaaattaaaattgaaaaattgatttcacttagaaaaacttctaggaacagggtgaaccactgattttaatttgcctaattatcttatgacaagtatcaaattaagatgacacttaaagatccttagcattaacttaatgatggagaagagtgctcaatagacagttcccagtaaggtaatgagatgccattttcagagacattctaagaagatattttgattcattaaaacattaaataaaaagccctcctcagattggaacccccaaatcgatggagccacattaataatacttttcatgcctcactttgacatgacagcattcgatttttttaaagatctttaatactttccatgagtactaaagattgtaatgagttaccttatccttagaagtagaatgtttgctttcttcttcttggaaatagtcctccaaaaagtccacttgtaccagtgacaagaagtcacttgtatagtgaccaagtacacataaaatactgattataaaaatattgtaataaaccacttcctcatttgatacaggtattaagctgaatcctcactaattcacttttgaaaagttcttaatgaacagttttattcttattccatgaacagctcttttaatacaatttccttggtatccaacttaaatcccagaattttgttccaccatggttagttatttgccatatgaatgtattcttgtttctaccaatattctaggcatgagaataccttaatactgagttggagattttgtatctgtttctcctcctttacgcccattttcctacccacagcagcaaatgacaacgtgtctgtccaggtctgtccccctgctcatcccaggatgccactcacatttttttcttcttgttaccttgaccacgctgtacagtaacatccaagagcccattctacagtgggtggttttggtctttttataactttttctcaaagtcactgatgtttgttcctgttaaatgtatagcattgtaatgagagcccatcaaatcctgagtgtcagtttgttgtccctattgtagatgaaatagtgatgtagcaaaaacctagtaaattctgaatgcttttccacgtagacttatctggaatgtgaacacaactctttggttaatagtaaatgcttaactgtagtcctgagtaggtgcatttctgtctgtctcaataaattttactttgtctgcaat

SEQ ID NO: 5417 - protein, 442 aa, Homo sapiens
MPAIAVLAAAAAAWCFLQVESRHLDALAGGAGPNHGNFLDNDQWLSTVSQYDRDKYWNRFRDEVEDDYFRNWNPNKPFDQALDPSKDPCLKVKCSPHKVCVTQDYQTALCVSRKHLLPRQKKGNVAQKHWVGPSNLVKCKPCPVAQSAMVCGSDGHSYTSKCKLEFHACSTGKSLATLCDGPCPCLPEPEPPKHKAERSACTDKELRNLASRLKDWFGALHEDANRVIKPTSSNTAQGRFDTSILPICKDSLGWMFNKLDMNYDLLLDPSEINAIYLDKYEPCIKPLFNSCDSFKDGKLSNNEWCYCFQKPGGLPCQNEMNRIQKLSKGKSLLGAFIPRCNEEGYYKATQCHGSTGQCWCVDKYGNELAGSRKQGAVSCEEEQETSGDFGSGGSVVLLDDLEYERELGPKDKEGKLRVHTRAVTEDDEDEDDDKEDEVGYIW

SEQ ID NO: 5418 - DNA, 2052 bp, Homo sapiens
gtagatgagtcccccattcgtgagaggggtccctgggtctagaggcgcgacaggcgccccaggtgcgcgagcgctgcccgtgcccgccgcggggtccccgcctccgggctggggcgctgggacgcctgggtgcccggggctcgcggccgcccgccctcttcgctcatcgccctgcgcgccctgccccgcagatgccggcgatcgcggtgttggcggcggccgccgcggcgtggtgcttcctccaagtcgagagccggcacctggacgcgctcgccggaggcgcgggccccaaccacggcaatttcctagacaatgaccagtggctgagcaccgtctcccagtacgaccgggacaagtactggaaccgctttcgagacgatgattatttcagaaactggaatcccaacaagccctttgaccaagccctggacccatccaaggacccctgcctgaaggtaaaatgcagccctcacaaagtgtgtgtgacccaggactaccagaccgccctgtgtgtcagccgcaagcacctgctccccaggcaaaagaaggggaacgtggcccagaaacactgggttggaccttcgaatttggtcaagtgcaagccctgtcccgtggcacagtcagccatggtctgcggctcagatggccactcctacacatccaagtgcaaattggagttccatgcttgttctactggcaaaagcctcgccaccctctgtgatgggccctgtccctgtctcccagagcctgagccaccaaagcacaaggcagaaaggagtgcctgcacagacaaggagttgcggaaccttgcctcccggctgaaggattggtttggagctctccacgaggatgcgaacagagtcatcaagcccaccagctccaacacagcccaaggcaggtttgacactagcatcctgcccatctgcaaggactccctgggctggatgttcaacaagttggacatgaactatgacctcctgcttgacccttcagagatcaatgccatctacctggataagtacgagccctgtatcaagcctcttttcaactcgtgtgactccttcaaggatggcaagctttctaacaatgagtggtgctactgcttccagaagcctggaggtctcccttgccagaatgaaatgaacagaattcagaagctgagtaaggggaaaagcctgttgggggccttcatacctcggtgtaatgaggagggctattacaaagccacacagtgccacggcagcacggggcagtgctggtgtgtggacaaatatgggaatgagttggctggctccaggaaacagggtgctgtgagctgtgaagaggagcaggaaacctcaggggattttggcagtggtgggtccgtggtcctgctggatgacctagaatatgaacgggagctgggaccaaaggacaaagaggggaagctgagggtgcacacccgagccgtgacagaggatgatgaggatgaggatgatgacaaagaggatgaggtcgggtacatatggtagtgcccacaagaaagaggacacaagttttgcacaaaattgcaagtcacttcctattcctgcatttgtatctaagactccaaggcaccaaggtctcttctccattgttgctctctatacccgacctaaggtttggaagacaactgcttgttcccagaggattctgattttgcatatgtttgtatgggagaaagggtgttgtgttttttttttgttgttgtttattttttggatagggaagtcattggcttaattagagcctccttcctttctgtgagatttttccaacaagcatgtgatttacgtggaattctgacagtgcagggagccccaaccctcttaaatgtcaaagaccctttttgattacccacactggtggttattacagcatggttcccagccttacagtgtctaagtgcttctcttgtgtcctgtagatgttgtgaaaaagaaaaaaacaaaaaatacaccacactgtactttttccccctgcccccgttactgccggtgattattattaaaaattagtttttttcacatcatt

SEQ ID NO: 5419 - protein, 439 aa, Homo sapiens; identical to SEQ ID NO: 687

SEQ ID NO: 5420 - DNA, 2034 bp, Homo sapiens
agcgagcgagcagagcacatcgctgcgggctcacaaagcggccagacgctcggcggcggcgtgtggcaggagcgcaggggcgcgagccggcgatcagccttcccggcgaccgtgccgcgggagctcgagcaactcggactaggggacccgggccggcccccaagatgccggcgatcgcggtgttggcggcggccgccgcggcgtggtgcttcctccaagtcgagagccggcacctggacgcgctcgccggaggcgcgggccccaaccacggcaatttcctagacaatgaccagtggctgagcaccgtctcccagtacgaccgggacaagtactggaaccgctttcgagacgaagttgaggatgattatttcagaaactggaatcccaacaagccctttgaccaagccctggacccatccaaggacccctgcctgaaggtaaaatgcagccctcacaaagtgtgtgtgacccaggactaccagaccgccctgtgtgtcagccgcaagcacctgctccccaggcaaaagaaggggaacgtggcccagaaacactgggttggaccttcgaatttggtcaagtgcaagccctgtcccgtggcacagtcagccatggtctgcggctcagatggccactcctacacatccaagtgcaaattggagttccatgcttgttctactggcaaaagcctcgccaccctctgtgatgggccctgtccctgtctcccagagcctgagccaccaaagcacaaggcagaaaggagtgcctgcacagacaaggagttgcggaaccttgcctcccggctgaaggattggtttggagctctccacgaggatgcgaacagagtcatcaagcccaccagctccaacacagcccaaggcaggtttgacactagcatcctgcccatctgcaaggactccctgggctggatgttcaacaagttggacatgaactatgacctcctgcttgacccttcagagatcaatgccatctacctggataagtacgagccctgtatcaagcctcttttcaactcgtgtgactccttcaaggatggcaagctttctaacaatgagtggtgctactgcttccagaagcctggaggtctcccttgccagaatgaaatgaacagaattcagaagctgagtaaggggaaaagcctgttgggggccttcatacctcggtgtaatgaggagggctattacaaagccacacagtgccacggcagcacggggcagtgctggtgtgtggacaaatatgggaatgagttggctggctccaggaaacagggtgctgtgagctgtgaagaggagcaggaaacctcaggggattttggcagtggtgggtccgtggtcctgctggatgacctagaatatgaacgggagctgggaccaaaggacaaagaggggaagctgagggtgcacacccgagccgtgacagaggatgatgaggatgaggatgatgacaaagaggatgaggtcgggtacatatggtagtgcccacaagaaagaggacacaagttttgcacaaaattgcaagtcacttcctattcctgcatttgtatctaagactccaaggcaccaaggtctcttctccattgttgctctctatacccgacctaaggtttggaagacaactgcttgttcccagaggattctgattttgcatatgtttgtatgggagaaagggtgttgtgttttttttttgttgttgtttattttttggatagggaagtcattggcttaattagagcctccttcctttctgtgagatttttccaacaagcatgtgatttacgtggaattctgacagtgcagggagccccaaccctcttaaatgtcaaagaccctttttgattacccacactggtggttattacagcatggttcccagccttacagtgtctaagtgcttctcttgtgtcctgtagatgttgtgaaaaagaaaaaaacaaaaaatacaccacactgtactttttccccctgcccccgttactgccggtgattattattaaaaattagtttttttcacatcatt

SEQ ID NO: 5421 - protein, 442 aa, Homo sapiens; identical to SEQ ID NO: 5417

SEQ ID NO: 5422 - DNA, 542 bp, Homo sapiens
taggtcctcaccagacacagaatctgccagtaccctgaccttggattttcgagcctccagaactgtcaatgtcactgttccgaagctagacttgcagttcactgggaagcatgacaccacagcacctccagctgtggacgcatcatggacaagccaggctgagaggagaacttctcattacttgcagcacagcaacattgggttcaatgtatgcccatgaaaaacctcatttaagagaatgccttggaaaggtgccaaggtccccaaactaattaactttcatctctcctggccctctgcaccctctctccatgaggaacattaaacatagaacatcagcttgagaacactctatttaaagcaaaagtccttctaaagatagccttgaacgtccatctaaatcatcctaagtccattttctggcccagaatccacaaggccagcgcccccgatgggccctactatggtggcttatatccataaagaatgtctttcacggttcattggttggattaatctgatataaagtgtctaaactgaaa

SEQ ID NO: 5423 - protein, 53 aa, Homo sapiens
MTPQHLQLWTHHGQARLRGELLITCSTATLGSMYAHEKPHLRECLGKVPRSPN

SEQ ID NO: 5424 - DNA, 4528 bp, Homo sapiens
gttgatagaaagataacgttgaaggcaagttgcccttgagcagctctctgaagatcaactgcctccacattgcattctttgccccaaaactctttcctttggttgtgctaagaggtgatgcccaaggtgcaccacctttcaagaactggatcatgaacaactttatcctcctggaagaacagctcatcaagaaatcccaacaaaagagaagaacttctccctcgaactttaaagtccgcttctttgtgttaaccaaagccagcctggcatactttgaagatcgtcatgggaagaagcgcacgctgaaggggtccattgagctctcccgaatcaaatgtgttgagattgtgaaaagtgacatcagcatcccatgccactataaatacccgtttcaggtggtgcatgacaactacctcctatatgtgtttgctccagatcgtgagagccggcagcgctgggtgctggcccttaaagaagaaacgaggaataataacagtttggtgcctaaatatcatcctaatttctggatggatgggaagtggaggtgctgttctcagctggagaagcttgcaacaggctgtgcccaatatgatccaaccaagaatgcttcaaagaagcctcttcctcctactcctgaagacaacaggcgaccactttgggaacctgaagaaactgtggtcattgccttatatgactaccaaaccaatgatcctcaggaactcgcactgcggcgcaacgaagagtactgcctgctggacagttctgagattcactggtggagagtccaggacaggaatgggcatgaaggatatgtaccaagcagttatctggtggaaaaatctccaaataatctggaaacctatgagtggtacaataagagtatcagccgagacaaagctgaaaaacttcttttggacacaggcaaagaaggagccttcatggtaagggattccaggactgcaggaacatacaccgtgtctgttttcaccaaggctgttgtaagtgagaacaatccctgtataaagcattatcacatcaaggaaacaaatgacaatcctaagcgatactatgtggctgaaaagtatgtgttcgattccatccctcttctcatcaactatcaccaacataatggaggaggcctggtgactcgactccggtatccagtttgttttgggaggcagaaagccccagttacagcagggctgagatacgggaaatgggtgatcgacccctcagagctcacttttgtgcaagagattggcagtgggcaatttgggttggtgcatctgggctactggctcaacaaggacaaggtggctatcaaaaccattcgggaaggggctatgtcagaagaggacttcatagaggaggctgaagtaatgatgaaactctctcatcccaaactggtgcagctgtatggggtgtgcctggagcaggcccccatctgcctggtgtttgagttcatggagcacggctgcctgtcagattatctacgcacccagcggggactttttgctgcagagaccctgctgggcatgtgtctggatgtgtgtgagggcatggcctacctggaagaggcatgtgtcatccacagagacttggctgccagaaattgtttggtgggagaaaaccaagtcatcaaggtgtctgactttgggatgacaaggttcgttctggatgatcagtacaccagttccacaggcaccaaattcccggtgaagtgggcatccccagaggttttctctttcagtcgctatagcagcaagtccgatgtgtggtcatttggtgtgctgatgtgggaagttttcagtgaaggcaaaatcccgtatgaaaaccgaagcaactcagaggtggtggaagacatcagtaccggatttcggttgtacaagccccggctggcctccacacacgtctaccagattatgaatcactgctggaaagagagaccagaagatcggccagccttctccagactgctgcgtcaactggctgaaattgcagaatcaggactttagtagagactgagtaccaggccacgggctgcagatcctgaatggaggaaggatatgtcctcattccatagagcattagaagctgccaccagcccaggaccctccagaggcagcctggcctgtggcatcagtccctgagtcaccatggaagcagcatcctgaccacagctggcagtcaagccacagctggagggtcagccaccaagctgggagctgagccagaacaggagtgatgtctctgcccttcctctagcctcttgtcacatgtggtgcacaaacctcaacctgacagctttcagacagcattcttgcacttcttagcaacagagagagacatgagtaagacccagattgctatttttattgttatttttaacatgaatctaaagtttatggttccagggactttttatttgacccaacaacacagtatcccaggatatggaggcaaggggaacaaagagcatgagtctttttccaagaaaactggtgagttaagtaagattagagtgagtgtgctctgttgctgtgatgctgtcagccacagcttcctgccgtagagaatgatagagcagctgctcacacaggaggccggatattctgagaagcagctttatgaggttttacagagtatgctgctacctctctccttgaagggagcatggcgagacccattggatggattggggtgaacagttcaggtcccatgcttggagcattgggtatctgatgtctgcaccagaacaagagaacctctgacggtggagaaccatgtggtgcaagaagagatcttaggtctcttcttttataccaagctcatcttttataccaagctgtgcaggtgactatgcctcctcttctgcacagaatgcttccaccagcatcctgagaagaaatgattacttctgaaaaacatccttttttccagcctctgggaatcagccccccctctctgcactatccgatcctcatcaacagagggcagcattgtgttggtcaatgttcccttggcgagcaattgaaacttgtttaggccctagggttgagcaattttaaggttgagactccaagtctcctaaaattctaggagagaaataaagagtctgtttttgctcaaaccatcaggatggaaacagtcaggcactgactggggtgcttccaagaggcatgagagtgcctactctggcttgagcacttctatatgcaaggtgaatatgtactgagctaggagacttccctgcaaaatctctgttcaccctgggttcacatccccatgaggtaatattattattcccattttacaaataatgtaactgaggctttaaaaagccaagacatctgcccaaagtgatggaactagaaagtctagagctggtattctagcccaaatctgtctgaccgcaatacacagattctttattcctattcgacactggcttctactgaaaatgaaacggattgcagagggaataaatacaaagatggaaagccagtaaagaagtcagtatagaaccactagcgaatagtgttgctctggcacagaccactgtggttgatggcatggccctccaacttggaataggattttccttttcctattctgtatccttaccttggtcatgttaatgactttggagttattcagttaatgaccctttaattctcacaaccaaccagtcatgttgcttgaagccatttatagacgagcttcaaagcaactttaaaagattcttctgtagaagtatgagttcttcctttaattatcattccaactttcagctgtagtcttcttgaacacttcatgaggagggacattccctgatataagagaggatggtgttgcaattggctctttctaaatcatgtgacgttttgactggcttgagattcagatgcataatttttaattataattattgtgaagtggagagcctcaagataaaactctgtcattcagaagatgattttactcagcttatccaaaattatctctgtttactttttagaattttgtacattatcttttgggatccttaattagagatgatttctggaacattcagtctagaaagaaaacattggaattgactgatctctgtggtttggtttagaaaattcccctgtgcatggtattacctttttcaagctcagattcatctaatcctcaactgtacatgtgtacattcttcacctcctggtgccctatcccgcaaaatgggcttcctgcctggtttttctcttctcacattttttaaatggtcccctgtgtttgtagagaactcccttatacagagttttggttctagttttatttcgtagattttgcattttgtaccttttgagactatgtatttatatttggatcagatgcatatttattaatgtacagtcactgctagtgttcaaaataaaaatgttacaaatacctgttatcctttgtagagcacacagagttaaaagttgaatatagcaatattaaagctgcattttaataaatatggtgcatagggcctcgg

SEQ ID NO: 5425 - protein, 620 aa, Homo sapiens; identical to SEQ ID NO: 689

SEQ ID NO: 5426 - DNA, 5978 bp, Homo sapiens
gttgatagaaagataacgttgaaggcaagttgcccttgagcagctctctgaagatcaactgcctccacattgcattctttgccccaaaactctttcctttggttgtgctaagaggtgatgcccaaggtgcaccacctttcaagaactggatcatgaacaactttatcctcctggaagaacagctcatcaagaaatcccaacaaaagagaagaacttctccctcgaactttaaagtccgcttctttgtgttaaccaaagccagcctggcatactttgaagatcgtcatgggaagaagcgcacgctgaaggggtccattgagctctcccgaatcaaatgtgttgagattgtgaaaagtgacatcagcatcccatgccactataaatacccgtttcaggtggtgcatgacaactacctcctatatgtgtttgctccagatcgtgagagccggcagcgctgggtgctggcccttaaagaagaaacgaggaataataacagtttggtgcctaaatatcatcctaatttctggatggatgggaagtggaggtgctgttctcagctggagaagcttgcaacaggctgtgcccaatatgatccaaccaagaatgcttcaaagaagcctcttcctcctactcctgaagacaacaggcgaccactttgggaacctgaagaaactgtggtcattgccttatatgactaccaaaccaatgatcctcaggaactcgcactgcggcgcaacgaagagtactgcctgctggacagttctgagattcactggtggagagtccaggacaggaatgggcatgaaggatatgtaccaagcagttatctggtggaaaaatctccaaataatctggaaacctatgagtggtacaataagagtatcagccgagacaaagctgaaaaacttcttttggacacaggcaaagaaggagccttcatggtaagggattccaggactgcaggaacatacaccgtgtctgttttcaccaaggctgttgtaagtgagaacaatccctgtataaagcattatcacatcaaggaaacaaatgacaatcctaagcgatactatgtggctgaaaagtatgtgttcgattccatccctcttctcatcaactatcaccaacataatggaggaggtaagctctagagcaggggtggacccgggccgcccagcaggaggtgagcagcaggtgagcaagcattactgcctgagctctgccttctgtcagatcagcgtcattagattctcataagagtgcaagccctattgtgaacagcacttgtgggatctaggttgtgtgctccttataagaatcaaatgcctgatgatctgagatggaacagtttcatcctgaaagcaaccccctgccacatccctccatggataaactgtcttccacaaagccgatccctggtgccaaaaaggttggggactgctgctctagaggacaaagccagagggcacctgggttagacttttttgaattgctatcaaggaatacctgaggctgggtaatttataaagaaaagaggtttaattggtccatggttgtataggaagcatggtgccggcatcttcttggcttttagggagccctcaggaagctttcagtcatggcagaaggcaaaaggggagcaggagtatcacatggcaggagcaggagcgaggagggagaagatgccacagacatttaaacaaccaggtcttgcatgaactcagagtgataactcatttattatcacaaggacagtgacagcaccaaggcatttgtgatggatcccacctaatgacccaaacaccacctcccatcccaccaggccccacctccaacatagggcttttcttttcttttctttcttttcctttcttttcttttctttcttttttttttttttgagacagagtttcgctctgttgcccaggctggagtgcagtggctcaatcttggctcactgcaacctccacctcccaggttcaagcaattctcctgcctcagcctcctgattagctgggattacaggcatgtgccaccacatcccgctaattttggtattttttgtagagacagggtttcaccgcattggccaggctggtcttgaactcctgacctcaggtaatctgcccgcctcagcctcccatactgctgggattacaggtgtaagccacagtgcccagccagggattacatttcaacatgagatttggaggggacaaacatccaaactatatcagcacccacacaggagacttaatgaaaactggcaaaagctcgccctggcttctttttgactataaataataaataaatatacaaatagaaaaatatgacaaatatttaattatattatatatcttctattagcaagctatcttgtggaaataatggaattttaccacttgcccatctgtgcttatgatgttttcaaggaggatatgatatcaataattaggctttgggatttgttttccagaataaaattagcttttgcgtctgatgatgattattattttttttagtgatttaagttagatggttgctagagcaaagccctaaccactgcttcttggcttttcaatcaacccaggcctggtgactcgactccggtatccagtttgttttgggaggcagaaagccccagttacagcagggctgagatacgggaaatgggtgatcgacccctcagagctcacttttgtgcaagagattggcagtgggcaatttgggttggtgcatctgggctactggctcaacaaggacaaggtggctatcaaaaccattcgggaaggggctatgtcagaagaggacttcatagaggaggctgaagtaatgatgaaactctctcatcccaaactggtgcagctgtatggggtgtgcctggagcaggcccccatctgcctggtgtttgagttcatggagcacggctgcctgtcagattatctacgcacccagcggggactttttgctgcagagaccctgctgggcatgtgtctggatgtgtgtgagggcatggcctacctggaagaggcatgtgtcatccacagagacttggctgccagaaattgtttggtgggagaaaaccaagtcatcaaggtgtctgactttgggatgacaaggttcgttctggatgatcagtacaccagttccacaggcaccaaattcccggtgaagtgggcatccccagaggttttctctttcagtcgctatagcagcaagtccgatgtgtggtcatttggtgtgctgatgtgggaagttttcagtgaaggcaaaatcccgtatgaaaaccgaagcaactcagaggtggtggaagacatcagtaccggatttcggttgtacaagccccggctggcctccacacacgtctaccagattatgaatcactgctggaaagagagaccagaagatcggccagccttctccagactgctgcgtcaactggctgaaattgcagaatcaggactttagtagagactgagtaccaggccacgggctgcagatcctgaatggaggaaggatatgtcctcattccatagagcattagaagctgccaccagcccaggaccctccagaggcagcctggcctgtggcatcagtccctgagtcaccatggaagcagcatcctgaccacagctggcagtcaagccacagctggagggtcagccaccaagctgggagctgagccagaacaggagtgatgtctctgcccttcctctagcctcttgtcacatgtggtgcacaaacctcaacctgacagctttcagacagcattcttgcacttcttagcaacagagagagacatgagtaagacccagattgctatttttattgttatttttaacatgaatctaaagtttatggttccagggactttttatttgacccaacaacacagtatcccaggatatggaggcaaggggaacaaagagcatgagtctttttccaagaaaactggtgagttaagtaagattagagtgagtgtgctctgttgctgtgatgctgtcagccacagcttcctgccgtagagaatgatagagcagctgctcacacaggaggccggatattctgagaagcagctttatgaggttttacagagtatgctgctacctctctccttgaagggagcatggcgagacccattggatggattggggtgaacagttcaggtcccatgcttggagcattgggtatctgatgtctgcaccagaacaagagaacctctgacggtggagaaccatgtggtgcaagaagagatcttaggtctcttcttttataccaagctcatcttttataccaagctgtgcaggtgactatgcctcctcttctgcacagaatgcttccaccagcatcctgagaagaaatgattacttctgaaaaacatccttttttccagcctctgggaatcagccccccctctctgcactatccgatcctcatcaacagagggcagcattgtgttggtcaatgttcccttggcgagcaattgaaacttgtttaggccctagggttgagcaattttaaggttgagactccaagtctcctaaaattctaggagagaaataaagagtctgtttttgctcaaaccatcaggatggaaacagtcaggcactgactggggtgcttccaagaggcatgagagtgcctactctggcttgagcacttctatatgcaaggtgaatatgtactgagctaggagacttccctgcaaaatctctgttcaccctgggttcacatccccatgaggtaatattattattcccattttacaaataatgtaactgaggctttaaaaagccaagacatctgcccaaagtgatggaactagaaagtctagagctggtattctagcccaaatctgtctgaccgcaatacacagattctttattcctattcgacactggcttctactgaaaatgaaacggattgcagagggaataaatacaaagatggaaagccagtaaagaagtcagtatagaaccactagcgaatagtgttgctctggcacagaccactgtggttgatggcatggccctccaacttggaataggattttccttttcctattctgtatccttaccttggtcatgttaatgactttggagttattcagttaatgaccctttaattctcacaaccaaccagtcatgttgcttgaagccatttatagacgagcttcaaagcaactttaaaagattcttctgtagaagtatgagttcttcctttaattatcattccaactttcagctgtagtcttcttgaacacttcatgaggagggacattccctgatataagagaggatggtgttgcaattggctctttctaaatcatgtgacgttttgactggcttgagattcagatgcataatttttaattataattattgtgaagtggagagcctcaagataaaactctgtcattcagaagatgattttactcagcttatccaaaattatctctgtttactttttagaattttgtacattatcttttgggatccttaattagagatgatttctggaacattcagtctagaaagaaaacattggaattgactgatctctgtggtttggtttagaaaattcccctgtgcatggtattacctttttcaagctcagattcatctaatcctcaactgtacatgtgtacattcttcacctcctggtgccctatcccgcaaaatgggcttcctgcctggtttttctcttctcacattttttaaatggtcccctgtgtttgtagagaactcccttatacagagttttggttctagttttatttcgtagattttgcattttgtaccttttgagactatgtatttatatttggatcagatgcatatttattaatgtacagtcactgctagtgttcaaaataaaaatgttacaaatacctgttatcctttgtagagcacacagagttaaaagttgaatatagcaatattaaagctgcattttaataaatatggtgcatagggcctcgg

SEQ ID NO: 5427 - protein, 331 aa, Homo sapiens [sequence omitted]

SEQ ID NO: 5428 - DNA, 1099 bp, Homo sapiens
gataacgttgaaggcaagttgcccttgagcagctctctgaagatcaactgcctccacattgcattctttgccccaaaactctttcctttggttgtgctaagaggtgatgcccaaggtgcaccacctttcaagaactggatcatgaacaactttatcctcctggaagaacagctcatcaagaaatcccaacaaaagagaagaacttctccctcgaactttaaagtccgcttctttgtgttaaccaaagccagcctggcatactttgaagatcgtcatgggatataagcacagaggagcagggaagatggtcaaaagagatcccaggcccccacgttctgccagagcacagtgagcaaatgagcctcctgccacaaactgaacccacatttctctcaatccaagaaaaggctgttctaattccaaacaagctcattgtaaacctcaataacatgaagttagtattgttcacgttgctttccaactgtgtttcagatttatataactggttcctaacacataattaactgctgttggaatgaatctttgtccccttgcctccgtgcctgctggacttcatatctgtgtattaatagtcacttttgtttggcgatcttgtgaaaaatgcagactaatttttaatccttaaagagataatacattcacataattttatttttattttttcagataatggcctttcgccatgtggcacatttcaataattttaaaaaaacagttgcaaaatgttatgcagtaacaaatctcccatctttgtcccaagtcacattgctgtcctacatcacagcaaccacgatagttaatttcttataagttcttccaataatactttatacatatacttgtaatactaataaacattcttcttttcttcctttttaaatagtagtaacatactctgcacacacttcttaacttttcttttagttggttaacaatgtatcctggagattgatccacactgatacacaaagatattcttcattctgtttatggttgcataatacttcattgtatgcatgaaaaatttcttttaatgaaggttggtctgtttccagtttttgttattatgcacaatgag

SEQ ID NO: 5429 - protein, 47 aa, Homo sapiens
MNNFILLEEQLIKKSQQKRRTSPSNFKVRFFVLTKASLAYFEDRHGI

SEQ ID NO: 5430 - DNA, 606 bp, Homo sapiens
aacgttgaaggcaagttgcccttgagcagctctctgaagatcaactgcctccacattgcattctttgccccaaaactctttcctttggttgtgctaagaggtgatgcccaaggtgcaccacctttcaagaactggatcatgaacaactttatcctcctggaagaacagctcatcaagaaatcccaacaaaagagaagaacttctccctcgaactttaaagtccgcttctttgtgttaaccaaagccagcctggcatactttgaagatcgtcatgggaagaagcgcacgctgaaggggtccattgagctctcccgaatcaaatgtgttgagattgtgaaaagtgacatcagcatcccatgccactataaatacccgtttcaggtggtgcatgacaactacctcctatatgtgtttgctccagatcgtgagagccggcagcgctgggtgctggcccttaaagaaggtaattaaactcctttgccattgaatcactgacactcttgatcctatagtagggttgggttccacaatagaatagagtgtggtgtgagagcagctgatggctgatttctcttttggggttggtggaagttcccaagttttcat

SEQ ID NO: 5431 - protein, 110 aa, Homo sapiens
MNNFILLEEQLIKKSQQKRRTSPSNFKVRFFVLTKASLAYFEDRHGKKRTLKGSIELSRIKCVEIVKSDISIPCHYKYPFQVVHDNYLLYVFAPDRESRQRWVLALKEGN

SEQ ID NO: 5432 - DNA, 571 bp, Homo sapiens
gagcagctctctgaagatcaactgcctccacattgcattctttgccccaaaactctttcctttggttgtgctaagaggtgatgcccaaggtgcaccacctttcaagaactggatcatgaacaactttatcctcctggaagaacagctcatcaagaaatcccaacaaaagagaagaacttctccctcgaactttaaagtccgcttctttgtgttaaccaaagccagcctggcatactttgaagatcgtcatgggaagaagcgcacgctgaaggggtccattgagctctcccgaatcaaatgtgttgagattgtgaaaagtgacatcagcatcccatgccactataaatacccgtttcaggtggtgcatgacaactacctcctatatgtgtttgctccagatcgtgagagccggcagcgctgggtgctggcccttaaagaagaaaaggggtctcgctatgttgcctaggctaatctagaactcctggactcaagtgatcctcttgcctcggcctacgaaagtactgggattacaagcatgagccactacacccaactctgttctgtgccttat

SEQ ID NO: 5433 - protein, 116 aa, Homo sapiens
MNNFILLEEQLIKKSQQKRRTSPSNFKVRFFVLTKASLAYFEDRHGKKRTLKGSIELSRIKCVEIVKSDISIPCHYKYPFQVVHDNYLLYVFAPDRESRQRWVLALKEEKGSRYVA

SEQ ID NO: 5434 - DNA, 621 bp, Homo sapiens
gagcagctctctgaagatcaactgcctccacattgcattctttgccccaaaactctttcctttggttgtgctaagaggtgatgcccaaggtgcaccacctttcaagaactggatcatgaacaactttatcctcctggaagaacagctcatcaagaaatcccaacaaaagagaagaacttctccctcgaactttaaagtccgcttctttgtgttaaccaaagccagcctggcatactttgaagatcgtcatgggaagaagcgcacgctgaaggggtccattgagctctcccgaatcaaatgtgttgagattgtgaaaagtgacatcagcatcccatgccactataaatacccgtttcaggtggtgcatgacaactacctcctatatgtgtttgctccagatcgtgagagccggcagcgctgggtgctggcccttaaagaagaaacgaggaataataacagtttgctgcctggtgtttgagttcatggagcacggctgcctgtcagattatctacgcacccagcggggactttttgctgcagagaccctgctgggcatgtgtctggatgtgtgtgagggcatggcctacctggaagaggcatgtgtcatccacagagacttgg

SEQ ID NO: 5435 - protein, 120 aa, Homo sapiens
MNNFILLEEQLIKKSQQKRRTSPSNFKVRFFVLTKASLAYFEDRHGKKRTLKGSIELSRIKCVEIVKSDISIPCHYKYPFQVVHDNYLLYVFAPDRESRQRWVLALKEETRNNNSLLPGV

SEQ ID NO: 5436 - DNA, 569 bp, Homo sapiens
cttggtacaagtgaaaaaaggatgcatttgcacaggcattcaacattccatcctgtttcatcacgatcctacaacatattatctccccattttatagatgagaaaattgaagttcacagaggccaaccctcttaatacgtagaagagcagcgtacaagctccactctatgactccagagcctgataacctaactactatgcttcctggcttagcacttgctgggactttccacagaagactatcattccctgaactcagtgctggaaaatcaattgtgtgacccatttcaccaagccatggactcgcagagctttgtttctgtcccatttgactgagcaatgcttatgctggattgcaaaggtggaacacactccctggttcctcagaatagccactcctctttgctccaacaacattggctcttttgctgctggactagcccagcaaatgtgtcgatgagaagttatgtgtctgctacccatgggaaaaggacatctccacgtttctaaaaaaatagcagttttcagctttctcctctggtaaggcagagtaggggagaactggagct

SEQ ID NO: 5437 - protein, 37 aa, Homo sapiens
MHLHRHSTFHPVSSRSYNILSPHFIDEKIEVHRGQPS

SEQ ID NO: 5438 - DNA, 911 bp, Homo sapiens
tggtcacggcggcagaggcaggggccagcgctctgcagtacctggactcgaggatgtcgccgctgccgggctcgcggccgctgcaggtgtctccggtccctgagattagcaccgcctcctcccgggctggcggctccggcccaggccgcgcacctgctgctgcggctcccccgccgccgcgccggagctccgcgatgtgcccgcgcctcccgggcagagggtccgtgccgcgggacgcacggggcctgcctcaacttcattctggaagaattgcctaacggacaaataggtggcaggaagcactgagaggacagttaagcttatcatcaggactgcccttacctataaagctgaaaacccccaagccttgaaggaaaatgttaaacaccagctgccagtcttttggttgtacaacaagaaggcctggacaacgagaactctttctggatcagttccattgatgttttgtccctgaagtcgggaagtaccttgccactaaaggtctgcctttcaaggttcttttgatattgaaggatgcccctcggttatctagaaccccatgagttcaacactgaaggcatcaaagtggtctacttgcccccaaacacatctctaatccagcctctagataagggggtcataaggacctttaatgcccattatatatggtactctttggaaaagattgtcaatgctatgaaagagaaccctgatagaacatcaagaaagtctggaaggattacactgttgaagatgccacattgttacaggaaaagctattaaagtcatcaatctcaaaacaacaagtttctgctggagaaaactgtgttcagatgttgtgcataacttcacaggatttacagcagagtcaatcaagaaaatcatgaaagagattgagcatatggcaaaaa

SEQ ID NO: 5439 - protein, 74 aa, Homo sapiens
MSPLPGSRPLQVSPVPEISTASSRAGGSGPGRAPAAAAPPPPRRSSAMCPRLPGRGSVPRDARGLPQLHSGRIA

SEQ ID NO: 5440 - DNA, 1348 bp, Homo sapiens
gcggggccggggcggggccgagcgcggcgcagcggagcggggcagagcatcctgcgccccggcgcggggccctgcggtagcctcaggcccctcccctggacccgccgcagagccagtgcagaatacagaaactgcagccatgaccacgcacgtcaccctggaagatgccctgtccaacgtggacctgcttgaagagcttcccctccccgaccagcagccatgcatcgagcctccaccttcctccatcatgtaccaggctaactttgacacaaactttgaggacaggaatgcatttgtcacgggcattgcaaggtacattgagcaggctacagtccactccagcatgaatgagatgctggaggaaggacatgagtatgcggtcatgctgtacacctggcgcagctgttcccgggccattcccaggtgaaatgcaacgagcagcccaaccgagtagagatctatgagaagacagtagaggtgctggagccggaggtcaccaagctcatgaagttcatgtattttcagcgcaaggccatcgagcggttctgcagcgaggtgaagcggctgtgccatgccgagcgcaggaaggactttgtctctgaggcctacctcctgacccttggcaagttcatcaacatgtttgctgtcctggatgagctaaagaacatgaagtgcagcgtcaagaatgaccactctgcctacaagagggcagcacagttcctgcggaagatggcagatccccagtctatccaggagtcgcagaacctttccatgttcctggccaaccacaacaggatcacccagtgtctccaccagcaacttgaagtgatcccaggctatgaggagctgctggctgacattgtcaacatctgtgtggattactacgagaacaagatgtacctgactcccagtgagaaacatatgctcctcaaggtaaaactcccctgaggccgcacccatggagcctgggcttaccctctcaccttcttcttattaaaaatccgttttaaaaaacaatgtttcttttttcttaaacattgatacagatcttacggcacataatggtttgtaacctgttcctttcctgtaatataatataccgtagtcacctttccagatgtcattaaggctatttctacaatgttatgtgtaatgactgccaagtattctgttgtattggaacattgtcatgtaacatatcccctgtggttggatatttgtttgctaaacttcattgaacacccttgtagcagtttttgtgcacatctttttgtcaaggcaaacttcctagaagagaaattgctggctcaaagggaaaaacagaataaatctttttttttatttcaat

SEQ ID NO: 5441 - protein, 147 aa, Homo sapiens
MKFMYFQRKAIERFCSEVKRLCHAERRKDFVSEAYLLTLGKFINMFAVLDELKNMKCSVKNDHSAYKRAAQFLRKMADPQSIQESQNLSMFLANHNRITQCLHQQLEVIPGYEELLADIVNICVDYYENKMYLTPSEKHMLLKVKLP

SEQ ID NO: 5442 - DNA, 6498 bp, Homo sapiens
gcggggccggggcggggccgagcgcggcgcagcggagcggggcagagcatcctgcgccccggcgcggggccctgcggtagcctcaggcccctcccctggacccgccgcagagccagtgcagaatacagaaactgcagccatgaccacgcacgtcaccctggaagatgccctgtccaacgtggacctgcttgaagagcttcccctccccgaccagcagccatgcatcgagcctccaccttcctccatcatgtaccaggctaactttgacacaaactttgaggacaggaatgcatttgtcacgggcattgcaaggtacattgagcaggctacagtccactccagcatgaatgagatgctggaggaaggacatgagtatgcggtcatgctgtacacctggcgcagctgttcccgggccattcccaggtgaaatgcaacgagcagcccaaccgagtagagatctatgagaagacagtagaggtgctggagccggaggtcaccaagctcatgaagttcatgtattttcagcgcaaggccatcgagcggttctgcagcgaggtgaagcggctgtgccatgccgagcgcaggaaggactttgtctctgaggcctacctcctgacccttggcaagttcatcaacatgtttgctgtcctggatgagctaaagaacatgaagtgcagcgtcaagaatgaccactctgcctacaagagggcagcacagttcctgcggaagatggcagatccccagtctatccaggagtcgcagaacctttccatgttcctggccaaccacaacaggatcacccagtgtctccaccagcaacttgaagtgatcccaggctatgaggagctgctggctgacattgtcaacatctgtgtggattactacgagaacaagatgtacctgactcccagtgagaaacatatgctcctcaaggtgatgggctttggcctctacctaatggatggaaatgtcagtaacatttacaaactggatgccaagaagagaattaatcttagcaaaattgataaattctttaagcagctgcaggtggtgccccttttcggcgacatgcagatagagctggccagatacattaagaccagtgctcactatgaagagaacaagtccaagtggacgtgcacccagagcagcatcagcccccagtacaatatctgcgagcagatggttcagatccgggatgaccacatccgcttcatctccgagctcgctcgctacagcaacagtgaggtggtgacgggctcagggctggacagccagaagtcagacgaggagtatcgcgagctcttcgacctagccctgcggggtctgcagcttctatccaagtggagcgcccacgtcatggaggtgtactcttggaagctggttcatcccacagacaagttctgcaacaaggactgtcctggcaccgcggaggaatatgagagagccacacgctacaattacaccagtgaggaaaaatttgccttcgttgaggtgatcgccatgatcaaaggcctgcaggtgctcatgggcaggatggagagcgtcttcaaccaggccatcaggaacaccatctacgcggcattgcaggacttcgcccaggtgacgctgcgtgagcccctgcggcaggcggtacggaagaagaagaatgtcctcatcagcgtcctacaggcaattcgaaagaccatctgtgactgggagggagggcgagagccccctaatgacccatgcttgagaggggagaaggaccccaaaggtggatttgatatcaaggtgccccggcgtgctgtggggccatccagcacacagctgtacatggtgcggaccatgcttgaatcactcattgcagacaaaagcggctccaagaagaccctgaggagcagcctggatggacccattgtcctcgccatagaggactttcacaaacagtccttcttcttcacacatctgctcaacatcagtgaagccctgcagcagtgttgtgacctctcccagctctggttccgagaattcttcctggagttaaccatgggccgacgaatccagttccccatcgagatgtccatgccctggattctaacggaccatatcctggaaaccaaagaaccttccatgatggagtatgtcctctaccctctggatctgtacaacgacagcgcctactatgctctgaccaagtttaaaaagcagttcctgtacgatgagatagaagctgaggtgaacctgtgttttgatcagtttgtctacaagctggcagaccagatctttgcttactacaaagccatggctggcagtgtcctgttggataaacgttttcgagctgagtgtaagaattatggcgtcatcattccgtatccaccgtccaatcgctatgaaacactgctgaagcagagacacgtccagctgttgggtagatcaattgacttgaacagactcattacccagcgcatctctgccgccatgtataaatccttggaccaagctatcagccgctttgagagtgaggacctgacctccattgtggagctggagtggctgctggagattaaccggctcacgcatcggctgctctgtaagcatatgacgctggacagcttcgatgccatgttccgagaggccaatcacaatgtgtccgccccctatggccgtatcaccctgcatgtcttctgggaactgaactttgactttctccccaactactgctacaatgggtccactaaccgttttgtgcggactgccattcctttcacccaagaaccacaacgagacaaacctgccaacgtccagccttattacctctatggatccaagcctctcaacattgcctacagccacatctacagctcctacaggaatttcgtggggccacctcatttcaagactatctgcagactcctgggttatcagggcatcgctgtggtcatggaggaactgctaaagattgtgaagagcttgctccaaggaaccattctccagtatgtgaaaacactgatagaggtgatgcccaagatatgccgcttgccccgacatgagtatggctccccagggatcctggagttcttccaccaccagctgaaggacatcattgagtacgcagagctcaaaacagacgtgttccagagcctgagggaagtgggcaatgccatcctcttctgcctcctcatagagcaagctctgtctcaggaggaggtctgcgatttgctccatgccgcacccttccaaaacatcttgcctagagtctacatcaaagagggggagcgcctggaggtccggatgaaacgtctggaagccaagtatgccccgctccacctggtccctctgatcgagcggctggggacccctcagcaaatcgccattgctcgcgagggtgacctcctgaccaaggagcggctgtgctgtggcctgtccatgttcgaggtcatcctgacccgcattcggagctacctgcaggaccccatctggcggggcccaccgcccaccaatggcgtcatgcacgtcgatgagtgtgtggagttccaccggctgtggagcgccatgcagttcgtgtactgcatccctgtgggaaccaacgagttcacagctgagcagtgtttcggcgatggcttgaactgggctggttgctccatcattgtcctgctgggccagcagcgtcgctttgacctgttcgacttctgttaccacctgctaaaagtgcagaggcaggacgggaaggatgaaatcattaagaatgtgcccctgaagaagatggccgaccggatcaggaagtatcagatcttgaacaatgaggtttttgccatcctgaacaaatacatgaagtccgtggagacagacagttccactgtggagcatgtgcgctgcttccagccacccatccaccagtccttggccaccacttgctaagcagaagatcctgcagacccttatctggaggaggaagagaagcaggagagagaaagccacagccagcctgccataggatccaactggacaacgtgtgggatggacctggaaacaagcacctccccaaacacatcaccactccctagggcggggcctgtgcatgctctcccatgacatctccatgctggtttctccatagcataaatgaaaaaaaaaaaaaaaaagtaaacagggcagtgtgtgctttttcttttctcccccctcaactatattaagaactcctagtttcaccctttctccatcccatcatcccacctatctgtggttgcttcccaagacctcctcccaagatagacatctcctacccagtgcccttgtgtgaccccaggactcaagtctcagactgtgaacagatgtggccatgcccagagacgccagcctggccagaagggcatgcctcagcttactacttcatctctcctggttccctccctgcagtgccccgggtgtcatcttctcccactctgggtaccagggattctaccacataggcttcccaaagccccattctaactcccctctctcagggaagccctagagagaggtccaaaaagcattcacagctgtatcacactctatgcaggtggggtaggagactgatcaggcctgctgtggggaagcagtatgtatgaacacagccagaaatgtcatagtccaaacaggatgctttcaggccatctcagctgcttgatggtgagatggttcccttattccttcaggaaaggcttagcattgggccacataggggaagcagctttgaacaaatcagtcatagcactgcctatagcattagccagtgaccaaattagggacaacgtcttggcacagaattgcttatcaaggaacatttccacaagaaagaaaatattaaggggttatttccacagaagcccaaaacgtcttggaaacacagaggtgaggaggaggaatagtaattgtcaatgagcttttaataccaagatacaccccctgcccccaaagaagagtcctcttttagggaatcagaaccttcattgtcctagaagctgaaagattcttggaacattttagcttttactctcaacttgctgttctctttacattccttaagttagactttcgggtgtggcttctctcccaggggtaacatttacttccattttctagactgaaccaaaagtcttctgcagaatctcccaccgagtgtggtaagaaggaaggacaaaaggctttaggatataaatttcatgttacagagcatgtcattgtcaaaggaaatctgtggccctgagattttaagaacataaaatgtgacatttgatatttctccagcccagggaagtaagatggttagcaatggttgccttaatcaaatggtcccatttttaaccccaaaggaagtgcccacagcaagaggtttgtgtgatgcacttatgtcctccggtgaggaaagggggccacatatgaaaggccccttaggtcagatcctgagagtagcacatttgagtgcagattcctgggccccacctcaaacctactaattctgaatctctgggaatagggccaggaaatctgccctttctacaaactacccaagttgttctgttgcacatcaatgtttgggaaccactgctgtaagggaatcattctggtcaccttgagctttgagctaccactaagccatgaaagaaaatacatcatacagggaagagagaagggaggaggttccaagtagtaactggcagatcctcctgtctggaggtaccaccttctattctggtttctgacttttccttcttgatgaccatagatgtgttccagaggcaaaagagacacattatcccagatggcagaacatgctttcaaaacatataaaatgtcaaagttccagatccttctacatctttagtcctgtctgaggatggtagctggctctctgtagctgatagatggctagagttccatccaaatccttgaccacgacttcatggagatttgaataatctatttgatgagatttctatttcaataacccacctctctcaccccacattcatatccctaaatttgaccctctgggccgagtcacattaccttcaggagacttgatcccagtagactgaggtcttccctttcagcagaaagatttcatttccctggcttgccagtggcactgatttccgaacacccaatgagtttaatattctttcctccttggcattactgccccagcctctttttattttttttgtgtgtgtctaataaccaggaaaaaaataaagcttaggttttaaaaagttttaaaaataatctgtttcagaaactgtcaaatgtaccatatttgtattaagagttgttgggaatttttgtacaatgaatttacatttatttatggtgacatatttacgcttgtgatcaaataatgatgttaaattcttaaatcatatttgctatgcagctgaagatgatattttgatttgtattttgggggtacctgtgttgagttgataaacatttccatcttcattaaaactgcttccaaactagtaaaaccagcaa

SEQ ID NO: 5443 - protein, 1131 aa, Homo sapiens
MKFMYFQRKAIERFCSEVKRLCHAERRKDFVSEAYLLTLGKFINMFAVLDELKNMKCSVKNDHSAYKRAAQFLRKMADPQSIQESQNLSMFLANHNRITQCLHQQLEVIPGYEELLADIVNICVDYYENKMYLTPSEKHMLLKVMGFGLYLMDGNVSNIYKLDAKKRINLSKIDKFFKQLQVVPLFGDMQIELARYIKTSAHYEENKSKWTCTQSSISPQYNICEQMVQIRDDHIRFISELARYSNSEVVTGSGLDSQKSDEEYRELFDLALRGLQLLSKWSAHVMEVYSWKLVHPTDKFCNKDCPGTAEEYERATRYNYTSEEKFAFVEVIAMIKGLQVLMGRMESVFNQAIRNTIYAALQDFAQVTLREPLRQAVRKKKNVLISVLQAIRKTICDWEGGREPPNDPCLRGEKDPKGGFDIKVPRRAVGPSSTQLYMVRTMLESLIADKSGSKKTLRSSLDGPIVLAIEDFHKQSFFFTHLLNISEALQQCCDLSQLWFREFFLELTMGRRIQFPIEMSMPWILTDHILETKEPSMMEYVLYPLDLYNDSAYYALTKFKKQFLYDEIEAEVNLCFDQFVYKLADQIFAYYKAMAGSVLLDKRFRAECKNYGVIIPYPPSNRYETLLKQRHVQLLGRSIDLNRLITQRISAAMYKSLDQAISRFESEDLTSIVELEWLLEINRLTHRLLCKHMTLDSFDAMFREANHNVSAPYGRITLHVFWELNFDFLPNYCYNGSTNRFVRTAIPFTQEPQRDKPANVQPYYLYGSKPLNIAYSHIYSSYRNFVGPPHFKTICRLLGYQGIAVVMEELLKIVKSLLQGTILQYVKTLIEVMPKICRLPRHEYGSPGILEFFHHQLKDIIEYAELKTDVFQSLREVGNAILFCLLIEQALSQEEVCDLLHAAPFQNILPRVYIKEGERLEVRMKRLEAKYAPLHLVPLIERLGTPQQIAIAREGDLLTKERLCCGLSMFEVILTRIRSYLQDPIWRGPPPTNGVMHVDECVEFHRLWSAMQFVYCIPVGTNEFTAEQCFGDGLNWAGCSIIVLLGQQRRFDLFDFCYHLLKVQRQDGKDEIIKNVPLKKMADRIRKYQILNNEVFAILNKYMKSVETDSSTVEHVRCFQPPIHQSLATTC

SEQ ID NO: 5444 - DNA, 6882 bp, Homo sapiens
gccggggcggggccgagcgcggcgcagcggagcggggcagagcatcctgcgccccggcgcggggccctgcggtagcctcaggcccctcccctggacccgccgcagagccaggtaagcggccctcgcaggcctcgggccgggcacggggactaggatgccgccggggacggggatgaggccgtgaggatgcgcgaagggccgccccctctcccggcccgcggggggcgctcggcgctgtgcccgggctagcccgaggcccggcctcaggccccacgcggcccctttccccctcggacccaccgtgcgtcccgcggcacggaccctctgcccgggaggcgcgggcacatcgcggagctccggcgcggcggcgggggagccgcagcagcaggtgcgcggcctgggccggagccgccagcccgggaggaggcggtgctaatctcagggaccggagacacctgcagcggccgcgagcccggcagcggcgacatcctcgagtccagtgcagaatacagaaactgcagccatgaccacgcacgtcaccctggaagatgccctgtccaacgtggacctgcttgaagagcttcccctccccgaccagcagccatgcatcgagcctccaccttcctccatcatgtaccaggctaactttgacacaaactttgaggacaggaatgcatttgtcacgggcattgcaaggtacattgagcaggctacagtccactccagcatgaatgagatgctggaggaaggacatgagtatgcggtcatgctgtacacctggcgcagctgttcccgggccattcccaggtgaaatgcaacgagcagcccaaccgagtagagatctatgagaagacagtagaggtgctggagccggaggtcaccaagctcatgaagttcatgtattttcagcgcaaggccatcgagcggttctgcagcgaggtgaagcggctgtgccatgccgagcgcaggaaggactttgtctctgaggcctacctcctgacccttggcaagttcatcaacatgtttgctgtcctggatgagctaaagaacatgaagtgcagcgtcaagaatgaccactctgcctacaagagggcagcacagttcctgcggaagatggcagatccccagtctatccaggagtcgcagaacctttccatgttcctggccaaccacaacaggatcacccagtgtctccaccagcaacttgaagtgatcccaggctatgaggagctgctggctgacattgtcaacatctgtgtggattactacgagaacaagatgtacctgactcccagtgagaaacatatgctcctcaaggtgatgggctttggcctctacctaatggatggaaatgtcagtaacatttacaaactggatgccaagaagagaattaatcttagcaaaattgataaattctttaagcagctgcaggtggtgccccttttcggcgacatgcagatagagctggccagatacattaagaccagtgctcactatgaagagaacaagtccaagtggacgtgcacccagagcagcatcagcccccagtacaatatctgcgagcagatggttcagatccgggatgaccacatccgcttcatctccgagctcgctcgctacagcaacagtgaggtggtgacgggctcagggctggacagccagaagtcagacgaggagtatcgcgagctcttcgacctagccctgcggggtctgcagcttctatccaagtggagcgcccacgtcatggaggtgtactcttggaagctggttcatcccacagacaagttctgcaacaaggactgtcctggcaccgcggaggaatatgagagagccacacgctacaattacaccagtgaggaaaaatttgccttcgttgaggtgatcgccatgatcaaaggcctgcaggtgctcatgggcaggatggagagcgtcttcaaccaggccatcaggaacaccatctacgcggcattgcaggacttcgcccaggtgacgctgcgtgagcccctgcggcaggcggtacggaagaagaagaatgtcctcatcagcgtcctacaggcaattcgaaagaccatctgtgactgggagggagggcgagagccccctaatgacccatgcttgagaggggagaaggaccccaaaggtggatttgatatcaaggtgccccggcgtgctgtggggccatccagcacacagctgtacatggtgcggaccatgcttgaatcactcattgcagacaaaagcggctccaagaagaccctgaggagcagcctggatggacccattgtcctcgccatagaggactttcacaaacagtccttcttcttcacacatctgctcaacatcagtgaagccctgcagcagtgttgtgacctctcccagctctggttccgagaattcttcctggagttaaccatgggccgacgaatccagttccccatcgagatgtccatgccctggattctaacggaccatatcctggaaaccaaagaaccttccatgatggagtatgtcctctaccctctggatctgtacaacgacagcgcctactatgctctgaccaagtttaaaaagcagttcctgtacgatgagatagaagctgaggtgaacctgtgttttgatcagtttgtctacaagctggcagaccagatctttgcttactacaaagccatggctggcagtgtcctgttggataaacgttttcgagctgagtgtaagaattatggcgtcatcattccgtatccaccgtccaatcgctatgaaacactgctgaagcagagacacgtccagctgttgggtagatcaattgacttgaacagactcattacccagcgcatctctgccgccatgtataaatccttggaccaagctatcagccgctttgagagtgaggacctgacctccattgtggagctggagtggctgctggagattaaccggctcacgcatcggctgctctgtaagcatatgacgctggacagcttcgatgccatgttccgagaggccaatcacaatgtgtccgccccctatggccgtatcaccctgcatgtcttctgggaactgaactttgactttctccccaactactgctacaatgggtccactaaccgttttgtgcggactgccattcctttcacccaagaaccacaacgagacaaacctgccaacgtccagccttattacctctatggatccaagcctctcaacattgcctacagccacatctacagctcctacaggaatttcgtggggccacctcatttcaagactatctgcagactcctgggttatcagggcatcgctgtggtcatggaggaactgctaaagattgtgaagagcttgctccaaggaaccattctccagtatgtgaaaacactgatagaggtgatgcccaagatatgccgcttgccccgacatgagtatggctccccagggatcctggagttcttccaccaccagctgaaggacatcattgagtacgcagagctcaaaacagacgtgttccagagcctgagggaagtgggcaatgccatcctcttctgcctcctcatagagcaagctctgtctcaggaggaggtctgcgatttgctccatgccgcacccttccaaaacatcttgcctagagtctacatcaaagagggggagcgcctggaggtccggatgaaacgtctggaagccaagtatgccccgctccacctggtccctctgatcgagcggctggggacccctcagcaaatcgccattgctcgcgagggtgacctcctgaccaaggagcggctgtgctgtggcctgtccatgttcgaggtcatcctgacccgcattcggagctacctgcaggaccccatctggcggggcccaccgcccaccaatggcgtcatgcacgtcgatgagtgtgtggagttccaccggctgtggagcgccatgcagttcgtgtactgcatccctgtgggaaccaacgagttcacagctgagcagtgtttcggcgatggcttgaactgggctggttgctccatcattgtcctgctgggccagcagcgtcgctttgacctgttcgacttctgttaccacctgctaaaagtgcagaggcaggacgggaaggatgaaatcattaagaatgtgcccctgaagaagatggccgaccggatcaggaagtatcagatcttgaacaatgaggtttttgccatcctgaacaaatacatgaagtccgtggagacagacagttccactgtggagcatgtgcgctgcttccagccacccatccaccagtccttggccaccacttgctaagcagaagatcctgcagacccttatctggaggaggaagagaagcaggagagagaaagccacagccagcctgccataggatccaactggacaacgtgtgggatggacctggaaacaagcacctccccaaacacatcaccactccctagggcggggcctgtgcatgctctcccatgacatctccatgctggtttctccatagcataaatgaaaaaaaaaaaaaaaaagtaaacagggcagtgtgtgctttttcttttctcccccctcaactatattaagaactcctagtttcaccctttctccatcccatcatcccacctatctgtggttgcttcccaagacctcctcccaagatagacatctcctacccagtgcccttgtgtgaccccaggactcaagtctcagactgtgaacagatgtggccatgcccagagacgccagcctggccagaagggcatgcctcagcttactacttcatctctcctggttccctccctgcagtgccccgggtgtcatcttctcccactctgggtaccagggattctaccacataggcttcccaaagccccattctaactcccctctctcagggaagccctagagagaggtccaaaaagcattcacagctgtatcacactctatgcaggtggggtaggagactgatcaggcctgctgtggggaagcagtatgtatgaacacagccagaaatgtcatagtccaaacaggatgctttcaggccatctcagctgcttgatggtgagatggttcccttattccttcaggaaaggcttagcattgggccacataggggaagcagctttgaacaaatcagtcatagcactgcctatagcattagccagtgaccaaattagggacaacgtcttggcacagaattgcttatcaaggaacatttccacaagaaagaaaatattaaggggttatttccacagaagcccaaaacgtcttggaaacacagaggtgaggaggaggaatagtaattgtcaatgagcttttaataccaagatacaccccctgcccccaaagaagagtcctcttttagggaatcagaaccttcattgtcctagaagctgaaagattcttggaacattttagcttttactctcaacttgctgttctctttacattccttaagttagactttcgggtgtggcttctctcccaggggtaacatttacttccattttctagactgaaccaaaagtcttctgcagaatctcccaccgagtgtggtaagaaggaaggacaaaaggctttaggatataaatttcatgttacagagcatgtcattgtcaaaggaaatctgtggccctgagattttaagaacataaaatgtgacatttgatatttctccagcccagggaagtaagatggttagcaatggttgccttaatcaaatggtcccatttttaaccccaaaggaagtgcccacagcaagaggtttgtgtgatgcacttatgtcctccggtgaggaaagggggccacatatgaaaggccccttaggtcagatcctgagagtagcacatttgagtgcagattcctgggccccacctcaaacctactaattctgaatctctgggaatagggccaggaaatctgccctttctacaaactacccaagttgttctgttgcacatcaatgtttgggaaccactgctgtaagggaatcattctggtcaccttgagctttgagctaccactaagccatgaaagaaaatacatcatacagggaagagagaagggaggaggttccaagtagtaactggcagatcctcctgtctggaggtaccaccttctattctggtttctgacttttccttcttgatgaccatagatgtgttccagaggcaaaagagacacattatcccagatggcagaacatgctttcaaaacatataaaatgtcaaagttccagatccttctacatctttagtcctgtctgaggatggtagctggctctctgtagctgatagatggctagagttccatccaaatccttgaccacgacttcatggagatttgaataatctatttgatgagatttctatttcaataacccacctctctcaccccacattcatatccctaaatttgaccctctgggccgagtcacattaccttcaggagacttgatcccagtagactgaggtcttccctttcagcagaaagatttcatttccctggcttgccagtggcactgatttccgaacacccaatgagtttaatattctttcctccttggcattactgccccagcctctttttattttttttgtgtgtgtctaataaccaggaaaaaaataaagcttaggttttaaaaagttttaaaaataatctgtttcagaaactgtcaaatgtaccatatttgtattaagagttgttgggaatttttgtacaatgaatttacatttatttatggtgacatatttacgcttgtgatcaaataatgatgttaaattcttaaatcatatttgctatgcagctgaagatgatattttgatttgtattttgggggtacctgtgttgagttgataaacatttccatcttcattaaaactgcttccaaactagtaaaaccagcaa

SEQ ID NO: 5445 - protein, 1131 aa, Homo sapiens; identical to SEQ ID NO: 5443

SEQ ID NO: 5446 - DNA, 769 bp, Homo sapiens
agcctcaggcccctcccctggacccgccgcagagccaggtaagcggccctcgcaggcctcgggccgggcacggggactaggatgccgccggggacggggatgaggccgtgaggatgcggtctcagagtggccctggcttctcccaccacagtgtgcttccatgttgccagggcactgttggaaaagaggcacagtcacattcatatttccgcaatcccagcccaaaggccccccaaagccagcttcaaccgcagagtgtctgtgctgtcagagtgggtaggctggttttggaggttgcccaccttgctttttctgtgctcagattccatccctttgtagtcctagagaggctgtgttcccgcccctctcatattactggtaagtattatggaccaggtatctggaaaggcctacagttggatcctagatgaggctggcaccaaagaggaggaggaaggactgttccattaggcctgaagctcccacagtgttggacttagcaggctttcttgctgaggcggctgggataccatttggtgtcacccaggggagttggccacgtgggctgagcaccaggagcagctaatgcctgttccacccaggcgcctgaggctgggaccctctccgaccccataattttctacccaggtggacgtgcacccagagcagcatcagcccccagtacaatatctgcgagcagatggttcagatccgggatgaccacatccgcttcatctccgagctcgctcgctacagcaacagtgaggtg

SEQ ID NO: 5447 - protein, 105 aa, Homo sapiens [sequence omitted]

SEQ ID NO: 5448 - DNA, 4252 bp, Homo sapiens
gtagagttaaggaagggcctcttcctctgtgagaattcagcattttgcaaccatccaaaaatgttgagggcatgctttgcttccagggcagacagagcagcacagtgagcatgggacacaggatccctgacttgctgtgtgcccttaaaccagccactacctctctgacgttcaaaattgagcaatggaaggcagcctgcccaactgttacctgcctgtcatcatgaaagcctgcggatgagtgcagaatacagaaactgcagccatgaccacgcacgtcaccctggaagatgccctgtccaacgtggacctgcttgaagagcttcccctccccgaccagcagccatgcatcgagcctccaccttcctccatcatgtaccaggctaactttgacacaaactttgaggacaggaatgcatttgtcacgggcattgcaaggtacattgagcaggctacagtccactccagcatgaatgagatgctggaggaaggacatgagtatgcggtcatgctgtacacctggcgcagctgttcccgggccattcccaggtgaaatgcaacgagcagcccaaccgagtagagatctatgagaagacagtagaggtgctggagccggaggtcaccaagctcatgaagttcatgtattttcagcgcaaggccatcgagcggttctgcagcgaggtgaagcggctgtgccatgccgagcgcaggaaggactttgtctctgaggcctacctcctgacccttggcaagttcatcaacatgtttgctgtcctggatgagctaaagaacatgaagtgcagcgtcaagaatgaccactctgcctacaagagggcagcacagttcctgcggaagatggcagatccccagtctatccaggagtcgcagaacctttccatgttcctggccaaccacaacaggatcacccagtgtctccaccagcaacttgaagtgatcccaggctatgaggagctgctggctgacattgtcaacatctgtgtggattactacgagaacaagatgtacctgactcccagtgagaaacatatgctcctcaaggtgatgggctttggcctctacctaatggatggaaatgtcagtaacatttacaaactggatgccaagaagagaattaatcttagcaaaattgataaattctttaagcagctgcaggtggtgccccttttcggcgacatgcagatagagctggccagatacattaagaccagtgctcactatgaagagaacaagtccaagtggacgtgcacccagagcagcatcagcccccagtacaatatctgcgagcagatggttcagatccgggatgaccacatccgcttcatctccgagctcgctcgctacagcaacagtgaggtggtgacgggctcagggctggacagccagaagtcagacgaggagtatcgcgagctcttcgacctagccctgcggggtctgcagcttctatccaagtggagcgcccacgtcatggaggtgtactcttggaagctggttcatcccacagacaagttctgcaacaaggactgtcctggcaccgcggaggaatatgagagagccacacgctacaattacaccagtgaggaaaaatttgccttcgttgaggtgatcgccatgatcaaaggcctgcaggtgctcatgggcaggatggagagcgtcttcaaccaggccatcaggaacaccatctacgcggcattgcaggacttcgcccaggtgacgctgcgtgagcccctgcggcaggcggtacggaagaagaagaatgtcctcatcagcgtcctacaggcaattcgaaagaccatctgtgactgggagggagggcgagagccccctaatgacccatgcttgagaggggagaaggaccccaaaggtggatttgatatcaaggtgccccggcgtgctgtggggccatccagcacacagctgtacatggtgcggaccatgcttgaatcactcattgcagacaaaagcggctccaagaagaccctgaggagcagcctggatggacccattgtcctcgccatagaggactttcacaaacagtccttcttcttcacacatctgctcaacatcagtgaagccctgcagcagtgttgtgacctctcccagctctggttccgagaattcttcctggagttaaccatgggccgacgaatccagttccccatcgagatgtccatgccctggattctaacggaccatatcctggaaaccaaagaaccttccatgatggagtatgtcctctaccctctggatctgtacaacgacagcgcctactatgctctgaccaagtttaaaaagcagttcctgtacgatgagatagaagctgaggtgaacctgtgttttgatcagtttgtctacaagctggcagaccagatctttgcttactacaaagccatggctggcagtgtcctgttggataaacgttttcgagctgagtgtaagaattatggcgtcatcattccgtatccaccgtccaatcgctatgaaacactgctgaagcagagacacgtccagctgttgggtagatcaattgacttgaacagactcattacccagcgcatctctgccgccatgtataaatccttggaccaagctatcagccgctttgagagtgaggacctgacctccattgtggagctggagtggctgctggagattaaccggctcacgcatcggctgctctgtaagcatatgacgctggacagcttcgatgccatgttccgagaggccaatcacaatgtgtccgccccctatggccgtatcaccctgcatgtcttctgggaactgaactttgactttctccccaactactgctacaatgggtccactaaccgttttgtgcggactgccattcctttcacccaagaaccacaacgagacaaacctgccaacgtccagccttattacctctatggatccaagcctctcaacattgcctacagccacatctacagctcctacaggaatttcgtggggccacctcatttcaagactatctgcagactcctgggttatcagggcatcgctgtggtcatggaggaactgctaaagattgtgaagagcttgctccaaggaaccattctccagtatgtgaaaacactgatagaggtgatgcccaagatatgccgcttgccccgacatgagtatggctccccagggatcctggagttcttccaccaccagctgaaggacatcattgagtacgcagagctcaaaacagacgtgttccagagcctgagggaagtgggcaatgccatcctcttctgcctcctcatagagcaagctctgtctcaggaggaggtctgcgatttgctccatgccgcacccttccaaaacatcttgcctagagtctacatcaaagagggggagcgcctggaggtccggatgaaacgtctggaagccaagtatgccccgctccacctggtccctctgatcgagcggctggggacccctcagcaaatcgccattgctcgcgagggtgacctcctgaccaaggagcggctgtgctgtggcctgtccatgttcgaggtcatcctgacccgcattcggagctacctgcaggaccccatctggcggggcccaccgcccaccaatggcgtcatgcacgtcgatgagtgtgtggagttccaccggctgtggagcgccatgcagttcgtgtactgcatccctgtgggaaccaacgagttcacagctgagcagtgtttcggcgatggcttgaactgggctggttgctccatcattgtcctgctgggccagcagcgtcgctttgacctgttcgacttctgttaccacctgctaaaagtgcagaggcaggacgggaaggatgaaatcattaagaatgtgcccctgaagaagatggccgaccggatcaggaagtatcagatcttgaacaatgaggtttttgccatcctgaacaaatacatgaagtccgtggagacagacagttccactgtggagcatgtgcgctgcttccagccacccatccaccagtccttggccaccacttgctaagcagaagatcctgcagacccttatctggaggaggaagagaagcaggagagagaaagccacagccagcctgccataggatccaactggacaacgtgtgggatggacctggaaacaagcacctccccaaacacatcaccactccctagggcggggcctgtgcatgctctcccatgacatctccatgctggtttctccatagcataaatgaaaaaaaaaaaaaaaaagt

SEQ ID NO: 5449 - protein, 1131 aa, Homo sapiens; identical to SEQ ID NO: 5443

SEQ ID NO: 5450 - DNA, 6497 bp, Homo sapiens
gtagagttaaggaagggcctcttcctctgtgagaattcagcattttgcaaccatccaaaaatgttgagggcatgctttgcttccagggcagacagagcagcacagtgagcatgggacacaggatccctgacttgctgtgtgcccttaaaccagccactacctctctgacgttcaaaattgagcaatggaaggcagcctgcccaactgttacctgcctgtcatcatgaaagcctgcggatgagtgcagaatacagaaactgcagccatgaccacgcacgtcaccctggaagatgccctgtccaacgtggacctgcttgaagagcttcccctccccgaccagcagccatgcatcgagcctccaccttcctccatcatgtaccaggctaactttgacacaaactttgaggacaggaatgcatttgtcacgggcattgcaaggtacattgagcaggctacagtccactccagcatgaatgagatgctggaggaaggacatgagtatgcggtcatgctgtacacctggcgcagctgttcccgggccattcccaggtgaaatgcaacgagcagcccaaccgagtagagatctatgagaagacagtagaggtgctggagccggaggtcaccaagctcatgaagttcatgtattttcagcgcaaggccatcgagcggttctgcagcgaggtgaagcggctgtgccatgccgagcgcaggaaggactttgtctctgaggcctacctcctgacccttggcaagttcatcaacatgtttgctgtcctggatgagctaaagaacatgaagtgcagcgtcaagaatgaccactctgcctacaagagggcagcacagttcctgcggaagatggcagatccccagtctatccaggagtcgcagaacctttccatgttcctggccaaccacaacaggatcacccagtgtctccaccagcaacttgaagtgatcccaggctatgaggagctgctggctgacattgtcaacatctgtgtggattactacgagaacaagatgtacctgactcccagtgagaaacatatgctcctcaaggtgatgggctttggcctctacctaatggatggaaatgtcagtaacatttacaaactggatgccaagaagagaattaatcttagcaaaattgataaattctttaagcagctgcaggtggtgccccttttcggcgacatgcagatagagctggccagatacattaagaccagtgctcactatgaagagaacaagtccaagtggacgtgcacccagagcagcatcagcccccagtacaatatctgcgagcagatggttcagatccgggatgaccacatccgcttcatctccgagctcgctcgctacagcaacagtgaggtggtgacgggctcagggctggacagccagaagtcagacgaggagtatcgcgagctcttcgacctagccctgcggggtctgcagcttctatccaagtggagcgcccacgtcatggaggtgtactcttggaagctggttcatcccacagacaagttctgcaacaaggactgtcctggcaccgcggaggaatatgagagagccacacgctacaattacaccagtgaggaaaaatttgccttcgttgaggtgatcgccatgatcaaaggcctgcaggtgctcatgggcaggatggagagcgtcttcaaccaggccatcaggaacaccatctacgcggcattgcaggacttcgcccaggtgacgctgcgtgagcccctgcggcaggcggtacggaagaagaagaatgtcctcatcagcgtcctacaggcaattcgaaagaccatctgtgactgggagggagggcgagagccccctaatgacccatgcttgagaggggagaaggaccccaaaggtggatttgatatcaaggtgccccggcgtgctgtggggccatccagcacacagctgtacatggtgcggaccatgcttgaatcactcattgcagacaaaagcggctccaagaagaccctgaggagcagcctggatggacccattgtcctcgccatagaggactttcacaaacagtccttcttcttcacacatctgctcaacatcagtgaagccctgcagcagtgttgtgacctctcccagctctggttccgagaattcttcctggagttaaccatgggccgacgaatccagttccccatcgagatgtccatgccctggattctaacggaccatatcctggaaaccaaagaaccttccatgatggagtatgtcctctaccctctggatctgtacaacgacagcgcctactatgctctgaccaagtttaaaaagcagttcctgtacgatgagatagaagctgaggtgaacctgtgttttgatcagtttgtctacaagctggcagaccagatctttgcttactacaaagccatggctggcagtgtcctgttggataaacgttttcgagctgagtgtaagaattatggcgtcatcattccgtatccaccgtccaatcgctatgaaacactgctgaagcagagacacgtccagctgttgggtagatcaattgacttgaacagactcattacccagcgcatctctgccgccatgtataaatccttggaccaagctatcagccgctttgagagtgaggacctgacctccattgtggagctggagtggctgctggagattaaccggctcacgcatcggctgctctgtaagcatatgacgctggacagcttcgatgccatgttccgagaggccaatcacaatgtgtccgccccctatggccgtatcaccctgcatgtcttctgggaactgaactttgactttctccccaactactgctacaatgggtccactaaccgttttgtgcggactgccattcctttcacccaagaaccacaacgagacaaacctgccaacgtccagccttattacctctatggatccaagcctctcaacattgcctacagccacatctacagctcctacaggaatttcgtggggccacctcatttcaagactatctgcagactcctgggttatcagggcatcgctgtggtcatggaggaactgctaaagattgtgaagagcttgctccaaggaaccattctccagtatgtgaaaacactgatagaggtgatgcccaagatatgccgcttgccccgacatgagtatggctccccagggatcctggagttcttccaccaccagctgaaggacatcattgagtacgcagagctcaaaacagacgtgttccagagcctgagggaagtgggcaatgccatcctcttctgcctcctcatagagcaagctctgtctcaggaggaggtctgcgatttgctccatgccgcacccttccaaaacatcttgcctagagtctacatcaaagagggggagcgcctggaggtccggatgaaacgtctggaagccaagtatgccccgctccacctggtccctctgatcgagcggctggggacccctcagcaaatcgccattgctcgcgagggtgacctcctgaccaaggagcggctgtgctgtggcctgtccatgttcgaggtcatcctgacccgcattcggagctacctgcaggaccccatctggcggggcccaccgcccaccaatggcgtcatgcacgtcgatgagtgtgtggagttccaccggctgtggagcgccatgcagttcgtgtactgcatccctgtgggaaccaacgagttcacagctgagcagtgtttcggcgatggcttgaactgggctggttgctccatcattgtcctgctgggccagcagcgtcgctttgacctgttcgacttctgttaccacctgctaaaagtgcagaggcaggacgggaaggatgaaatcattaagaatgtgcccctgaagaagatggccgaccggatcaggaagtatcagatcttgaacaatgaggtttttgccatcctgaacaaatacatgaagtccgtggagacagacagttccactgtggagcatgtgcgctgcttccagccacccatccaccagtccttggccaccacttgctaagcagaagatcctgcagacccttatctggaggaggaagagaagcaggagagagaaagccacagccagcctgccataggatccaactggacaacgtgtgggatggacctggaaacaagcacctccccaaacacatcaccactccctagggcggggcctgtgcatgctctcccatgacatctccatgctggtttctccatagcataaatgaaaaaaaaaaaaaaaaagtaaacagggcagtgtgtgctttttcttttctcccccctcaactatattaagaactcctagtttcaccctttctccatcccatcatcccacctatctgtggttgcttcccaagacctcctcccaagatagacatctcctacccagtgcccttgtgtgaccccaggactcaagtctcagactgtgaacagatgtggccatgcccagagacgccagcctggccagaagggcatgcctcagcttactacttcatctctcctggttccctccctgcagtgccccgggtgtcatcttctcccactctgggtaccagggattctaccacataggcttcccaaagccccattctaactcccctctctcagggaagccctagagagaggtccaaaaagcattcacagctgtatcacactctatgcaggtggggtaggagactgatcaggcctgctgtggggaagcagtatgtatgaacacagccagaaatgtcatagtccaaacaggatgctttcaggccatctcagctgcttgatggtgagatggttcccttattccttcaggaaaggcttagcattgggccacataggggaagcagctttgaacaaatcagtcatagcactgcctatagcattagccagtgaccaaattagggacaacgtcttggcacagaattgcttatcaaggaacatttccacaagaaagaaaatattaaggggttatttccacagaagcccaaaacgtcttggaaacacagaggtgaggaggaggaatagtaattgtcaatgagcttttaataccaagatacaccccctgcccccaaagaagagtcctcttttagggaatcagaaccttcattgtcctagaagctgaaagattcttggaacattttagcttttactctcaacttgctgttctctttacattccttaagttagactttcgggtgtggcttctctcccaggggtaacatttacttccattttctagactgaaccaaaagtcttctgcagaatctcccaccgagtgtggtaagaaggaaggacaaaaggctttaggatataaatttcatgttacagagcatgtcattgtcaaaggaaatctgtggccctgagattttaagaacataaaatgtgacatttgatatttctccagcccagggaagtaagatggttagcaatggttgccttaatcaaatggtcccatttttaaccccaaaggaagtgcccacagcaagaggtttgtgtgatgcacttatgtcctccggtgaggaaagggggccacatatgaaaggccccttaggtcagatcctgagagtagcacatttgctgtaagggaatcattctggtcaccttgagctttgagctaccactaagccatgaaagaaaatacatcatacagggaagagagaagggaggaggttccaagtagtaactggcagatcctcctgtctggaggtaccaccttctattctggtttctgacttttccttcttgatgaccatagatgtgttccagaggcaaaagagacacattatcccagatggcagaacatgctttcaaaacatataaaatgtcaaagttccagatccttctacatctttagtcctgtctgaggatggtagctggctctctgtagctgatagatggctagagttccatccaaatccttgaccacgacttcatggagatttgaataatctatttgatgagatttctatttcaataacccacctctctcaccccacattcatatccctaaatttgaccctctgggccgagtcacattaccttcaggagacttgatcccagtagactgaggtcttccctttcagcagaaagatttcatttccctggcttgccagtggcactgatttccgaacacccaatgagtttaatattctttcctccttggcattactgccccagcctctttttattttttttgtgtgtgtctaataaccaggaaaaaaataaagcttaggttttaaaaagttttaaaaataatctgtttcagaaactgtcaaatgtaccatatttgtattaagagttgttgggaatttttgtacaatgaatttacatttatttatggtgacatatttacgcttgtgatcaaataatgatgttaaattcttaaatcatatttgctatgcagctgaagatgatattttgatttgtattttgggggtacctgtgttgagttgataaacatttccatcttcattaaaactgcttccaaactagtaaaaccagcaa

SEQ ID NO: 5451 - protein, 1131 aa, Homo sapiens; identical to SEQ ID NO: 5443

SEQ ID NO: 5452 - DNA, 377 bp, Homo sapiens
aattcagcattttgcaaccatccaaaaatgttgagggcatgctttgcttccagggcagacagagcagcacagtgagcatgggacacaggatccctgacttgctgtgtgcccttaaaccagccactacctctctgacgttcaaaattgagcaatggaaggcagcctgcccaactgttacctgcctgtcatcatgaaagcctgcggatgagtacacaaaatggacaatgttgacatgctgaacacatcagcccccacagccaaccccccaactctgctccattcctgccactcaagggaagagatgaacatgcaagcaataatatcacacagagatcttgaaccctcgcctcacatacaataaaatgtaccttgtttgc

SEQ ID NO: 5453 - protein, 51 aa, Homo sapiens
MLCFQGRQSSTVSMGHRIPDLLCALKPATTSLTFKIEQWKAACPTVTCLSS

SEQ ID NO: 5454 - DNA, 1692 bp, Homo sapiens
aatgatgctgatctgaagaaatgaataatgtgagcattaggggcggcagtgggattactcagtgttgagagaaacaacacggaaagcccagagcagaggagggagaaggccccattctctcagctttaatctactgcacctcggagggcagagctctaaccagacacgctgcaagcatcagaatcgggatgaacatcgaggtggggaacatttcttatacaggagccatcatctcctggtcgtcctcggagccctgcctggaggactattaccatattatgtacaggcccaactggaacagcatcttctctggctatcttcgctacagcttccaccacgaggagaaggtgcctcgaacgatcagctccgtggtgctggaacatcttgccccttccactctctacttcctgtgcatcagctgtaagaaggctgccttcccttacaggcactactgcaccatgttccacaccctggataagagtccgctggctcctggaagctccctggtagacccccagatctccctttgggtgctgatggccattctgctggcctgcttcacagccgtcttggccttcatctgcctccagttctggtgtgtccgttgccatgagccgcgatggtcttacagggctggccacatggaggaggccaatgggttggtgagatggccagaggaggccccggatcttggtcagagggaggaagacctgcaggggctccccctggtggaaatgccacgcaagaactccagagatggagctgaactggatcccgaagccaaccaggatgcccctgatgcgggtgccttacagagggggggtggtgacccacccgctatactgcctcattgtggggaatgagagtggggaggagagcgcccgcatcatgtagcctaaagctttccacacagtaggtcgtttgtacaaatgtgtctatagactacccatttctctcccatcaaacgtcactgctattgtaggtcacctgggttggatgaatgccccatgacaaagcttctcaagctggaaaatgtatcccccagggtatgccaaggcacaaacgaggcatctcagcagcagcgtccactcggaggacacagttaagaattgaaagcattgttttaacattaaaacaaacatggatatgttataaagtagaaagcaaaaatttgcatgacaaataaaacacagcacttgaaggaaacacttgagttacaagtaggctctcagaggtacacttttgggcaaaggtagatgtccagtttcctctgcccttgaggggattatttggaaataatttgggattatttggaaataatttgtgagaacccttgctctggagtgttttccaacttttaggcaatcacataccaccgctctctattttttaaaaccatggattatcttcactattattaataatactttcctttaaattgactcattttttaagcgtaaacttattttcaaagacagccttatattactccataagtgaaaaaccagcaccctcctgctgcaaacagaagggaagagacataagaataaacatcatgaaaacaagataatattaaataatctgacttagcttctattgcctgccagtgattctgagcttaatgcctgcttgcttgtctttgataaaaagggagatccagtgttggagaggtaataaagacatattagcacc

SEQ ID NO: 5455 - protein, 224 aa, Homo sapiens; identical to SEQ ID NO: 697

SEQ ID NO: 5456 - DNA, 1024 bp, Homo sapiens
aaccagacacgctgcaagcatcaggtaagacatatagatggctcttcttggaaatggaaatggcttcttttcacactctgcttggagaagggccgggcaaatgaatagttaaaaataggggagaatttagaaacggaaacagaggaagaaaaatcaataagggagacggacctggtcctaaaagaatcgggatgaacatcgaggtggggaacatttcttatacaggagccatcatctcctggtcgtcctcggagccctgcctggaggactattaccatattatgtacaggcccaactggaacagcatcttctctggctatcttcgctacagcttccaccacgaggagaaggtgcctcgaacgatcagctccgtggtgctggaacatcttgccccttccactctctacttcctgtgcatcagctgtaagaaggctgccttcccttacaggcactactgcaccatgttccacaccctggataagagtccgctggctcctggaagctccctggtagacccccagatctccctttgggtgctgatggccattctgctggcctgcttcacagccgtcttggccttcatctgcctccagttctggtgtgtccgttgccatgagccgcgatggtcttacagggctggccacatggaggaggccaatgggttggtgagatggccagaggaggccccggatcttggtcagagggaggaagacctgcaggggctccccctggtggaaatgccacgcaagaactccagagatggagctgaactggatcccgaagccaaccaggatgcccctgatgcgggtgccttacagagggggggtggtgacccacccgctatactgcctcattgtggggaatgagagtggggaggagagcgcccgcatcatgtagcctaaagctttccacacagtaggtcgtttgtacaaatgtgtctatagactacccatttctctcccatcaaacgtcactgctattgtaggtcacctgggttggatgaatgccccatgacaaagcttct

SEQ ID NO: 5457 - protein, 224 aa, Homo sapiens; identical to SEQ ID NO: 697

SEQ ID NO: 5458 - DNA, 583 bp, Homo sapiens
gtttcccatagaccctactgagcagtgtcaacttcccactgaccaccccgattcacctcccagggatcctggagttcttccaccaccagctgaaggacatcattgagtacgcagagctcaaaacagacgtgttccagagcctgagggaagtgggcaatgccatcctcttctgcctcctcatagagcaagctctgtctcaggaggaggtctgcgatttgctccatgccgcacccttccaaaacatcttgcctagagtctacatcaaagagggggagcgcctggaggtccggatgaaacgtctggaagccaagtatgccccgctccacctggtccctctgatcgagcggctggggacccctcaggtaccaatcttatataataaatgggctctgatcactgacaggaacttgagagcatttgaccaaaccccctcattgtacaggtcaggaaactgaggctcagagaagggaagacaatgtccaatacccaaaaactggttaatattaatagcaacagcaggtctggaatgagatttgctgactctcaggcctgagtgtttcttctgtagcctgtatcatgtatc

SEQ ID NO: 5459 - protein, 54 aa, Homo sapiens
MKRLEAKYAPLHLVPLIERLGTPQVPILYNKWALITDRNLRAFDQTPSLYRSGN

SEQ ID NO: 5460 - DNA, 2112 bp, Homo sapiens
gtttctgaaaaagaactctggttcatatgtgaagatgttatctttaatttctgtagggaatcaaacatcccatgattctagcttccttggctgttgttttaagttagttactattaccttcttgcttatcagcttgcttatttacttctcagggctagctaggtgcctggaatttcccttgaagaaactcaagattttatttccatgcttggcgggggcggtgctgcagggcccctaagagggttccctgctccatctcactcattagataattattccttggatatcataggacaggcactgttctggggcatgtagcagtgtccagccctgcctcctgtcctgtccatatttacaccgaaatcatgtgtctactgttacagcaagagctaggaggggtgactgcagggtcctgtgggaacagaagacagagaactcgatgtgttcttgaggttgaggaaggacttctctggggagatggcctggagaatgagcaggaatttgcctggtgaagctgtcccaggctgaggggagaacatgcactgttaccttcatttcttatgatgggggacagttgttttaccctgcaggatagtttcaaggccagaaagatacaccacatgtaaagctcatgcagtaagaactaaaccattggtagtgttgtcatattgaacaaagcacaccccccgtacatctccctcttaggaccccgcagaaccagcactcttcttcctgcatgaccacttgtatttgctctgcctcatggctgactcagagactgtgctctcctccttcctccccaaggcactccagtttgtctctgttctccacatggtgctcccagtcggcccagtcctacaggtgtcgaggtaacggagaaggaaacaggatgttactctgggatgcctcattctcagaacctagtgggaatctcttttagcatccagccatccatccactcattcagcaagaggcgtggcgagcctcttcattgccaggagcagttctaggttgtggataaatggtcatgaataagagacagagttttaccatttttattccagagaggggaacgagcaaagtcgtaacaatcagagtgtggttgcagatggggaggggagctgtgaaggaatacacaggataaagggagagtggctgtgtcagagagagatgtgctgtttttgaagaggctggagcttggtcttaaggaaccccgtccctaaaatgagtgacttggacctgccattctcagactctccctgagaggctctgaaatggggactgtttgcgcttcctctataaggagtaattgcttctctgttaccccttaaatggactctccagacagctaattgataagttttttacacagatcagcagacccaggttgctatagcaacgtagccctcagaagtcgtagggataaataggaacaacttctgaaggcctcaggggcaccagaacagtggaggtggggcggggtggcgggggggggtgggtccctgaagcctcagtccccgagtgtctcctgttaagcacctcttttcatgaggaactgtgactcagagaccatcaattcagcttcccctgttcagaatccagaggcagactattgatgggggccgcaaggaaaggaccacttcctcaggcaccgtctgggtggtcactcacatgtatcactgaggacaacaggacactcaatgaccttcagagctgagacctgagacagacccgctacagcatgaatctttcaaccccttctattcataagtgagaaaactgagaaccagagagaggaggaactcacctgaggtcacacagcatagcagcagcagaggtggaagaactaaagcacaggtttccaatattgatcccagtccttgggggctaggggtcggggaaggatggggaacacagagcagggattaggctcactgaagtcctcattctgctttctacttagacagctggggagatctccaagcctagacagtgctttctgagattagaatgaggcatgagctttctggagtttttttagtttaggaagctagaattaaatttttaaatgacataccaattcttctcaatgaaagaagactactaattgcc

SEQ ID NO: 5461 - protein, 67 aa, Homo sapiens
MLSLISVGNQTSHDSSFLGCCFKLVTITFLLISLLIYFSGLARCLEFPLKKLKILFPCLAGAVLQGP

SEQ ID NO: 5462 - DNA, 768 bp, Homo sapiens
atgccttcctggggtgaggacgctgccaggctcccagctctggagtcaccgccccgtgctaggggcaagagcccccaaggactgggatcaatattggaaacctgtgctttagttcttccacctctgctgctgctatgctgtgtgacctcaggactgggccgactgggagcaccatgtggagaacagagacaaactggagtgccttggggaggaaggaggagagcacagtctctgagtcagccatgaggcagagcaaatacaagtggtcatgcaggaagaagagtgctggttctgcggggtcctaagagggagatgtacggggggtgtgctttgttcaatatgacaacactaccaatggtttagttcttactgcatgagctttacatgtggtgtatctttctggccttgaaactatcctgcagggtaaaacaactgtcccccatcataagaaatgaaggtaacagtgcatgttctcccctcagcctgggacagcttcaccaggcaaattcctgctcattctccaggccatctccccagagaagtccttcctcaacctcaagaacacatcgagttctctgtcttctgttcccacaggaccctgcagtcacccctcctagctcttgctgtaacagtagacacatgatttcggtgtaaatatggacaggacaggaggcagggctggacactgctacatgccccagaacagtgcctgtcctatgatatccaaggaataattatctaatgagtgagatggagcagggaaccctc

SEQ ID NO: 5463 - protein, 81 aa, Homo sapiens
MPSWGEDAARLPALESPPRARGKSPQGLGSILETCALVLPPLLLLCCVTSGLGRLGAPCGEQRQTGVPWGGRRRAQSLSQP

SEQ ID NO: 5464 - DNA, 1991 bp, Homo sapiens
caggtacctgggtttctgtactaatattgcaccctgaattttgagaaatatttataagcacctactaacttcatgaggaaaatacctttgtccaagtgatcaactgttaaatttatatccctctacctatcaatgatatattaatctgttttttaaaaaaaggcagaaaaagacaaaaaatggaaaagtaaaatgggcaagagatttcttactttttccttcgcactttctggtatttcccagtttttctaaaactagcatatactattttaaaattataggtcaataataatacatgaatgtgctttccttgtaagaaattaagacattccagataaggctaaaaagtccctgttgacctctaatcctggattcctccctcatacctagagaaaatgtctgttaaatattggtatgcttttttttttctagatctttttcaatgcagagttatttgtggtttatatctatggcatcatgtgtgtcttgtcctaaaactttttaaagctcaatattgtatctttcactattttttatcttggtatgtgcaaaactactttatcagcttattctttttacctgcttcagagttttccatgagaatggacattccacagtttatacagcctttcctctatgatggccattaggcatctttcctttttttttttggcaattagtagtcttctttcattgagaagaattggtatgtcatttaaaaatttaattctagcttcctaaactaaaaaaactccagaaagctcatgcctcattctaatctcagaaagcactgtctaggcttggagatctccccagctgtctaagtagaaagcagaatgaggacttcagtgagcctaatccctgctctgtgttccccatccttccccgacccctagcccccaaggactgggatcaatattggaaacctgtgctttagttcttccacctctgctgctgctatgctgtgtgacctcagtgatacatgtgagtgaccacccagacggtgcctgaggaagtggtcctttccttgcggcccccatcaatagtctgcctctggattctgaacaggggaagctgaattgatggtctctgagtcacagttcctcatgaaaagaggtgcttaacaggagacactcggggactgaggcttcagggacccacccccccccgccaccccgccccacctccactgttctggtgcccctgaggccttcagaagttgttcctatttatccctacgacttctgagggctacgttgctatagcaacctgggtctgctgatctgtgtaaaaaacttatcaattagctgtctggagagtccatttaaggggtaacagagaagcaattactccttatagaggaagcgcaaacagtccccatttcagagcctctcagggagagtctgagaatggcaggtccaagtcactcattttagggacgggggcactgagggatgaaatgaactggttcatcccaagtcacaaagacaattagaggcaaggcatcctttctggctctgattcagaagctccattatctctctacctttgttccaggcttctcctttcccctcccgtctattctccaagcacctattgcctccaagatgggctctagactgtaagagccttgtccttcactctcccagtagcccccaggcctttgaaaacagccaggcagaccccctcacctgctgctcacatggcatcctgtggtggcccacgaagccccagtgacctgctgcctggctgcctccctccacggctctaacctctgtccccttggcaccagctcactatgaggtcctccctattccttaagaccaagctccagcctcttcaaaaacagcacatctctctctgacacagccactctccctttatcctgtgtattccttcacagctcccctccccatctgcaaccacactctgattgttacgactttgctcgttcccctctctggaataaaaatggtaaaactctgtctctt

SEQ ID NO: 5465 - protein, 84 aa, Homo sapiens [sequence omitted]

SEQ ID NO: 5466 - DNA, 1827 bp, Homo sapiens
tctccagcgcttaagaagcaggtcctcggttaccaagagccccctttcctcctcttgccatcagcaaagagacttgaatcggccttttctctaagccccgttagaactgaaagcctggctcctgactgcccatagcactgtggcccacactcctcacaagcccaagccaaggatgccccactcctttcatatcagccacctcattttatccctgatttcatcctcctcctgaatgggatggcacctttcctcccagttcaaaaccctgcccctcctctcaggcccatctcacagccatcatttcctcatcctccacaaaccgctggtccttttattcaacacacattttatcaaatgcctttctctgcaaggaacttggtggtgtttctctctcttctcagtctccaaagccctttgtcagcaacttctcctattgcacccaattgattctgttttatttctcagtcacgggtgtccttggatctcttctccactagatggtaaacttcattgaaatctcatttttacagagctctacctgttgtagtgtttcccacagcatccaggcccttccctggctccatggtgtgtttcatcttcatctctgtgcctttgagttgtctgccagatcacagagcaagcactcaatagatatttggtgacctaaagaaaggaataaagaggtagcagcaaatgcagagaagtggcatcttccctatttctgacttgaaaggtgtctttttatccctgtttaggttgtatgctagtagacatggaaatgttcagaatttatgtattcccttgaactcaaggagcactttgtgctgtttttctcttgggtctcatatagtcagaggaactgaagtctccggaagggtcttggtcaccctgagaagcacccacttatgcaaaccttgcacttgcacagttcctttcccctggggtcagcctccatcccatgctgacttccaagctcagatctactctgcagactctgcagggcctaggcctcacatctagttgccttttagacatcttctcttccgtgtccacacacatcagaaatttaccttgcctgaatctgaccttggcttcccctgccttcagagaattcagattatgcagggagcaggaaggaagagaaatagggggagagcggagaaacaaaaggcatgtgctatctcctttcaagttgatttcagcaagcttcacattttgggggcaggcaggggaagaattctagaagagaaacagggtattctagtgagacaagccaatgctgactgtttaagagatttaggattgaaatctgcttttgaactcgcattccggcggtcctctttggtgttctcaccaagggcaaaaggactcaaatcctcagcggaggacagaaggtggcctctcttctggcaaaacatggtaagtatttttggagcacgatgcaaagcctcatctgcacagacgtcatgctgaggaagccaccccagcccggcccccgcatgccaccaacctccttctgaaaatggtgattaaaagctaatcatggggccgggcgcggtggctcacacctgtaatcccagcactttggaaggccgaggcaggcggatcacctcaggtcaggaggtcgagaccagcctggccaacatggtgaaaccccaactctaccaaaaacacaaaaattagccaggcgtggtggcgggcacttgtaatcccagctacttgggaggctgaggcaggagaattgcttgaacccaagaggtggaggctgcagtgagctgagatcatgccactgcactccagcctgggcaacagagcaagactccatct

SEQ ID NO: 5467 - protein, 94 aa, Homo sapiens
MLTSKLRSTLQTLQGLGLTSSCLLDIFSSVSTHIRNLPCLNLTLASPAFREFRLCREQEGREIGGERRNKRHVLSPFKLISASFTFWGQAGEEF

SEQ ID NO: 5468 - DNA, 545 bp, Homo sapiens
tttttttttttgagatggagtcttgctctgttgcccaggctggagtgcagtggcatgatctcagctcactgcagcctccacctcttgggttcaagcaattctcctgcctcagcctcccaagtagctgggattacaagtgcccgccaccacgcctggctaatttttgtgtttttggtagagttggggtttcaccatgttggccaggctggtctcgacctcctgacctgaggtgatccgcctgcctcggccttccaaagtgctgggattacaggtgtgagccaccgcgcccggccccatgattagcttttaatcaccattttcagaaggagaagagaggccaccttctgtcctccgctgaggatttgagtccttttgcccttggtgagaacaccaaagaggaccgccggaataccctgcactccagtggatcagctgacaccatccagactggtatctggctcaaggagttctgccatctcacccaggaacagaaaacagcaagagaaactcacttcgaccctccatgattccatctccaacctgat

SEQ ID NO: 5469 - protein, 72 aa, Homo sapiens
MESCSVAQAGVQWHDLSSLQPPPLGFKQFSCLSLPSSWDYKCPPPRLANFCVFGRVGVSPCWPGWSRPPDLR

SEQ ID NO: 5470 - DNA, 2700 bp, Homo sapiens
gatgatgtagcttctgggcttgctaaagcatctcttgtccccatgaatgccagtccttgcatgctggtgtgtgcagtaaagggttaaaaagctttggaaagacaccacgcatgtgttaattcgtgctgcagcagcgtgcatcacttccactttgacctcatagttaatctgcgtgatagttaatcacgcagagtctctagtgatttttttcctatttattttaaatacacacacccacagggctctgccccctgtaaaagaaaaaaaatcaaaacaaacaaataaataaccccaaagagatggacccaggggagaacgcgtaagtgtgaggggcatgagtatacacgagtgtgcgtgtctttccctctcccttatttgtctccgtatgagtctctccttgtaccctccccctgcctcgatgatattactcccccagacttggaagccgctgccagagtgacgctttgatggtatctgcaagcgtttttgctgatcttatctctgccccctgaatattaattccctaatctggtagcaatccatctccccagtgaaggacctactagaggcaggtggggggagccaccatcagatcataagcataagaataatacaaaggggagggattcttctgcaaccaagaggcaagaggcgagagaaggaaaaaaaaaaaagcgatgagttcgccaaatatatggagcacaggaagctcagtctactcgactcctgtattttcacagaaaatgacggtgtggattctgctcctgctgtcgctctaccctggcttcactagccagaaatctgatgatgactatgaagattatgcttctaacaaaacatgggtcttgactccaaaagttcctgagggtgatgtcactgtcatcttaaacaacctgctggaaggatatgacaataaacttcggcctgatataggagtgaagccaacgttaattcacacagacatgtatgtgaatagcattggtccagtgaacgctatcaatatggaatacactattgatatattttttgcgcaaacgtggtatgacagacgtttgaaatttaacagcaccattaaagtcctccgattgaacagcaacatggtggggaaaatctggattccagacactttcttcagaaattccaaaaaagctgatgcacactggatcaccacccccaacaggatgctgagaatttggaatgatggtcgagtgctctacaccctaaggttgacaattgatgctgagtgccaattacaattgcacaactttccaatggatgaacactcctgccccttggagttctccagttatggctatccacgtgaagaaattgtttatcaatggaagcgaagttctgttgaagtgggcgacacaagatcctggaggctttatcaattctcatttgttggtctaagaaataccaccgaagtagtgaagacaacttccggagattatgtggtcatgtctgtctactttgatctgagcagaagaatgggatactttaccatccagacctatatcccctgcacactcattgtcgtcctatcctgggtgtctttctggatcaataaggatgctgttccagccagaacatctttaggtatcaccactgtcctgacaatgaccaccctcagcaccattgcccggaaatcgctccccaaggtctcctatgtcacagcgatggatctctttgtatctgtttgtttcatctttgtcttctctgctctggtggagtatggcaccttgcattattttgtcagcaaccggaaaccaagcaaggacaaagataaaaagaagaaaaaccctgcccctaccattgatatccgcccaagatcagcaaccattcaaatgaataatgctacacaccttcaagagagagatgaagagtacggctatgagtgtctggacggcaaggactgtgccagttttttctgctgttttgaagattgtcgaacaggagcttggagacatgggaggatacatatccgcattgccaaaatggactcctatgctcggatcttcttccccactgccttctgcctgtttaatctggtctattgggtctcctacctctacctgtgaggaggtatgggttttactgatatggttcttattcactgagtctcatggagagatgtctgttctaagtccacttaaataatcctctatgtggttgataatgatctgaatctgtttctatgtccaaacctggtaaattttataatgtcatattgtttgtgcccagccctcctttggttagtgtactttgaacttcgatgtttgctgtgtttcaaacctgcaaggcaaagtaaaattagagcaagaacattcaaaccaaataagatatttttcagctacagcaaataaaacagtgaaagccctgactatttacagtagtggtatccttactagattcataatgcaattagatagaaaaggtccaaaactgtaccctatgttcactccgggtcaagttgtgataaatttgatcccaatagaatacctccctcatttaagaaaaatcataactcactttaaatatgaaagcctagtccagaaatctattacacctttatctcaagataggaagaaaatttcctccacattcatgtacaatgatgtaaatatttcaataacttagaatgcttcaagtttagtgcatgcatctctttagatccaaaataaatggactgaagttatc

SEQ ID NO: 5471 - protein, 467 aa, Homo sapiens; identical to SEQ ID NO: 699

SEQ ID NO: 5472 - DNA, 4262 bp, Homo sapiens
gatgatgtagcttctgggcttgctaaagcatctcttgtccccatgaatgccagtccttgcatgctggtgtgtgcagtaaagggttaaaaagctttggaaagacaccacgcatgtgttaattcgtgctgcagcagcgtgcatcacttccactttgacctcatagttaatctgcgtgatagttaatcacgcagagtctctagtgatttttttcctatttattttaaatacacacacccacagggctctgccccctgtaaaagaaaaaaaatcaaaacaaacaaataaataaccccaaagagatggacccaggggagaacgcgtaagtgtgaggggcatgagtatacacgagtgtgcgtgtctttccctctcccttatttgtctccgtatgagtctctccttgtaccctccccctgcctcgatgatattactcccccagacttggaagccgctgccagagtgacgctttgatggtatctgcaagcgtttttgctgatcttatctctgccccctgaatattaattccctaatctggtagcaatccatctccccagtgaaggacctactagaggcaggtggggggagccaccatcagatcataagcataagaataatacaaaggggagggattcttctgcaaccaagaggcaagaggcgagagaaggaaaaaaaaaaaagcgatgagttcgccaaatatatggagcacaggaagctcagtctactcgactcctgtattttcacagaaaatgacggtgtggattctgctcctgctgtcgctctaccctggcttcactagccagaaatctgatgatgactatgaagattatgcttctaacaaaacatgggtcttgactccaaaagttcctgagggtgatgtcactgtcatcttaaacaacctgctggaaggatatgacaataaacttcggcctgatataggagtgaagccaacgttaattcacacagacatgtatgtgaatagcattggtccagtgaacgctatcaatatggaatacactattgatatattttttgcgcaaacgtggtatgacagacgtttgaaatttaacagcaccattaaagtcctccgattgaacagcaacatggtggggaaaatctggattccagacactttcttcagaaattccaaaaaagctgatgcacactggatcaccacccccaacaggatgctgagaatttggaatgatggtcgagtgctctacaccctaaggttgacaattgatgctgagtgccaattacaattgcacaactttccaatggatgaacactcctgccccttggagttctccagttatggctatccacgtgaagaaattgtttatcaatggaagcgaagttctgttgaagtgggcgacacaagatcctggaggctttatcaattctcatttgttggtctaagaaataccaccgaagtagtgaagacaacttccggagattatgtggtcatgtctgtctactttgatctgagcagaagaatgggatactttaccatccagacctatatcccctgcacactcattgtcgtcctatcctgggtgtctttctggatcaataaggatgctgttccagccagaacatctttaggtatcaccactgtcctgacaatgaccaccctcagcaccattgcccggaaatcgctccccaaggtctcctatgtcacagcgatggatctctttgtatctgtttgtttcatctttgtcttctctgctctggtggagtatggcaccttgcattattttgtcagcaaccggaaaccaagcaaggacaaagataaaaagaagaaaaaccctcttcttcggatgttttccttcaaggcccctaccattgatatccgcccaagatcagcaaccattcaaatgaataatgctacacaccttcaagagagagatgaagagtacggctatgagtgtctggacggcaaggactgtgccagttttttctgctgttttgaagattgtcgaacaggagcttggagacatgggaggatacatatccgcattgccaaaatggactcctatgctcggatcttcttccccactgccttctgcctgtttaatctggtctattgggtctcctacctctacctgtgaggaggtatgggttttactgatatggttcttattcactgagtctcatggagagatgtctgttctaagtccacttaaataatcctctatgtggttgataatgatctgaatctgtttctatgtccaaacctggtaaattttataatgtcatattgtttgtgcccagccctcctttggttagtgtactttgaacttcgatgtttgctgtgtttcaaacctgcaaggcaaagtaaaattagagcaagaacattcaaaccaaataagatatttttcagctacagcaaataaaacagtgaaagccctgactatttacagtagtggtatccttactagattcataatgcaattagatagaaaaggtccaaaactgtaccctatgttcactccgggtcaagttgtgataaatttgatcccaatagaatacctccctcatttaagaaaaatcataactcactttaaatatgaaagcctagtccagaaatctattacacctttatctcaagataggaagaaaatttcctccacattcatgtacaatgatgtaaatatttcaataacttagaatgcttcaagtttagtgcatgcatctctttagatccaaaataaatggactgaagttatcatcctattgtcttttattttgtgtccttgggctataaaagattcctgaatgtaattataaggatttgggtttggaaatggagggaggaattttcattgccttctccctcatgcatgaagattcgaacagcttattttttccttgtatgacatattacaacactttaagtaaaatatagactggataatcaacatttgccacctctaaatatgcccaatttcataactagagtataaagtaattgtatgtgcttgccgctatttttttcttccttttaggatgatagatcataacagaacttattctccatctcaagatctgcttctagtgattgtgagtgccttgtgggcagaatccttgtcatttcctctttgggtctgtagcaccttgcatagtgcctggcatatagttggtgctcaataaatatggtttgaagtgaattgccctcacatgcttctggcaaatctctgtgctggcctgaaaccagtgactcatcttctcacataggtgttgtcaagtgatatttgattttgtaaaaataaccagtaggatccaaagaactttagctatttatgttcatcttcaaaaaattattttaggcaaagtccatactccttttaaaacaatatttatgtcctatgtttgtgtatagacatgactctactagggcataattagagtttgtgtattatttttccaggtttggggatgagtcagtccttgcccatccacaattttgtttgtgaacttataacaggaataagcaaaattcatacctgactagtgttcagaatgtagcattctgtgcgaaaaagtattgaagattagcttttaaaaactgaaaaaaaaaaatgaatgactcacatagaggttgagccaatgactgtggcctcattagattacattgtagttaaacaaagcaatttctccagacttaaaacatgatgagttgagctctatcttcatgtactcatcctgaatccttatttttctaaaatagcaccctttgttaattatttttatggaaattattactctgtcataattaaatcatagctagtataactttacagataacctaaaaagaatagaaaagaagagagagtggctttgtcagtataaaaccatgtaaagtcatcatcaagtcatctggatgaatcttgaaacacatttagctgccagttttacaaacctttaatatatcagtgctccagtatataacctcaaacaaatgtaaatagaacgaattattttcttgttttgaattgtcaatatattaaatgttgactctttgggagagttgttggcaagtttcaatggtgagaaacattattgtcaacttgaaatgtgttctgtaatggggacactacaaaaagctagctttccaatgtgtgcatagtattggcaatatgaatatatattatatataatctaatacttattataagctgctccctgtctatgtatttggaaaccttttcacaaagggaattgcctaacatgtggacttttacaataaaaatgctgcattctaatcc

SEQ ID NO: 5473 - protein, 475 aa, Homo sapiens; identical to SEQ ID NO: 703

SEQ ID NO: 5474 - DNA, 4238 bp, Homo sapiens
gatgatgtagcttctgggcttgctaaagcatctcttgtccccatgaatgccagtccttgcatgctggtgtgtgcagtaaagggttaaaaagctttggaaagacaccacgcatgtgttaattcgtgctgcagcagcgtgcatcacttccactttgacctcatagttaatctgcgtgatagttaatcacgcagagtctctagtgatttttttcctatttattttaaatacacacacccacagggctctgccccctgtaaaagaaaaaaaatcaaaacaaacaaataaataaccccaaagagatggacccaggggagaacgcgtaagtgtgaggggcatgagtatacacgagtgtgcgtgtctttccctctcccttatttgtctccgtatgagtctctccttgtaccctccccctgcctcgatgatattactcccccagacttggaagccgctgccagagtgacgctttgatggtatctgcaagcgtttttgctgatcttatctctgccccctgaatattaattccctaatctggtagcaatccatctccccagtgaaggacctactagaggcaggtggggggagccaccatcagatcataagcataagaataatacaaaggggagggattcttctgcaaccaagaggcaagaggcgagagaaggaaaaaaaaaaaagcgatgagttcgccaaatatatggagcacaggaagctcagtctactcgactcctgtattttcacagaaaatgacggtgtggattctgctcctgctgtcgctctaccctggcttcactagccagaaatctgatgatgactatgaagattatgcttctaacaaaacatgggtcttgactccaaaagttcctgagggtgatgtcactgtcatcttaaacaacctgctggaaggatatgacaataaacttcggcctgatataggagtgaagccaacgttaattcacacagacatgtatgtgaatagcattggtccagtgaacgctatcaatatggaatacactattgatatattttttgcgcaaacgtggtatgacagacgtttgaaatttaacagcaccattaaagtcctccgattgaacagcaacatggtggggaaaatctggattccagacactttcttcagaaattccaaaaaagctgatgcacactggatcaccacccccaacaggatgctgagaatttggaatgatggtcgagtgctctacaccctaaggttgacaattgatgctgagtgccaattacaattgcacaactttccaatggatgaacactcctgccccttggagttctccagttatggctatccacgtgaagaaattgtttatcaatggaagcgaagttctgttgaagtgggcgacacaagatcctggaggctttatcaattctcatttgttggtctaagaaataccaccgaagtagtgaagacaacttccggagattatgtggtcatgtctgtctactttgatctgagcagaagaatgggatactttaccatccagacctatatcccctgcacactcattgtcgtcctatcctgggtgtctttctggatcaataaggatgctgttccagccagaacatctttaggtatcaccactgtcctgacaatgaccaccctcagcaccattgcccggaaatcgctccccaaggtctcctatgtcacagcgatggatctctttgtatctgtttgtttcatctttgtcttctctgctctggtggagtatggcaccttgcattattttgtcagcaaccggaaaccaagcaaggacaaagataaaaagaagaaaaaccctgcccctaccattgatatccgcccaagatcagcaaccattcaaatgaataatgctacacaccttcaagagagagatgaagagtacggctatgagtgtctggacggcaaggactgtgccagttttttctgctgttttgaagattgtcgaacaggagcttggagacatgggaggatacatatccgcattgccaaaatggactcctatgctcggatcttcttccccactgccttctgcctgtttaatctggtctattgggtctcctacctctacctgtgaggaggtatgggttttactgatatggttcttattcactgagtctcatggagagatgtctgttctaagtccacttaaataatcctctatgtggttgataatgatctgaatctgtttctatgtccaaacctggtaaattttataatgtcatattgtttgtgcccagccctcctttggttagtgtactttgaacttcgatgtttgctgtgtttcaaacctgcaaggcaaagtaaaattagagcaagaacattcaaaccaaataagatatttttcagctacagcaaataaaacagtgaaagccctgactatttacagtagtggtatccttactagattcataatgcaattagatagaaaaggtccaaaactgtaccctatgttcactccgggtcaagttgtgataaatttgatcccaatagaatacctccctcatttaagaaaaatcataactcactttaaatatgaaagcctagtccagaaatctattacacctttatctcaagataggaagaaaatttcctccacattcatgtacaatgatgtaaatatttcaataacttagaatgcttcaagtttagtgcatgcatctctttagatccaaaataaatggactgaagttatcatcctattgtcttttattttgtgtccttgggctataaaagattcctgaatgtaattataaggatttgggtttggaaatggagggaggaattttcattgccttctccctcatgcatgaagattcgaacagcttattttttccttgtatgacatattacaacactttaagtaaaatatagactggataatcaacatttgccacctctaaatatgcccaatttcataactagagtataaagtaattgtatgtgcttgccgctatttttttcttccttttaggatgatagatcataacagaacttattctccatctcaagatctgcttctagtgattgtgagtgccttgtgggcagaatccttgtcatttcctctttgggtctgtagcaccttgcatagtgcctggcatatagttggtgctcaataaatatggtttgaagtgaattgccctcacatgcttctggcaaatctctgtgctggcctgaaaccagtgactcatcttctcacataggtgttgtcaagtgatatttgattttgtaaaaataaccagtaggatccaaagaactttagctatttatgttcatcttcaaaaaattattttaggcaaagtccatactccttttaaaacaatatttatgtcctatgtttgtgtatagacatgactctactagggcataattagagtttgtgtattatttttccaggtttggggatgagtcagtccttgcccatccacaattttgtttgtgaacttataacaggaataagcaaaattcatacctgactagtgttcagaatgtagcattctgtgcgaaaaagtattgaagattagcttttaaaaactgaaaaaaaaaaatgaatgactcacatagaggttgagccaatgactgtggcctcattagattacattgtagttaaacaaagcaatttctccagacttaaaacatgatgagttgagctctatcttcatgtactcatcctgaatccttatttttctaaaatagcaccctttgttaattatttttatggaaattattactctgtcataattaaatcatagctagtataactttacagataacctaaaaagaatagaaaagaagagagagtggctttgtcagtataaaaccatgtaaagtcatcatcaagtcatctggatgaatcttgaaacacatttagctgccagttttacaaacctttaatatatcagtgctccagtatataacctcaaacaaatgtaaatagaacgaattattttcttgttttgaattgtcaatatattaaatgttgactctttgggagagttgttggcaagtttcaatggtgagaaacattattgtcaacttgaaatgtgttctgtaatggggacactacaaaaagctagctttccaatgtgtgcatagtattggcaatatgaatatatattatatataatctaatacttattataagctgctccctgtctatgtatttggaaaccttttcacaaagggaattgcctaacatgtggacttttacaataaaaatgctgcattctaatcc

SEQ ID NO: 5475 - protein, 467 aa, Homo sapiens; identical to SEQ ID NO: 699

SEQ ID NO: 5476 - DNA, 4176 bp, Homo sapiens
gatgatgtagcttctgggcttgctaaagcatctcttgtccccatgaatgccagtccttgcatgctggtgtgtgcagtaaagggttaaaaagctttggaaagacaccacgcatgtgttaattcgtgctgcagcagcgtgcatcacttccactttgacctcatagttaatctgcgtgatagttaatcacgcagagtctctagtgatttttttcctatttattttaaatacacacacccacagggctctgccccctgtaaaagaaaaaaaatcaaaacaaacaaataaataaccccaaagagatggacccaggggagaacgcgtaagtgtgaggggcatgagtatacacgagtgtgcgtgtctttccctctcccttatttgtctccgtatgagtctctccttgtaccctccccctgcctcgatgatattactcccccagacttggaagccgctgccagagtgacgctttgatggtatctgcaagcgtttttgctgatcttatctctgccccctgaatattaattccctaatctggtagcaatccatctccccagtgaaggacctactagaggcaggtggggggagccaccatcagatcataagcataagaataatacaaaggggagggattcttctgcaaccaagaggcaagaggcgagagaaggaaaaaaaaaaaagcgatgagttcgccaaatatatggagcacaggaagctcagtctactcgactcctgtattttcacagaaaatgacggtgtggattctgctcctgctgtcgctctaccctggcttcactagccagaaatctgatgatgactatgaagattatgcttctaacaaaacatgggtcttgactccaaaagttcctgagggtgatgtcactgtcatcttaaacaacctgctggaaggatatgacaataaacttcggcctgatataggagtgaagccaacgttaattcacacagacatgtatgtgaatagcattggtccagtgaacgctatcaatatgcaccattaaagtcctccgattgaacagcaacatggtggggaaaatctggattccagacactttcttcagaaattccaaaaaagctgatgcacactggatcaccacccccaacaggatgctgagaatttggaatgatggtcgagtgctctacaccctaaggttgacaattgatgctgagtgccaattacaattgcacaactttccaatggatgaacactcctgccccttggagttctccagttatggctatccacgtgaagaaattgtttatcaatggaagcgaagttctgttgaagtgggcgacacaagatcctggaggctttatcaattctcatttgttggtctaagaaataccaccgaagtagtgaagacaacttccggagattatgtggtcatgtctgtctactttgatctgagcagaagaatgggatactttaccatccagacctatatcccctgcacactcattgtcgtcctatcctgggtgtctttctggatcaataaggatgctgttccagccagaacatctttaggtatcaccactgtcctgacaatgaccaccctcagcaccattgcccggaaatcgctccccaaggtctcctatgtcacagcgatggatctctttgtatctgtttgtttcatctttgtcttctctgctctggtggagtatggcaccttgcattattttgtcagcaaccggaaaccaagcaaggacaaagataaaaagaagaaaaaccctgcccctaccattgatatccgcccaagatcagcaaccattcaaatgaataatgctacacaccttcaagagagagatgaagagtacggctatgagtgtctggacggcaaggactgtgccagttttttctgctgttttgaagattgtcgaacaggagcttggagacatgggaggatacatatccgcattgccaaaatggactcctatgctcggatcttcttccccactgccttctgcctgtttaatctggtctattgggtctcctacctctacctgtgaggaggtatgggttttactgatatggttcttattcactgagtctcatggagagatgtctgttctaagtccacttaaataatcctctatgtggttgataatgatctgaatctgtttctatgtccaaacctggtaaattttataatgtcatattgtttgtgcccagccctcctttggttagtgtactttgaacttcgatgtttgctgtgtttcaaacctgcaaggcaaagtaaaattagagcaagaacattcaaaccaaataagatatttttcagctacagcaaataaaacagtgaaagccctgactatttacagtagtggtatccttactagattcataatgcaattagatagaaaaggtccaaaactgtaccctatgttcactccgggtcaagttgtgataaatttgatcccaatagaatacctccctcatttaagaaaaatcataactcactttaaatatgaaagcctagtccagaaatctattacacctttatctcaagataggaagaaaatttcctccacattcatgtacaatgatgtaaatatttcaataacttagaatgcttcaagtttagtgcatgcatctctttagatccaaaataaatggactgaagttatcatcctattgtcttttattttgtgtccttgggctataaaagattcctgaatgtaattataaggatttgggtttggaaatggagggaggaattttcattgccttctccctcatgcatgaagattcgaacagcttattttttccttgtatgacatattacaacactttaagtaaaatatagactggataatcaacatttgccacctctaaatatgcccaatttcataactagagtataaagtaattgtatgtgcttgccgctatttttttcttccttttaggatgatagatcataacagaacttattctccatctcaagatctgcttctagtgattgtgagtgccttgtgggcagaatccttgtcatttcctctttgggtctgtagcaccttgcatagtgcctggcatatagttggtgctcaataaatatggtttgaagtgaattgccctcacatgcttctggcaaatctctgtgctggcctgaaaccagtgactcatcttctcacataggtgttgtcaagtgatatttgattttgtaaaaataaccagtaggatccaaagaactttagctatttatgttcatcttcaaaaaattattttaggcaaagtccatactccttttaaaacaatatttatgtcctatgtttgtgtatagacatgactctactagggcataattagagtttgtgtattatttttccaggtttggggatgagtcagtccttgcccatccacaattttgtttgtgaacttataacaggaataagcaaaattcatacctgactagtgttcagaatgtagcattctgtgcgaaaaagtattgaagattagcttttaaaaactgaaaaaaaaaaatgaatgactcacatagaggttgagccaatgactgtggcctcattagattacattgtagttaaacaaagcaatttctccagacttaaaacatgatgagttgagctctatcttcatgtactcatcctgaatccttatttttctaaaatagcaccctttgttaattatttttatggaaattattactctgtcataattaaatcatagctagtataactttacagataacctaaaaagaatagaaaagaagagagagtggctttgtcagtataaaaccatgtaaagtcatcatcaagtcatctggatgaatcttgaaacacatttagctgccagttttacaaacctttaatatatcagtgctccagtatataacctcaaacaaatgtaaatagaacgaattattttcttgttttgaattgtcaatatattaaatgttgactctttgggagagttgttggcaagtttcaatggtgagaaacattattgtcaacttgaaatgtgttctgtaatggggacactacaaaaagctagctttccaatgtgtgcatagtattggcaatatgaatatatattatatataatctaatacttattataagctgctccctgtctatgtatttggaaaccttttcacaaagggaattgcctaacatgtggacttttacaataaaaatgctgcattctaatcc

SEQ ID NO: 5477 - protein, 327 aa, Homo sapiens; identical to SEQ ID NO: 701

SEQ ID NO: 5478 - DNA, 4155 bp, Homo sapiens
gatgatgtagcttctgggcttgctaaagcatctcttgtccccatgaatgccagtccttgcatgctggtgtgtgcagtaaagggttaaaaagctttggaaagacaccacgcatgtgttaattcgtgctgcagcagcgtgcatcacttccactttgacctcatagttaatctgcgtgatagttaatcacgcagagtctctagtgatttttttcctatttattttaaatacacacacccacagggctctgccccctgtaaaagaaaaaaaatcaaaacaaacaaataaataaccccaaagagatggacccaggggagaacgcgtaagtgtgaggggcatgagtatacacgagtgtgcgtgtctttccctctcccttatttgtctccgtatgagtctctccttgtaccctccccctgcctcgatgatattactcccccagacttggaagccgctgccagagtgacgctttgatggtatctgcaagcgtttttgctgatcttatctctgccccctgaatattaattccctaatctggtagcaatccatctccccagtgaaggacctactagaggcaggtggggggagccaccatcagatcataagcataagaataatacaaaggggagggattcttctgcaaccaagaggcaagaggcgagagaaggaaaaaaaaaaaagcgatgagttcgccaaatatatggagcacaggaagctcagtctactcgactcctgtattttcacagaaaatgacggtgtggattctgctcctgctgtcgctctaccctggcttcactagccagaaatctgatgatgactatgaagattatgcttctaacaaaacatgggtcttgactccaaaagttcctgagggtgatgtcactgtcatcttaaacaacctgctggaaggatatgacaataaacttcggcctgatataggagtgaagccaacgttaattcacacagacatgtatgtgaatagcattggtccagtgaacgctatcaatatggaatacactattgatatattttttgcgcaaacgtggtatgacagacgtttgaaatttaacagcaccattaaagtcctccgattgaacagcaacatggtggggaaaatctggattccagacactttcttcagaaattccaaaaaagctgatgcacactggatcaccacccccaacaggatgctgagaatttggaatgatggtcgagtgctctacaccctaaggttgacaattgatgctgagtgccaattacaattgcacaactttccaatggatgaacactcctgccccttggagttctccagttatggctatccacgtgaagaaattgtttatcaatggaagcgaagttctgttgaagtgggcgacacaagatcctggaggctttatcaattctcatttgttggtctaagaaataccaccgaagtagtgaagacaacttccggagattatgtggtcatgtctgtctactttgatctgagcagaagaatgggatactttaccatccagacctatatcccctgcacactcattgtcgtcctatcctgggtgtctttctggatcaataaggatgctgttccagccagaacatctttaggtatcaccactgtcctgacaatgaccaccctcagcaccattgcccggaaatcgctccccaaggtctcctatgtcacagcgatggatctctttgtatctgtttgtttcatctttgtcttctctgctctggtggagtatggcaccttgcattattttgtcagcaaccggaaaccaagcaaggacaaagataaaaagaagaaaaaccctcttcttcggatgttttccttcaaggcccctaccattgatatccgcccaagatcagcaaccattcaaatgaataatgctacacaccttcaagagagagatgaagagtacggctatgagtgtctggacggcaaggactgtgccagttttttctgctgttttgaagattgtcgaacaggagcttggagacatgggaggatacatatccgcattgccaaaatggactcctatgctcggatcttcttccccactgccttctgcctgtttaatctggtctattgggtctcctacctctacctgtgaggaggtatgggttttactgatatggttcttattcactgagtctcatggagagatgtctgttctaagtccacttaaataatcctctatgtggttgataatgatctgaatctgtttctatgtccaaacctggtaaattttataatgtcatattgtttgtgcccagccctcctttggttagtgtactttgaacttcgatgtttgctgtgtttcaaacctgcaaggcaaagtaaaattagagcaagaacattcaaaccaaataagatatttttcagctacagcaaataaaacagtgaaagccctgactatttacagtagtggtatccttactagattcataatgcaattagatagaaaaggtccaaaactgtaccctatgttcactccgggtcaagttgtgataaatttgatcccaatagaatacctccctcatttaagaaaaatcataactcactttaaatatgaaagcctagtccagaaatctattacacctttatctcaagataggaagaaaatttcctccacattcatgtacaatgatgtaaatatttcaataacttagaatgcttcaagtttagtgcatgcatctctttagatccaaaataaatggactgaagttatcatcctattgtcttttattttgtgtccttgggctataaaagattcctgaatgtaattataaggatttgggtttggaaatggagggaggaattttcattgccttctccctcatgcatgaagattcgaacagcttattttttccttgtatgacatattacaacactttaagtaaaatatagactggataatcaacatttgccacctctaaatatgcccaatttcataactagagtataaagtaattgtatgtgcttgccgctatttttttcttccttttaggatgatagatcataacagaacttattctccatctcaagatctgtgccctcacatgcttctggcaaatctctgtgctggcctgaaaccagtgactcatcttctcacataggtgttgtcaagtgatatttgattttgtaaaaataaccagtaggatccaaagaactttagctatttatgttcatcttcaaaaaattattttaggcaaagtccatactccttttaaaacaatatttatgtcctatgtttgtgtatagacatgactctactagggcataattagagtttgtgtattatttttccaggtttggggatgagtcagtccttgcccatccacaattttgtttgtgaacttataacaggaataagcaaaattcatacctgactagtgttcagaatgtagcattctgtgcgaaaaagtattgaagattagcttttaaaaactgaaaaaaaaaaatgaatgactcacatagaggttgagccaatgactgtggcctcattagattacattgtagttaaacaaagcaatttctccagacttaaaacatgatgagttgagctctatcttcatgtactcatcctgaatccttatttttctaaaatagcaccctttgttaattatttttatggaaattattactctgtcataattaaatcatagctagtataactttacagataacctaaaaagaatagaaaagaagagagagtggctttgtcagtataaaaccatgtaaagtcatcatcaagtcatctggatgaatcttgaaacacatttagctgccagttttacaaacctttaatatatcagtgctccagtatataacctcaaacaaatgtaaatagaacgaattattttcttgttttgaattgtcaatatattaaatgttgactctttgggagagttgttggcaagtttcaatggtgagaaacattattgtcaacttgaaatgtgttctgtaatggggacactacaaaaagctagctttccaatgtgtgcatagtattggcaatatgaatatatattatatataatctaatacttattataagctgctccctgtctatgtatttggaaaccttttcacaaagggaattgcctaacatgtggacttttacaataaaaatgctgcattctaatccatggtggcatctc

SEQ ID NO: 5479 - protein, 475 aa, Homo sapiens; identical to SEQ ID NO: 703

SEQ ID NO: 5480 - DNA, 402 bp, Homo sapiens
tacaatcaggcctgaggctatacttgaccctcgacaagtgaaaatgtcagtatttatggtaatggcttctgagcatctctcatctttgccagcaagtctacagcttttctaccagtggattatggattcaaatttgagaacaagccattaaaagcaaagcagcttcacagtgacagcctgacacctgtcatatctccaaggccacgtcgctttttgtattcctgaaaactcttgggctaaagagcctataaaatcaaatccccttaaagtgcggcatcagtggatttcccaagcccaaaaggtttaaatgccaagcaagtcaaaggtggttacttctgccacttcagatttattcctcctattgatttatcctaacatatgacattaaagttacagtatttt

SEQ ID NO: 5481 - protein, 35 aa, Homo sapiens
MSVFMVMASEHLSSLPASLQLFYQWIMDSNLRTSH

SEQ ID NO: 5482 - DNA, 519 bp, Homo sapiens
atggatgtaaaggaccggcgacaccgctctttgaccagaggacgctgtggcaaagagtgtcgctacacaagctcctctctggacagtgaggactgccgcgtgcccacacagaaatcctacagctccagtgagactctgaaggcctatgaccatgacagcaggatgcactatggaaaccgagtcacagacctcatccaccgggagtcagatgagtttcctagacaaggaaccaacttcacccttgccgaactgggcatctgtgagccctccccacaccgaagcggctactgctccgacatggggatccttcaccagggctactcccttagcacagggtctgacgccgactccgacaccgagggagggatgtctccagaacacgccatcagactgtggggcagagggataaaatccaggcgcagttccggcctgtccagtcgtgaaaactcggcccttaccctgactgactctgacaacgaaaacaaatcagatgatgagaacggtaggcctgcttcttaa

SEQ ID NO: 5483 - protein, 172 aa, Homo sapiens [sequence omitted]

SEQ ID NO: 5484 - DNA, 648 bp, Homo sapiens
gactctcttttcagactcagcccgcctgcacccaggcgaaataaacagccttgttgctcacacaaagcctgtttggtggtctcttcacacagacgcccatgaaatttggtgcagtgactgggatcgggggacctcccttgggagatcaatcccctgtcctcctgctctttgctccgtgaaaaagatctacctacgacctcaggtcctcagacccaccagcccaaggaacatctcaccaattttaaatcggtaggtccagattcatcattactgctttgactttgaagacgttggatcaattaacataatcaactgttacctgttacattccaagccaggacattaaagtagtatgcctcccttccatcaatgctccagttgcagccaatatgtccattgaaactaacttaactcgctggaactactctctaaataaattcaccattttggttcaaagtgctacaaacaaattcagtgctttcattccccgtacatggatccgactttaactgcacaaggacagaaggagaagcacatattatgaggtggcagtggacatgtgggaatttgaaagaaagtgcttcagactatttttaaactgaaatgtatcccactgggaccgcaattgcccagtgccgactattcata

SEQ ID NO: 5485 - protein, 39 aa, Homo sapiens
MSIETNLTRWNYSLNKFTILVQSATNKFSAFIPRTWIRL

SEQ ID NO: 5486 - DNA, 527 bp, Homo sapiens
aagggtctccgggaagccttggcttctcctcccataataccgtgcttttgtctaccaggtcatttctctatggaaacagcaggagagagacagcggatgaagaggtctaggcaaggatgggtgaggacgcagtaaggagctgaaagctgcaccaggcagagaatggcccaccccatcacttaacaaggctggcatccccgcatctatctgttaaagctgcctgtgaacaagaagctgtgatgttccgtacaaccagggatgtgtgggtttgtggacaacagacgattttctagttgttgtttttttttttaagattctttccccttacagaaaaggggctctgatacgcctgaattaaatcacctttcaaaagccaagaaacaaatcatcgtcccctaaggatgactgaggagcaagaagccagtacttactgtgtgtctcaagcaagctgatagaagctagagaagaccatctggtttgagataaagtacaacagtgccggacccactgctctgctccagaaagca

SEQ ID NO: 5487 - protein, 35 aa, Homo sapiens
GSPGSLGFSSHNTVLLSTRSFLYGNSRRETADEEV

SEQ ID NO: 5488 - DNA, 569 bp, Homo sapiens
gctagagatgctgcacgctgctaacaagggaaggaagccttcagctgaggcaggtcgtcccattccacctacatcctcgcctagtctcctcccatctgctcagctgcctagctcccataatcctccaccagttagctgccagatgccattgctagacagcaacacctcccatcaaatcatggacaccaaccctgatgaggaattctcccccaattcatacctgctcagagcatgctcagggccccagcaagcctccagcagtggccctccgaaccaccacagccagtcgactctgaggccccctctcccaccccctcacaaccacacgctgtcccatcaccactcgtccgccaactccctcaacaggaactcactgaccaatcggcggagtcagatccacgccccggccccagcgcccaatgacctggccaccacaccagagtccgttcagcttcaggacagctgggtgctaaacagcaacgtgccactggagacccggcacttcctcttcaagacctcctcggggagcacacccttgttcagcagctcttccccgggataccctttga

SEQ ID NO: 5489 - protein, 186 aa, Homo sapiens
MLHAANKGRKPSAEAGRPIPPTSSPSLLPSAQLPSSHNPPPVSCQMPLLDSNTSHQIMDTNPDEEFSPNSYLLRACSGPQQASSSGPPNHHSQSTLRPPLPPPHNHTLSHHHSSANSLNRNSLTNRRSQIHAPAPAPNDLATTPESVQLQDSWVLNSNVPLETRHFLFKTSSGSTPLFSSSSPGYP

SEQ ID NO: 5490 - DNA, 1120 bp, Homo sapiens
ttttttttttttttgagacacagccttgctctgtcgcccaggctggagtgcagtggcacaatctcggctcactgcaagctccacctcccgggttcacgccattctcctgcctcagcctcacgagtagctgggactacaggcgcctgccaccactcctggctaatttttttttgtatttttagtagagacggggtttcaccgtgttagccaggatggtctcgatctcctgacctcgtgatctgccagcctcgacctcccaaagtgctgagattacaggcttgagccaccacgcccagtccaacatctcttattaaggacattctacagccctccctttaaggaatgcttccaggctgtcactgccagcatccagaaaaggacctgactaatgcttcctttgagaaaagcaccgtaaagcatgattggctccattctccaacagacaaagtggatgtggcaaccccagaccttccaacctttcagctgcaagttcaacaggaataaagacttcttcccagtggtttcttcaaaagccctcagattagctgtttgcctagcttgtcacatgccaccccagaaccaatccctatggccagagaaatgtagcgtattgattggtttagccctaggtcacatgacccacctctggaaaagggctcaatcctcactcaaactgctttggctgaaggcttggaagagatggagccaaggaaagtagacactggggatgcaaaaataaaagttcaataagtatgcctttaaatacggaccagatactgaatattaaaaaccagcacattctgaaaagaagaaatataagcaaaagaaaaaaaaagtgggaaatatgagatagtatttagaattagtaagctatccaactaaggtcaagttcaagaatattttaagagttacttaaatatatagagatagctaggcatggtaacttgtgcctgtaattccagctgctctggaagccaaggtgggaggattgtcttaagcccgggacttcaatgctgcagtgagctgtgatttcacccttgcattccagcctgtgaaataaaggagaccccatctctaagaaaaagaaaaagaaataaatatataaaattacttccctgtt

SEQ ID NO: 5491 - protein, 99 aa, Homo sapiens
MIGSILQQTKWMWQPQTFQPFSCKFNRNKDFFPVVSSKALRLAVCLACHMPPQNQSLWPEKCSVLIGLALGHMTHLWKRAQSSLKLLWLKAWKRWSQGK

SEQ ID NO: 5492 - DNA, 8667 bp, Homo sapiens
gatttttctgtagttagagggaaacacaaaacgaagagcggcccactcccagcttacgccgatggtgagcccacctctcctgatcattagcgttgctggcacaattgaatgcaagccagatcatctcttatggagacccggcagtacctcacctcagtctgtgagttttctccatgggaaggttgtgatggagtctctgggccctccgaaccaccacagccagtcgactctgaggccccctctcccaccccctcacaaccacacgctgtcccatcaccactcgtccgccaactccctcaacaggaactcactgaccaatcggcggagtcagatccacgccccggccccagcgcccaatgacctggccaccacaccagagtccgttcagcttcaggacagctgggtgctaaacagcaacgtgccactggagacccggcacttcctcttcaagacctcctcggggagcacacccttgttcagcagctcttccccgggataccctttgacctcaggaacggtttacacgcccccgccccgcctgctgcccaggaatactttctccaggaaggctttcaagctgaagaagccctccaaatactgcagctggaaatgtgctgccctctccgccattgccgcggccctcctcttggctattttgctggcgtatttcatagcaatgcatctgctcggactcaattggcaactccagcctgcagatgggcacacctttaacaatgggataaggaccggcttaccaggaaacgatgatgtggcaacaatgccatctggaggcaaagtgccctggtcgttgaaaaacagcagcatagacagtggtgaagcagaagttggtcggcgggtaacacaagaagtcccaccaggggtgttttggaggtcacaaattcacatcagtcagccccagttcttaaagttcaacatctccctcgggaaggacgctctctttggtgtttacataagaagaggacttccaccatctcatgcccagtatgacttcatggaacgtctggacgggaaggagaagtggagtgtggttgagtctcccagggaacgccggagcatacagaccttggttcagaatgaagccgtgtttgtgcagtacctggatgtgggcctgtggcatctggccttctacaatgatggaaaagacaaagagatggtttccttcaatactgttgtcctgacacgggcctctgcagctgcgatcccaactggatgggtcccgactgctctgttgaagtgtgctcagtagactgtggcactcacggcgtctgcatcgggggagcctgccgctgtgaagagggctggacaggcgcagcgtgtgaccagcgcgtgtgccacccccgctgcattgagcacgggacctgtaaagatggcaaatgtgaatgccgagagggctggaatggtgaacactgcaccattgatggctgccctgacttgtgcaacggtaacgggagatgcacactgggtcagaacagctggcagtgtgtctgccagaccggctggagagggcccggatgcaacgttgccatggaaacttcctgtgctgataacaaggataatgagggagatggcctggtggattgtttggaccctgactgctgcctgcagtcagcctgtcagaacagcctgctctgccgggggtcccgggacccactggacatcattcagcagggccagacggattggcccgcagtgaagtccttctatgaccgtatcaagctcttggcaggcaaggatagcacccacatcattcctggagagaaccctttcaacagcagcttggtttctctcatccgaggccaagtagtaactacagatggaactcccctggtcggtgtgaacgtgtcttttgtcaagtacccaaaatacggctacaccatcacccgccaggatggcacgttcgacctgatcgcaaatggaggtgcttccttgactctacactttgagcgagccccgttcatgagccaggagcgcactgtgtggctgccgtggaacagcttttacgccatggacaccctggtgatgaagaccgaggagaactccatccccagctgtgacctcagtggctttgtccggcctgatccaatcatcatctcctccccactgtccaccttctttagtgctgcccctgggcagaatcccatcgtgcctgagacccaggttcttcatgaagaaatcgagctccctggttccaatgtgaaacttcgctatctgagctctagaactgcagggtacaagtcactgctgaagatcaccatgacccagtccacagtgcccctgaacctcattagggttcacctgatggtggctgtcgaggggcatctcttccagaagtcattccaggcttctcccaacctggcctacaccttcatctgggacaagacagatgcgtatggccaaagggtgtatggactctcagatgctgttgtgtctgtcgggtttgaatatgagacctgtcccagtctaattctctgggagaaaaggacagccctccttcagggattcgagctggacccctccaacctcggtggctggtccctagacaaacaccacatcctcaatgttaaaagtggaatcctacacaaaggcactggggaaaaccagttcctgacccagcagcctgccatcatcaccagcatcatgggcaatggtcgccgccggagcatttcctgtcccagctgcaacggccttgctgaaggcaacaagctgctggccccagtggctctggctgttggaatcgatgggagcctctatgtgggtgacttcaattacatccgacgcatctttccctctcgaaatgtgaccagcatcttggagttacgcaacaacccagcacacaagtactacttggcagtggaccccgtgtccggctcgctctacgtgtccgacaccaacagcaggagaatctaccgcgtcaagtctctgagtggaaccaaagacctggctgggaattcggaagttgtggcagggacgggagagcagtgtctaccctttgatgaagcccgctgcggggatggagggaaggccatagatgcaaccctgatgagcccgagaggtattgcagtagacaagaatgggctcatgtactttgtcgatgccaccatgatccggaaggttgaccagaatggaatcatctccaccctgctgggctccaatgacctcactgccgtccggccgctgagctgtgattccagcatggatgtagcccaggttcgtctggagtggccaacagaccttgctgtcaatcccatggataactccttgtatgttctagagaacaatgtcatccttcgaatcaccgagaaccaccaagtcagcatcattgcgggacgccccatgcactgccaagttcctggcattgactactcactcagcaaactagccattcactctgccctggagtcagccagtgccattgccatttctcacactggggtcctctacatcactgagacagatgagaagaagattaaccgtctacgccaggtaacaaccaacggggagatctgccttttagctggggcagcctcggactgcgactgcaaaaacgatgtcaattgcaactgctattcaggagatgatgcctacgcgactgatgccatcttgaattccccatcatccttagctgtagctccagatggtaccatttacattgcagaccttggaaatattcggatcagggcggtcagcaagaacaagcctgttcttaatgccttcaaccagtatgaggctgcatcccccggagagcaggagttatatgttttcaacgctgatggcatccaccaatacactgtgagcctggtgacaggggagtacttgtacaatttcacatatagtactgacaatgatgtcactgaattgattgacaataatgggaattccctgaagatccgtcgggacagcagtggcatgccccgtcacctgctcatgcctgacaaccagatcatcaccctcaccgtgggcaccaatggaggcctcaaagtcgtgtccacacagaacctggagcttggtctcatgacctatgatggcaacactgggctcctggccaccaagagcgatgaaacaggatggacgactttctatgactatgaccacgaaggccgcctgaccaacgtgacgcgccccacgggggtggtaaccagtctgcaccgggaaatggagaaatctattaccattgacattgagaactccaaccgtgatgatgacgtcactgtcatcaccaacctctcttcagtagaggcctcctacacagtggtacaagatcaagttcggaacagctaccagctctgtaataatggtaccctgagggtgatgtatgctaatgggatgggtatcagcttccacagcgagccccatgtcctagcgggcaccatcacccccaccattggacgctgcaacatctccctgcctatggagaatggcttaaactccattgagtggcgcctaagaaaggaacagattaaaggcaaagtcaccatctttggcaggaagctccgggtccatggaagaaatctcttgtccattgactatgatcgaaatattcggactgaaaagatctatgatgaccaccggaagttcaccctgaggatcatttatgaccaggtgggccgccccttcctctggctgcccagcagcgggctggcagctgtcaacgtgtcatacttcttcaatgggcgcctggctgggcttcagcgtggggccatgagcgagaggacagacatcgacaagcaaggccgcatcgtgtcccgcatgttcgctgacgggaaagtgtggagctactcctaccttgacaagtccatggtcctcctgcttcagagccaacgtcagtatatatttgagtatgactcctctgaccgcctccttgccgtcaccatgcccagcgtggcccggcacagcatgtccacacacacctccatcggctacatccgtaatatttacaacccgcctgaaagcaatgcttcggtcatctttgactacagtgatgacggccgcatcctgaagacctcctttttgggcaccggacgccaggtgttctacaagtatgggaaactctccaagttatcagagattgtctacgacagtaccgccgtcaccttcgggtatgacgagaccactggtgtcttgaagatggtcaacctccaaagtgggggcttctcctgcaccatcaggtaccggaagattggccccctggtggacaagcagatctacaggttctccgaggaaggcatggtcaatgccaggtttgactacacctatcatgacaacagcttccgcatcgcaagcatcaagcccgtcataagtgagactcccctccccgttgacctctaccgctatgatgagatttctggcaaggtggaacactttggtaagtttggagtcatctattatgacatcaaccagatcatcaccactgccgtgatgaccctcagcaaacacttcgacacccatgggcggatcaaggaggtccagtatgagatgttccggtccctcatgtactggatgacggtgcaatatgacagcatgggcagggtgatcaagagggagctaaaactggggccctatgccaataccacgaagtacacctatgactacgatggggacgggcagctccagagcgtggccgtcaatgaccgcccgacctggcgctacagctatgaccttaatgggaatctccacttactgaacccaggcaacagtgtgcgcctcatgcccttgcgctatgacctccgggatcggataaccagactcggggatgtgcagtacaaaattgacgacgatggctatctgtgccagagagggtctgacatcttcgaatacaattccaagggcctcctaacaagagcctacaacaaggccagcgggtggagtgtccagtaccgctatgatggcgtaggacggcgggcttcctacaagaccaacctgggccaccacctgcagtacttctactctgacctccacaacccgacgcgcatcacccatgtctacaatcactccaactcggagattacctcactgtactacgacctccagggccacctctttgccatggagagcagcagtggggaggagtactatgttgcctctgataacacagggactcctctggctgtgttcagcatcaacggcctcatgatcaaacagctgcagtacacggcctatggggagatttattatgactccaaccccgacttccagatggtcattggcttccatgggggactctatgaccccctgaccaagctggtccacttcactcagcgtgattatgatgtgctggcaggacgatggacctccccagactataccatgtggaaaaacgtgggcaaggagccggccccctttaacctgtatatgttcaagagcaacaatcctctcagcagtgagctagatttgaagaactacgtgacagatgtgaaaagctggcttgtgatgtttggatttcagcttagcaacatcattcctggcttcccgagagccaaaatgtatttcgtgcctcctccctatgaattgtcagagagtcaagcaagtgagaatggacagctcattacaggtgtccaacagacaacagagagacataaccaggccttcatggctctggaaggacaggtcattactaaaaagctccacgccagcatccgagagaaagcaggtcactggtttgccaccaccacgcccatcattggcaaaggcatcatgtttgccatcaaagaagggcgggtgaccacgggcgtgtccagcatcgccagcgaagatagccgcaaggtggcatctgtgctgaacaacgcctactacctggacaagatgcactacagcatcgagggcaaggacacccactactttgtgaagattggctcagccgatggcgacctggtcacactaggcaccaccatcggccgcaaggtgctagagagcggggtgaacgtgaccgtgtcccagcccacgctgctggtcaacggcaggactcgaaggttcacgaacattgagttccagtactccacgctgctgctcagcatccgctatggcctcacccccgacaccctggacgaagagaaggcccgcgtcctggaccaggcgagacagagggccctgggcacggcctgggccaaggagcagcagaaagccagggacgggagagaggggagccgcctgtggactgagggcgagaagcagcagcttctgagcaccgggcgcgtgcaagggtacgagggatattacgtgcttcccgtggagcaatacccagagcttgcagacagtagcagcaacatccagtttttaagacagaatgagatgggaaagaggtaacaaaataatctgctgccattccttgtctgaatggctcagcaggagtaactgttatctcctctcctaaggagatgaagacctaacaggggcactgcggctgggctgctttaggagaccaagtggcaagaaagctcacattttttgagttcaaatgctactgtccaagcgagaagtccctcatcctgaagtagactaaagcccggctgaaaattccgaggaaaacaaaacaaacgaatgaatgaacagacacacacaatgttccaagttcccctaaaatatgacccacttgttctgggtctacgcagaaaagagacgcaaagtgtccaaaaggaacaaaagaacaaaaacgaataagcaaagaagaaaacaaacaaaaacaaaacaaaacaaacacacggaccaataaacaaagaagcgaagataagaaagaaggcctcatatccaattacctcactcattcacatgtgagcgacacgcagacatccgcgagggccagcgtcaccagaccagctgcgggacaaaccactcagactgcttgtaggacaaatacttctgacattttcgtttaagcaaatacaggtgcatttaaaacacgactttgggggtgatttgtgtgtagcgcctggggaggggggataaaagaggaggagtgagcactggaaatactttttaaagaaaaaaaaacatgagggaataaaagaaattcctatcaaaaatcaaagtgaaataataccatccagcacttaactctcaggtcccaactaagtctggcctgagctaatttatttgagcgcagagtgtaaaatttaattcaaaatggtggctataatcactacagataaatttcatactcttttgtctttggagattccattgtggacagtaatacgcagttacagggtgtagtctgtttagattccgtagttcgtgggtatcagtttcggtagaggtgcagcatcgtgacacttttgctaacaggtaccacttctgatcaccctgtacatacatgagccgaaaggcacaatcactgtttcagatttaaaattattagtgtgtttgtttggtccagaaactgagacaatcacatgacagtcaccacgaggagagaaaatttaaaaaataaaaataaaaacaaaaaaaattttaaaaattaaaaaaacaaaaataaagtctaataagaactttggtacaggaacttttttgtaatatacatgtatgaattgttcatcgagtttttatattaattttaatttgctgctaagcaaagactagggacaggcaaagataatttatggcaaagtgtttaaattgtttatacataaataaagtctctaaaactcctgtgga

SEQ ID NO: 5493 - protein, 2029 aa, Homo sapiens; identical to SEQ ID NO: 705

SEQ ID NO: 5494 - DNA, 8979 bp, Homo sapiens
tagttagagggaaacacaaaacgaagagcggcccactcccagcttacgccgatggtgagcccacctctcctgatcattagcgttgctggcacaattgaatgcaagccagatcatctcttatggagacccggcagtacctcacctcagtctgtgagttttctccatgggaaggttgtgatggagtctctgggccctccgaaccaccacagccagtcgactctgaggccccctctcccaccccctcacaaccacacgctgtcccatcaccactcgtccgccaactccctcaacaggaactcactgaccaatcggcggagtcagatccacgccccggccccagcgcccaatgacctggccaccacaccagagtccgttcagcttcaggacagctgggtgctaaacagcaacgtgccactggagacccggcacttcctcttcaagacctcctcggggagcacacccttgttcagcagctcttccccgggataccctttgacctcaggaacggtttacacgcccccgccccgcctgctgcccaggaatactttctccaggaaggctttcaagctgaagaagccctccaaatactgcagctggaaatgtgctgccctctccgccattgccgcggccctcctcttggctattttgctggcgtatttcatagtgccctggtcgttgaaaaacagcagcatagacagtggtgaagcagaagttggtcggcgggtaacacaagaagtcccaccaggggtgttttggaggtcacaaattcacatcagtcagccccagttcttaaagttcaacatctccctcgggaaggacgctctctttggtgtttacataagaagaggacttccaccatctcatgcccagtatgacttcatggaacgtctggacgggaaggagaagtggagtgtggttgagtctcccagggaacgccggagcatacagaccttggttcagaatgaagccgtgtttgtgcagtacctggatgtgggcctgtggcatctggccttctacaatgatggaaaagacaaagagatggtttccttcaatactgttgtcctagattcagtgcaggactgtccacgtaactgccatgggaatggtgaatgtgtgtccggggtgtgtcactgtttcccaggatttctaggagcagactgtgctaaagctgcctgccctgtcctgtgcagtgggaatggacaatattctaaagggacgtgccagtgctacagcggctggaaaggtgcagagtgcgacgtgcccatgaatcagtgcatcgatccttcctgcgggggccacggctcctgcattgatgggaactgtgtctgctctgctggctacaaaggcgagcactgtgaggaagttgattgcttggatcccacctgctccagccacggagtctgtgtgaatggagaatgcctgtgcagccctggctggggtggtctgaactgtgagctggcgagggtccagtgcccagaccagtgcagtgggcatggcacgtacctgcctgacacgggcctctgcagctgcgatcccaactggatgggtcccgactgctctgttgaagtgtgctcagtagactgtggcactcacggcgtctgcatcgggggagcctgccgctgtgaagagggctggacaggcgcagcgtgtgaccagcgcgtgtgccacccccgctgcattgagcacgggacctgtaaagatggcaaatgtgaatgccgagagggctggaatggtgaacactgcaccattgatggctgccctgacttgtgcaacggtaacgggagatgcacactgggtcagaacagctggcagtgtgtctgccagaccggctggagagggcccggatgcaacgttgccatggaaacttcctgtgctgataacaaggataatgagggagatggcctggtggattgtttggaccctgactgctgcctgcagtcagcctgtcagaacagcctgctctgccgggggtcccgggacccactggacatcattcagcagggccagacggattggcccgcagtgaagtccttctatgaccgtatcaagctcttggcaggcaaggatagcacccacatcattcctggagagaaccctttcaacagcagcttggtttctctcatccgaggccaagtagtaactacagatggaactcccctggtcggtgtgaacgtgtcttttgtcaagtacccaaaatacggctacaccatcacccgccaggatggcacgttcgacctgatcgcaaatggaggtgcttccttgactctacactttgagcgagccccgttcatgagccaggagcgcactgtgtggctgccgtggaacagcttttacgccatggacaccctggtgatgaagaccgaggagaactccatccccagctgtgacctcagtggctttgtccggcctgatccaatcatcatctcctccccactgtccaccttctttagtgctgcccctgggcagaatcccatcgtgcctgagacccaggttcttcatgaagaaatcgagctccctggttccaatgtgaaacttcgctatctgagctctagaactgcagggtacaagtcactgctgaagatcaccatgacccagtccacagtgcccctgaacctcattagggttcacctgatggtggctgtcgaggggcatctcttccagaagtcattccaggcttctcccaacctggcctacaccttcatctgggacaagacagatgcgtatggccaaagggtgtatggactctcagatgctgttgtgtctgtcgggtttgaatatgagacctgtcccagtctaattctctgggagaaaaggacagccctccttcagggattcgagctggacccctccaacctcggtggctggtccctagacaaacaccacatcctcaatgttaaaagtggaatcctacacaaaggcactggggaaaaccagttcctgacccagcagcctgccatcatcaccagcatcatgggcaatggtcgccgccggagcatttcctgtcccagctgcaacggccttgctgaaggcaacaagctgctggccccagtggctctggctgttggaatcgatgggagcctctatgtgggtgacttcaattacatccgacgcatctttccctctcgaaatgtgaccagcatcttggagttacgcaacaacccagcacacaagtactacttggcagtggaccccgtgtccggctcgctctacgtgtccgacaccaacagcaggagaatctaccgcgtcaagtctctgagtggaaccaaagacctggctgggaattcggaagttgtggcagggacgggagagcagtgtctaccctttgatgaagcccgctgcggggatggagggaaggccatagatgcaaccctgatgagcccgagaggtattgcagtagacaagaatgggctcatgtactttgtcgatgccaccatgatccggaaggttgaccagaatggaatcatctccaccctgctgggctccaatgacctcactgccgtccggccgctgagctgtgattccagcatggatgtagcccaggttcgtctggagtggccaacagaccttgctgtcaatcccatggataactccttgtatgttctagagaacaatgtcatccttcgaatcaccgagaaccaccaagtcagcatcattgcgggacgccccatgcactgccaagttcctggcattgactactcactcagcaaactagccattcactctgccctggagtcagccagtgccattgccatttctcacactggggtcctctacatcactgagacagatgagaagaagattaaccgtctacgccaggtaacaaccaacggggagatctgccttttagctggggcagcctcggactgcgactgcaaaaacgatgtcaattgcaactgctattcaggagatgatgcctacgcgactgatgccatcttgaattccccatcatccttagctgtagctccagatggtaccatttacattgcagaccttggaaatattcggatcagggcggtcagcaagaacaagcctgttcttaatgccttcaaccagtatgaggctgcatcccccggagagcaggagttatatgttttcaacgctgatggcatccaccaatacactgtgagcctggtgacaggggagtacttgtacaatttcacatatagtactgacaatgatgtcactgaattgattgacaataatgggaattccctgaagatccgtcgggacagcagtggcatgccccgtcacctgctcatgcctgacaaccagatcatcaccctcaccgtgggcaccaatggaggcctcaaagtcgtgtccacacagaacctggagcttggtctcatgacctatgatggcaacactgggctcctggccaccaagagcgatgaaacaggatggacgactttctatgactatgaccacgaaggccgcctgaccaacgtgacgcgccccacgggggtggtaaccagtctgcaccgggaaatggagaaatctattaccattgacattgagaactccaaccgtgatgatgacgtcactgtcatcaccaacctctcttcagtagaggcctcctacacagtggtacaagatcaagttcggaacagctaccagctctgtaataatggtaccctgagggtgatgtatgctaatgggatgggtatcagcttccacagcgagccccatgtcctagcgggcaccatcacccccaccattggacgctgcaacatctccctgcctatggagaatggcttaaactccattgagtggcgcctaagaaaggaacagattaaaggcaaagtcaccatctttggcaggaagctccgggtccatggaagaaatctcttgtccattgactatgatcgaaatattcggactgaaaagatctatgatgaccaccggaagttcaccctgaggatcatttatgaccaggtgggccgccccttcctctggctgcccagcagcgggctggcagctgtcaacgtgtcatacttcttcaatgggcgcctggctgggcttcagcgtggggccatgagcgagaggacagacatcgacaagcaaggccgcatcgtgtcccgcatgttcgctgacgggaaagtgtggagctactcctaccttgacaagtccatggtcctcctgcttcagagccaacgtcagtatatatttgagtatgactcctctgaccgcctccttgccgtcaccatgcccagcgtggcccggcacagcatgtccacacacacctccatcggctacatccgtaatatttacaacccgcctgaaagcaatgcttcggtcatctttgactacagtgatgacggccgcatcctgaagacctcctttttgggcaccggacgccaggtgttctacaagtatgggaaactctccaagttatcagagattgtctacgacagtaccgccgtcaccttcgggtatgacgagaccactggtgtcttgaagatggtcaacctccaaagtgggggcttctcctgcaccatcaggtaccggaagattggccccctggtggacaagcagatctacaggttctccgaggaaggcatggtcaatgccaggtttgactacacctatcatgacaacagcttccgcatcgcaagcatcaagcccgtcataagtgagactcccctccccgttgacctctaccgctatgatgagatttctggcaaggtggaacactttggtaagtttggagtcatctattatgacatcaaccagatcatcaccactgccgtgatgaccctcagcaaacacttcgacacccatgggcggatcaaggaggtccagtatgagatgttccggtccctcatgtactggatgacggtgcaatatgacagcatgggcagggtgatcaagagggagctaaaactggggccctatgccaataccacgaagtacacctatgactacgatggggacgggcagctccagagcgtggccgtcaatgaccgcccgacctggcgctacagctatgaccttaatgggaatctccacttactgaacccaggcaacagtgtgcgcctcatgcccttgcgctatgacctccgggatcggataaccagactcggggatgtgcagtacaaaattgacgacgatggctatctgtgccagagagggtctgacatcttcgaatacaattccaagggcctcctaacaagagcctacaacaaggccagcgggtggagtgtccagtaccgctatgatggcgtaggacggcgggcttcctacaagaccaacctgggccaccacctgcagtacttctactctgacctccacaacccgacgcgcatcacccatgtctacaatcactccaactcggagattacctcactgtactacgacctccagggccacctctttgccatggagagcagcagtggggaggagtactatgttgcctctgataacacagggactcctctggctgtgttcagcatcaacggcctcatgatcaaacagctgcagtacacggcctatggggagatttattatgactccaaccccgacttccagatggtcattggcttccatgggggactctatgaccccctgaccaagctggtccacttcactcagcgtgattatgatgtgctggcaggacgatggacctccccagactataccatgtggaaaaacgtgggcaaggagccggccccctttaacctgtatatgttcaagagcaacaatcctctcagcagtgagctagatttgaagaactacgtgacagatgtgaaaagctggcttgtgatgtttggatttcagcttagcaacatcattcctggcttcccgagagccaaaatgtatttcgtgcctcctccctatgaattgtcagagagtcaagcaagtgagaatggacagctcattacaggtgtccaacagacaacagagagacataaccaggccttcatggctctggaaggacaggtcattactaaaaagctccacgccagcatccgagagaaagcaggtcactggtttgccaccaccacgcccatcattggcaaaggcatcatgtttgccatcaaagaagggcgggtgaccacgggcgtgtccagcatcgccagcgaagatagccgcaaggtggcatctgtgctgaacaacgcctactacctggacaagatgcactacagcatcgagggcaaggacacccactactttgtgaagattggctcagccgatggcgacctggtcacactaggcaccaccatcggccgcaaggtgctagagagcggggtgaacgtgaccgtgtcccagcccacgctgctggtcaacggcaggactcgaaggttcacgaacattgagttccagtactccacgctgctgctcagcatccgctatggcctcacccccgacaccctggacgaagagaaggcccgcgtcctggaccaggcgagacagagggccctgggcacggcctgggccaaggagcagcagaaagccagggacgggagagaggggagccgcctgtggactgagggcgagaagcagcagcttctgagcaccgggcgcgtgcaagggtacgagggatattacgtgcttcccgtggagcaatacccagagcttgcagacagtagcagcaacatccagtttttaagacagaatgagatgggaaagaggtaacaaaataatctgctgccattccttgtctgaatggctcagcaggagtaactgttatctcctctcctaaggagatgaagacctaacaggggcactgcggctgggctgctttaggagaccaagtggcaagaaagctcacattttttgagttcaaatgctactgtccaagcgagaagtccctcatcctgaagtagactaaagcccggctgaaaattccgaggaaaacaaaacaaacgaatgaatgaacagacacacacaatgttccaagttcccctaaaatatgacccacttgttctgggtctacgcagaaaagagacgcaaagtgtccaaaaggaacaaaagaacaaaaacgaataagcaaagaagaaaacaaacaaaaacaaaacaaaacaaacacacggaccaataaacaaagaagcgaagataagaaagaaggcctcatatccaattacctcactcattcacatgtgagcgacacgcagacatccgcgagggccagcgtcaccagaccagctgcgggacaaaccactcagactgcttgtaggacaaatacttctgacattttcgtttaagcaaatacaggtgcatttaaaacacgactttgggggtgatttgtgtgtagcgcctggggaggggggataaaagaggaggagtgagcactggaaatactttttaaagaaaaaaaaacatgagggaataaaagaaattcctatcaaaaatcaaagtgaaataataccatccagcacttaactctcaggtcccaactaagtctggcctgagctaatttatttgagcgcagagtgtaaaatttaattcaaaatggtggctataatcactacagataaatttcatactcttttgtctttggagattccattgtggacagtaatacgcagttacagggtgtagtctgtttagattccgtagttcgtgggtatcagtttcggtagaggtgcagcatcgtgacacttttgctaacaggtaccacttctgatcaccctgtacatacatgagccgaaaggcacaatcactgtttcagatttaaaattattagtgtgtttgtttggtccagaaactgagacaatcacatgacagtcaccacgaggagagaaaatttaaaaaataaaaataaaaacaaaaaaaattttaaaaattaaaaaaacaaaaataaagtctaataagaactttggtacaggaacttttttgtaatatacatgtatgaattgttcatcgagtttttatattaattttaatttgctgctaagcaaagactagggacaggcaaagataatttatggcaaagtgtttaaattgtttatacataaataaagtctctaaaactcctgtgga

SEQ ID NO: 5495 - protein, 2526 aa, Homo sapiens
MVSPPLLIISVAGTIECKPDHLLWRPGSTSPQSVSFLHGKVVMESLGPPNHHSQSTLRPPLPPPHNHTLSHHHSSANSLNRNSLTNRRSQIHAPAPAPNDLATTPESVQLQDSWVLNSNVPLETRHFLFKTSSGSTPLFSSSSPGYPLTSGTVYTPPPRLLPRNTFSRKAFKLKKPSKYCSWKCAALSAIAAALLLAILLAYFIVPWSLKNSSIDSGEAEVGRRVTQEVPPGVFWRSQIHISQPQFLKFNISLGKDALFGVYIRRGLPPSHAQYDFMERLDGKEKWSVVESPRERRSIQTLVQNEAVFVQYLDVGLWHLAFYNDGKDKEMVSFNTVVLDSVQDCPRNCHGNGECVSGVCHCFPGFLGADCAKAACPVLCSGNGQYSKGTCQCYSGWKGAECDVPMNQCIDPSCGGHGSCIDGNCVCSAGYKGEHCEEVDCLDPTCSSHGVCVNGECLCSPGWGGLNCELARVQCPDQCSGHGTYLPDTGLCSCDPNWMGPDCSVEVCSVDCGTHGVCIGGACRCEEGWTGAACDQRVCHPRCIEHGTCKDGKCECREGWNGEHCTIDGCPDLCNGNGRCTLGQNSWQCVCQTGWRGPGCNVAMETSCADNKDNEGDGLVDCLDPDCCLQSACQNSLLCRGSRDPLDIIQQGQTDWPAVKSFYDRIKLLAGKDSTHIIPGENPFNSSLVSLIRGQVVTTDGTPLVGVNVSFVKYPKYGYTITRQDGTFDLIANGGASLTLHFERAPFMSQERTVWLPWNSFYAMDTLVMKTEENSIPSCDLSGFVRPDPIIISSPLSTFFSAAPGQNPIVPETQVLHEEIELPGSNVKLRYLSSRTAGYKSLLKITMTQSTVPLNLIRVHLMVAVEGHLFQKSFQASPNLAYTFIWDKTDAYGQRVYGLSDAVVSVGFEYETCPSLILWEKRTALLQGFELDPSNLGGWSLDKHHILNVKSGILHKGTGENQFLTQQPAIITSIMGNGRRRSISCPSCNGLAEGNKLLAPVALAVGIDGSLYVGDFNYIRRIFPSRNVTSILELRNNPAHKYYLAVDPVSGSLYVSDTNSRRIYRVKSLSGTKDLAGNSEVVAGTGEQCLPFDEARCGDGGKAIDATLMSPRGIAVDKNGLMYFVDATMIRKVDQNGIISTLLGSNDLTAVRPLSCDSSMDVAQVRLEWPTDLAVNPMDNSLYVLENNVILRITENHQVSIIAGRPMHCQVPGIDYSLSKLAIHSALESASAIAISHTGVLYITETDEKKINRLRQVTTNGEICLLAGAASDCDCKNDVNCNCYSGDDAYATDAILNSPSSLAVAPDGTIYIADLGNIRIRAVSKNKPVLNAFNQYEAASPGEQELYVFNADGIHQYTVSLVTGEYLYNFTYSTDNDVTELIDNNGNSLKIRRDSSGMPRHLLMPDNQIITLTVGTNGGLKVVSTQNLELGLMTYDGNTGLLATKSDETGWTTFYDYDHEGRLTNVTRPTGVVTSLHREMEKSITIDIENSNRDDDVTVITNLSSVEASYTVVQDQVRNSYQLCNNGTLRVMYANGMGISFHSEPHVLAGTITPTIGRCNISLPMENGLNSIEWRLRKEQIKGKVTIFGRKLRVHGRNLLSIDYDRNIRTEKIYDDHRKFTLRIIYDQVGRPFLWLPSSGLAAVNVSYFFNGRLAGLQRGAMSERTDIDKQGRIVSRMFADGKVWSYSYLDKSMVLLLQSQRQYIFEYDSSDRLLAVTMPSVARHSMSTHTSIGYIRNIYNPPESNASVIFDYSDDGRILKTSFLGTGRQVFYKYGKLSKLSEIVYDSTAVTFGYDETTGVLKMVNLQSGGFSCTIRYRKIGPLVDKQIYRFSEEGMVNARFDYTYHDNSFRIASIKPVISETPLPVDLYRYDEISGKVEHFGKFGVIYYDINQIITTAVMTLSKHFDTHGRIKEVQYEMFRSLMYWMTVQYDSMGRVIKRELKLGPYANTTKYTYDYDGDGQLQSVAVNDRPTWRYSYDLNGNLHLLNPGNSVRLMPLRYDLRDRITRLGDVQYKIDDDGYLCQRGSDIFEYNSKGLLTRAYNKASGWSVQYRYDGVGRRASYKTNLGHHLQYFYSDLHNPTRITHVYNHSNSEITSLYYDLQGHLFAMESSSGEEYYVASDNTGTPLAVFSINGLMIKQLQYTAYGEIYYDSNPDFQMVIGFHGGLYDPLTKLVHFTQRDYDVLAGRWTSPDYTMWKNVGKEPAPFNLYMFKSNNPLSSELDLKNYVTDVKSWLVMFGFQLSNIIPGFPRAKMYFVPPPYELSESQASENGQLITGVQQTTERHNQAFMALEGQVITKKLHASIREKAGHWFATTTPIIGKGIMFAIKEGRVTTGVSSIASEDSRKVASVLNNAYYLDKMHYSIEGKDTHYFVKIGSADGDLVTLGTTIGRKVLESGVNVTVSQPTLLVNGRTRRFTNIEFQYSTLLLSIRYGLTPDTLDEEKARVLDQARQRALGTAWAKEQQKARDGREGSRLWTEGEKQQLLSTGRVQGYEGYYVLPVEQYPELADSSSNIQFLRQNEMGKR

SEQ ID NO: 5496 - DNA, 594 bp, Homo sapiens
agtgcccgctgcgggtgctggggaatggcgccttacaggctgcccacctgcctcctcagggtggaaggcggggcttgggtgtgagcgtgctgaatcagaactttcctggaaagtcgccacttggtgtggtcagaggatcactgaagtcctgagtatgtgtctcctctcgccacttccactgcctctactcagttcagcacctcccgagggatgtctaactggcctccatgcttccgctctgcaccccacattccttatcagcacagcaacctgagtgagcctttcaatcaggagctggccgggcacggtggctcacgcctgtaattccaacactttgggaggccaaggcaggcggatcaccaggtcaggaggttgagaccagactgtccaacatggtgaaactccgtctctactaaaaatacaaaaattagctgggcgtggtggcgggtgcctgtaatcccagctacctgggaggctgaggcaggagaatcgcttgaacccgggaggcagaggttgcagtgagcagagatcgtgctactgcactccagcctggcaacagagtgagactccgtcacaaaaaaaaaaaaaaaaaaa

SEQ ID NO: 5497 - protein, 39 aa, Homo sapiens
MCLLSPLPLPLLSSAPPEGCLTGLHASALHPTFLISTAT

SEQ ID NO: 5498 - DNA, 1781 bp, Homo sapiens
gggtgaccacgggcgtgtccagcatcgccagcgaagatagccgcaaggtggcatctgtgctgaacaacgcctagctgctggtcaacggcaggactcgaaggttcacgaacattgagttccagtactccacgctgctgctcagcatccgctatggcctcacccccgacaccctggacgaagagaaggcccgcgtcctggaccaggcgagacagagggccctgggcacggcctgggccaaggagcagcagaaagccagggacgggagagaggggagccgcctgtggactgagggcgagaagcagcagcttctgagcaccgggcgcgtgcaagggtacgagggatattacgtgcttcccgtggagcaatacccagagcttgcagacagtagcagcaacatccagtttttaagacagaatgagatgggaaagaggtaacaaaataatctgctgccattccttgtctgaatggctcagcaggagtaactgttatctcctctcctaaggagatgaagacctaacaggggcactgcggctgggctgctttaggagaccaagtggcaagaaagctcacattttttgagttcaaatgctactgtccaagcgagaagtccctcatcctgaagtagactaaagcccggctgaaaattccgaggaaaacaaaacaaacgaatgaatgaacagacacacacaatgttccaagttcccctaaaatatgacccacttgttctgggtctacgcagaaaagagacgcaaagtgtccaaaaggaacaaaagaacaaaaacgaataagcaaagaagaaaacaaacaaaaacaaaacaaaacaaacacacggaccaataaacaaagaagcgaagataagaaagaaggcctcatatccaattacctcactcattcacatgtgagcgacacgcagacatccgcgagggccagcgtcaccagaccagctgcgggacaaaccactcagactgcttgtaggacaaatacttctgacattttcgtttaagcaaatacaggtgcatttaaaacacgactttgggggtgatttgtgtgtagcgcctggggaggggggataaaagaggaggagtgagcactggaaatactttttaaagaaaaaaaaacatgagggaataaaagaaattcctatcaaaaatcaaagtgaaataataccatccagcacttaactctcaggtcccaactaagtctggcctgagctaatttatttgagcgcagagtgtaaaatttaattcaaaatggtggctataatcactacagataaatttcatactcttttgtctttggagattccattgtggacagtaatacgcagttacagggtgtagtctgtttagattccgtagttcgtgggtatcagtttcggtagaggtgcagcatcgtgacacttttgctaacaggtaccacttctgatcaccctgtacatacatgagccgaaaggcacaatcactgtttcagatttaaaattattagtgtgtttgtttggtccagaaactgagacaatcacatgacagtcaccacgaggagagaaaatttaaaaaataaaaataaaaacaaaaaaaattttaaaaattaaaaaaacaaaaataaagtctaataagaactttggtacaggaacttttttgtaatatacatgtatgaattgttcatcgagtttttatattaattttaatttgctgctaagcaaagactagggacaggcaaagataatttatggcaaagtgtttaaattgtttatacataaataaagtctctaaaactcctgtgga

SEQ ID NO: 5499 - protein, 53 aa, Homo sapiens
MASPPTPWTKRRPASWTRRDRGPWARPGPRSSRKPGTGERGAACGLRARSSSF

SEQ ID NO: 5500 - DNA, 4575 bp, Homo sapiens
ggggcagcgcggttacctgcaccgcccgagccgcacctggcggaggcagaagtcacaaacccggcgagctcagagcggtggagcggagaggagggacggcacccggctgcagggaggagggaggcggcagcggcagcggcggcgtggagggcgcagcgcgccgcgcggcggaggagggcagacggcggcggcggcggcgctcggctcgctctgcccggccggctgggcgcgcacccgggctcgcaccgcgccgctgcggacgcacatggcagcgtgagaggccggcggcgggaggagcgggcggcgccgggtcggggctgcagggccgcatggacagcggcgccaccccggccggcccctactagggccccccatctgcgggcgccaccccccggatcatggtgcctcggcggccgcccgggctaagagcggccggctggagccgctgagcccccgctgcggccgggagctgcatgggggagcgccggcagcgcttgggaagatgccccggccggagctgcccctgccggagggctgggaggaggcgcgcgacttcgacggcaaggtctactacatagaccacacgaaccgcaccaccagctggatcgacccgcgggacaggtacaccaaaccgctcacctttgctgactgcattagtgatgagttgccgctaggatgggaagaggcatatgacccacaggttggagattacttcatagaccacaacaccaaaaccactcagattgaggatcctcgagtacaatggcggcgggagcaggaacatatgctgaaggattacctggtggtggcccaggaggctctgagtgcacaaaaggagatctaccaggtgaagcagcagcgcctggagcttgcacagcaggagtaccagcaactgcatgccgtctgggagcataagctgggctcccaggtcagcttggtctctggttcatcatccagctccaagtatgaccctgagatcctgaaagctgaaattgccactgcaaaatcccgggtcaacaagctgaagagagagatggttcacctccagcacgagctgcagttcaaagagcgtggctttcagaccctgaagaaaatcgataagaaaatgtctgatgctcagggcagctacaaactggatgaagctcaggctgtcttgagagaaacaaaagccatcaaaaaggctattacctgtggggaaaaggaaaagcaagatctcattaagagccttgccatgttgaaggacggcttccgcactgacagggggtctcactcagacctgtggtccagcagcagctctctggagagttcgagtttcccgctaccgaaacagtacctggatgtgagctcccagacagacatctcgggaagcttcggcatcaacagcaacaatcagttggcagagaaggtcagattgcgccttcgatatgaagaggctaagagaaggatcgccaacctgaagatccagctggccaagcttgacagtgaggcctggcctggggtgctggactcagagagggaccggctgatccttatcaacgagaaggaggagctgctgaaggagatgcgcttcatcagcccccgcaagtggacccagggggaggtggagcagctggagatggcccggaagcggctggaaaaggacctgcaggcagcccgggacacccagagcaaggcgctgacggagaggttaaagttaaacagtaagaggaaccagcttgtgagagaactggaggaagccacccggcaggtggcaactctgcactcccagctgaaaagtctctcaagcagcatgcagtccctgtcctcaggcagcagccccggatccctcacgtccagccggggctccctggttgcatccagcctggactcctccacttcagccagcttcactgacctctactatgacccctttgagcagctggactcagagctgcagagcaaggtggagttcctgctcctggagggggccaccggcttccggccctcaggctgcatcaccaccatccacgaggatgaggtggccaagacccagaaggcagagggaggtggccgcctgcaggctctgcgttccctgtctggcaccccaaagtccatgacctccctatccccacgttcctctctctcctccccctccccaccctgttcccctctcatggctgaccccctcctggctggtgatgccttcctcaactccttggagtttgaagacccggagctgagtgccactctttgtgaactgagccttggtaacagcgcccaggaaagataccggctggaggaaccaggaacggagggcaagcagctgggccaagctgtgaatacggcccaggggtgtggcctgaaagtggcctgtgtctcagccgccgtatcggacgagtcagtggctggagacagtggtgtgtacgaggcttccgtgcagagactgggtgcttcagaagctgctgcatttgacagtgacgaatcggaagcagtgggtgcgacccgaattcagattgccctgaagtatgatgagaagaataagcaatttgcaatattaatcatccagctgagtaacctttctgctctgttgcagcaacaagaccagaaagtgaatatccgcgtggctgtccttccttgctctgaaagcacaacctgcctgttccggacccggcctctggacgcctcagacactctagtgttcaatgaggtgttctgggtatccatgtcctatccagcccttcaccagaagaccttaagagtcgatgtctgtaccaccgacaggagccatctggaagagtgcctgggaggcgcccagatcagcctggcggaggtctgccggtctggggagaggtcgactcgctggtacaaccttctcagctacaaatacttgaagaaacagagcagggagctcaagccagtgggagtcatggcccctgcctcagggcctgccagcacggacgctgtgtctgctctgttggaacagacagcagtggagctggagaagaggcaggagggcaggagcagcacacagacactggaagacagctggaggtatgaggagaccagtgagaatgaggcagtagccgaggaagaggaggaggaggtggaggaggaggagggagaagaggatgttttcaccgagaaagcctcacctgatatggatgggtacccagcattaaaggtggacaaagagaccaacacggagaccccggccccatcccccacagtggtgcgacctaaggaccggagagtgggcaccccgtcccaggggccatttcttcgagggagcaccatcatccgctctaagaccttctccccaggaccccagagccagtacgtgtgccggctgaatcggagtgatagtgacagctccactctgtccaaaaagccaccttttgttcgaaactccctggagcgacgcagcgtccggatgaagcggccttcctcggtcaagtcgctgcgctccgagcgtctgatccgtacctcgctggacctggagttagacctgcaggcgacaagaacctggcacagccaattgacccaggagatctcggtgctgaaggagctcaaggagcagctggaacaagccaagagccacggggagaaggagctgccacagtggttgcgtgaggacgagcgtttccgcctgctgctgaggatgctggagaagcggatggaccgagcggagcacaagggtgagcttcagacagacaagatgatgagggcagctgccaaggatgtgcacaggctccgaggccagagctgtaaggaacccccagaagttcagtctttcagggagaagatggcatttttcacccggcctcggatgaatatcccagctctctctgcagatgacgtctaatcgccagaaaagtatttcctttgttccactgaccaggctgtgaacattgactgtggctaaagttatttatgtggtgttatatgaaggtactgagtcacaagtcctctagtgctcttgttggtttgaagatgaaccgactttttagtttgggtcctactgttgttattaaaaacagaacaaaaacaaaacacacacacacacaaaaacagaaacaaaaaaaaccagcattaaaataataagattgtatagtttgtatatttaggagtgtatttttgggaaagaaaatttaaatgaactaaagcagtattgagttgctgctcttcttaaaatcgtttagattttttttggtttgtacagctccaccttttagaggtcttactgcaataagaagtaatgcctgggggacggtaatcctaataggacgtcccgcacttgtcacagtacagctaatttttcctagttaacatattttgtacaatattaaaaaaatgcacagaaaccattgggggggattcagaggtgcatccacggatcttcttgagctgtgacgtgtttttatgtggctgcccaacgtggagcgggcagtgtgataggctgggtgggctaagcagcctagtctatgtgggtgacaggccacgctggtctcagatgcccagtgaagccactaacatgagtgaggggagggctgtggggaactccattcagttttatctccatcaataaagtggcctttc

SEQ ID NO: 5501 - protein, 1112 aa, Homo sapiens
MPRPELPLPEGWEEARDFDGKVYYIDHTNRTTSWIDPRDRYTKPLTFADCISDELPLGWEEAYDPQVGDYFIDHNTKTTQIEDPRVQWRREQEHMLKDYLVVAQEALSAQKEIYQVKQQRLELAQQEYQQLHAVWEHKLGSQVSLVSGSSSSSKYDPEILKAEIATAKSRVNKLKREMVHLQHELQFKERGFQTLKKIDKKMSDAQGSYKLDEAQAVLRETKAIKKAITCGEKEKQDLIKSLAMLKDGFRTDRGSHSDLWSSSSSLESSSFPLPKQYLDVSSQTDISGSFGINSNNQLAEKVRLRLRYEEAKRRIANLKIQLAKLDSEAWPGVLDSERDRLILINEKEELLKEMRFISPRKWTQGEVEQLEMARKRLEKDLQAARDTQSKALTERLKLNSKRNQLVRELEEATRQVATLHSQLKSLSSSMQSLSSGSSPGSLTSSRGSLVASSLDSSTSASFTDLYYDPFEQLDSELQSKVEFLLLEGATGFRPSGCITTIHEDEVAKTQKAEGGGRLQALRSLSGTPKSMTSLSPRSSLSSPSPPCSPLMADPLLAGDAFLNSLEFEDPELSATLCELSLGNSAQERYRLEEPGTEGKQLGQAVNTAQGCGLKVACVSAAVSDESVAGDSGVYEASVQRLGASEAAAFDSDESEAVGATRIQIALKYDEKNKQFAILIIQLSNLSALLQQQDQKVNIRVAVLPCSESTTCLFRTRPLDASDTLVFNEVFWVSMSYPALHQKTLRVDVCTTDRSHLEECLGGAQISLAEVCRSGERSTRWYNLLSYKYLKKQSRELKPVGVMAPASGPASTDAVSALLEQTAVELEKRQEGRSSTQTLEDSWRYEETSENEAVAEEEEEEVEEEEGEEDVFTEKASPDMDGYPALKVDKETNTETPAPSPTVVRPKDRRVGTPSQGPFLRGSTIIRSKTFSPGPQSQYVCRLNRSDSDSSTLSKKPPFVRNSLERRSVRMKRPSSVKSLRSERLIRTSLDLELDLQATRTWHSQLTQEISVLKELKEQLEQAKSHGEKELPQWLREDERFRLLLRMLEKRMDRAEHKGELQTDKMMRAAAKDVHRLRGQSCKEPPEVQSFREKMAFFTRPRMNIPALSADDV

SEQ ID NO: 5502 - DNA, 572 bp, Homo sapiens
aagggcgaaacgccatctcaaaaaaaaaggtttagtaacttgctcaagatcaccaacaggtgttgcatccaggactggagcccacctagctggattcttgcatctacactcatactagctgtagcctggtctggctctgtcctggcttattaatccatctcagggccccagagtgccctgttgacagctgggcttgagagttaccatttattcttaaaatgggtgaacctgatgtggatctcagggagagactttgctaaggagccttaaccagagaagccagtgagatcctcatggcagcttaggagacttgtttgtctttgtatcactaacagtgagaacaataactggcacctggtgataatggtgataaataatcatgattgtctttaaagatccttatccattgtctgtcacgtgccaaacactattgctcatcatatttttatggcattttgcaaatgaggaaactgaggccgagagacaagtcaagtgacaagctcatttttccactatggaaaaaaatgtgtatgtgtttgttgttccacccaaacatgggattgcataccaca

SEQ ID NO: 5503 - protein, 38 aa, Homo sapiens [sequence omitted]

SEQ ID NO: 5504 - DNA, 3918 bp, Homo sapiens
gaagagaaagaaaggactggctgggttgtaggcagcagggccgagcagctgagggctaagtgcacagcaggccctagcaaatgcttctggaattgaattggtccaaggggagactccagctttagttcaacatgggctgtatccgaatccttctgaaatttgctgggattccatgagggagtcaggtacaccaaaccgctcacctttgctgactgcattagtgatgagttgccgctaggatgggaagaggcatatgacccacaggttggagattacttcatagaccacaacaccaaaaccactcagattgaggatcctcgagtacaatggcggcgggagcaggaacatatgctgaaggattacctggtggtggcccaggaggctctgagtgcacaaaaggagatctaccaggtgaagcagcagcgcctggagcttgcacagcaggagtaccagcaactgcatgccgtctgggagcataagctgggctcccaggtcagcttggtctctggttcatcatccagctccaagtatgaccctgagatcctgaaagctgaaattgccactgcaaaatcccgggtcaacaagctgaagagagagatggttcacctccagcacgagctgcagttcaaagagcgtggctttcagaccctgaagaaaatcgataagaaaatgtctgatgctcagggcagctacaaactggatgaagctcaggctgtcttgagagaaacaaaagccatcaaaaaggctattacctgtggggaaaaggaaaagcaagatctcattaagagccttgccatgttgaaggacggcttccgcactgacagggggtctcactcagacctgtggtccagcagcagctctctggagagttcgagtttcccgctaccgaaacagtacctggatgtgagctcccagacagacatctcgggaagcttcggcatcaacagcaacaatcagttggcagagaaggtcagattgcgccttcgatatgaagaggctaagagaaggatcgccaacctgaagatccagctggccaagcttgacagtgaggcctggcctggggtgctggactcagagagggaccggctgatccttatcaacgagaaggaggagctgctgaaggagatgcgcttcatcagcccccgcaagtggacccagggggaggtggagcagctggagatggcccggaagcggctggaaaaggacctgcaggcagcccgggacacccagagcaaggcgctgacggagaggttaaagttaaacagtaagaggaaccagcttgtgagagaactggaggaagccacccggcaggtggcaactctgcactcccagctgaaaagtctctcaagcagcatgcagtccctgtcctcaggcagcagccccggatccctcacgtccagccggggctccctggttgcatccagcctggactcctccacttcagccagcttcactgacctctactatgacccctttgagcagctggactcagagctgcagagcaaggtggagttcctgctcctggagggggccaccggcttccggccctcaggctgcatcaccaccatccacgaggatgaggtggccaagacccagaaggcagagggaggtggccgcctgcaggctctgcgttccctgtctggcaccccaaagtccatgacctccctatccccacgttcctctctctcctccccctccccaccctgttcccctctcatggctgaccccctcctggctggtgatgccttcctcaactccttggagtttgaagacccggagctgagtgccactctttgtgaactgagccttggtaacagcgcccaggaaagataccggctggaggaaccaggaacggagggcaagcagctgggccaagctgtgaatacggcccaggggtgtggcctgaaagtggcctgtgtctcagccgccgtatcggacgagtcagtggctggagacagtggtgtgtacgaggcttccgtgcagagactgggtgcttcagaagctgctgcatttgacagtgacgaatcggaagcagtgggtgcgacccgaattcagattgccctgaagtatgatgagaagaataagcaatttgcaatattaatcatccagctgagtaacctttctgctctgttgcagcaacaagaccagaaagtgaatatccgcgtggctgtccttccttgctctgaaagcacaacctgcctgttccggacccggcctctggacgcctcagacactctagtgttcaatgaggtgttctgggtatccatgtcctatccagcccttcaccagaagaccttaagagtcgatgtctgtaccaccgacaggagccatctggaagagtgcctgggaggcgcccagatcagcctggcggaggtctgccggtctggggagaggtcgactcgctggtacaaccttctcagctacaaatacttgaagaaacagagcagggagtgttttcaccgagaaagcctcacctgatatggatgggtacccagcattaaaggtggacaaagagaccaacacggagaccccggccccatcccccacagtggtgcgacctaaggaccggagagtgggcaccccgtcccaggggccatttcttcgagggagcaccatcatccgctctaagaccttctccccaggaccccagagccagtacgtgtgccggctgaatcggagtgatagtgacagctccactctgtccaaaaagccaccttttgttcgaaactccctggagcgacgcagcgtccggatgaagcggccttcctcggtcaagtcgctgcgctccgagcgtctgatccgtacctcgctggacctggagttagacctgcaggcgacaagaacctggcacagccaattgacccaggagatctcggtgctgaaggagctcaaggagcagctggaacaagccaagagccacggggagaaggagctgccacagtggttgcgtgaggacgagcgtttccgcctgctgctgaggatgctggagaagcggatggaccgagcggagcacaagggtgagcttcagacagacaagatgatgagggcagctgccaaggatgtgcacaggctccgaggccagagctgtaaggaacccccagaagttcagtctttcagggagaagatggcatttttcacccggcctcggatgaatatcccagctctctctgcagatgacgtctaatcgccagaaaagtatttcctttgttccactgaccaggctgtgaacattgactgtggctaaagttatttatgtggtgttatatgaaggtactgagtcacaagtcctctagtgctcttgttggtttgaagatgaaccgactttttagtttgggtcctactgttgttattaaaaacagaacaaaaacaaaacacacacacacacaaaaacagaaacaaaaaaaaccagcattaaaataataagattgtatagtttgtatatttaggagtgtatttttgggaaagaaaatttaaatgaactaaagcagtattgagttgctgctcttcttaaaatcgtttagattttttttggtttgtacagctccaccttttagaggtcttactgcaataagaagtaatgcctgggggacggtaatcctaataggacgtcccgcacttgtcacagtacagctaatttttcctagttaacatattttgtacaatattaaaaaaatgcacagaaaccattgggggggattcagaggtgcatccacggatcttcttgagctgtgacgtgtttttatgtggctgcccaacgtggagcgggcagtgtgataggctgggtgggctaagcagcctagtctatgtgggtgacaggccacgctggtctcagatgcccagtgaagccactaacatgagtgaggggagggctgtggggaactccattcagttttatctccatcaataaagtggcctttc

SEQ ID NO: 5505 - protein, 709 aa, Homo sapiens
MLKDYLVVAQEALSAQKEIYQVKQQRLELAQQEYQQLHAVWEHKLGSQVSLVSGSSSSSKYDPEILKAEIATAKSRVNKLKREMVHLQHELQFKERGFQTLKKIDKKMSDAQGSYKLDEAQAVLRETKAIKKAITCGEKEKQDLIKSLAMLKDGFRTDRGSHSDLWSSSSSLESSSFPLPKQYLDVSSQTDISGSFGINSNNQLAEKVRLRLRYEEAKRRIANLKIQLAKLDSEAWPGVLDSERDRLILINEKEELLKEMRFISPRKWTQGEVEQLEMARKRLEKDLQAARDTQSKALTERLKLNSKRNQLVRELEEATRQVATLHSQLKSLSSSMQSLSSGSSPGSLTSSRGSLVASSLDSSTSASFTDLYYDPFEQLDSELQSKVEFLLLEGATGFRPSGCITTIHEDEVAKTQKAEGGGRLQALRSLSGTPKSMTSLSPRSSLSSPSPPCSPLMADPLLAGDAFLNSLEFEDPELSATLCELSLGNSAQERYRLEEPGTEGKQLGQAVNTAQGCGLKVACVSAAVSDESVAGDSGVYEASVQRLGASEAAAFDSDESEAVGATRIQIALKYDEKNKQFAILIIQLSNLSALLQQQDQKVNIRVAVLPCSESTTCLFRTRPLDASDTLVFNEVFWVSMSYPALHQKTLRVDVCTTDRSHLEECLGGAQISLAEVCRSGERSTRWYNLLSYKYLKKQSRECFHRESLT

SEQ ID NO: 5506 - DNA, 3998 bp, Homo sapiens
gaagagaaagaaaggactggctgggttgtaggcagcagggccgagcagctgagggctaagtgcacagcaggccctagcaaatgcttctggaattgaattggtccaaggggagactccagctttagttcaacatgggctgtatccgaatccttctgaaatttgctgggattccatgagggagtcaggtacaccaaaccgctcacctttgctgactgcattagtgatgagttgccgctaggatgggaagaggcatatgacccacaggttggagattacttcatagaccacaacaccaaaaccactcagattgaggatcctcgagtacaatggcggcgggagcaggaacatatgctgaaggattacctggtggtggcccaggaggctctgagtgcacaaaaggagatctaccaggtgaagcagcagcgcctggagcttgcacagcaggagtaccagcaactgcatgccgtctgggagcataagctgggctcccaggtcagcttggtctctggttcatcatccagctccaagtatgaccctgagatcctgaaagctgaaattgccactgcaaaatcccgggtcaacaagctgaagagagagatggttcacctccagcacgagctgcagttcaaagagcgtggctttcagaccctgaagaaaatcgataagaaaatgtctgatgctcagggcagctacaaactggatgaagctcaggctgtcttgagagaaacaaaagccatcaaaaaggctattacctgtggggaaaaggaaaagcaagatctcattaagagccttgccatgttgaaggacggcttccgcactgacagggggtctcactcagacctgtggtccagcagcagctctctggagagttcgagtttcccgctaccgaaacagtacctggatgtgagctcccagacagacatctcgggaagcttcggcatcaacagcaacaatcagttggcagagaaggtcagattgcgccttcgatatgaagaggctaagagaaggatcgccaacctgaagatccagctggccaagcttgacagtgaggcctggcctggggtgctggactcagagagggaccggctgatccttatcaacgagaaggaggagctgctgaaggagatgcgcttcatcagcccccgcaagtggacccagggggaggtggagcagctggagatggcccggaagcggctggaaaaggacctgcaggcagcccgggacacccagagcaaggcgctgacggagaggttaaagttaaacagtaagaggaaccagcttgtgagagaactggaggaagccacccggcaggtggcaactctgcactcccagctgaaaagtctctcaagcagcatgcagtccctgtcctcaggcagcagccccggatccctcacgtccagccggggctccctggttgcatccagcctggactcctccacttcagccagcttcactgacctctactatgacccctttgagcagctggactcagagctgcagagcaaggtggagttcctgctcctggagggggccaccggcttccggccctcaggctgcatcaccaccatccacgaggatgaggtggccaagacccagaaggcagagggaggtggccgcctgcaggctctgcgttccctgtctggcaccccaaagtccatgacctccctatccccacgttcctctctctcctccccctccccaccctgttcccctctcatggctgaccccctcctggctggtgatgccttcctcaactccttggagtttgaagacccggagctgagtgccactctttgtgaactgagccttggtaacagcgcccaggaaagataccggctggaggaaccaggaacggagggcaagcagctgggccaagctgtgaatacggcccaggggtgtggcctgaaagtggcctgtgtctcagccgccgtatcggacgagtcagtggctggagacagtggtgtgtacgaggcttccgtgcagagactgggtgcttcagaagctgctgcatttgacagtgacgaatcggaagcagtgggtgcgacccgaattcagattgccctgaagtatgatgagaagaataagcaatttgcaatattaatcatccagctgagtaacctttctgctctgttgcagcaacaagaccagaaagtgaatatccgcgtggctgtccttccttgctctgaaagcacaacctgcctgttccggacccggcctctggacgcctcagacactctagtgttcaatgaggtgttctgggtatccatgtcctatccagcccttcaccagaagaccttaagagtcgatgtctgtaccaccgacaggagccatctggaagagtgcctgggaggcgcccagatcagcctggcggaggtctgccggtctggggagaggtcgactcgctggtacaaccttctcagctacaaatacttgaagaaacagagcagggagtgttttcaccgagaaagcctcacctgatatggatgggtacccagcattaaaggtggacaaagagaccaacacggagaccccggccccatcccccacagtggtgcgacctaaggaccggagagtgggcaccccgtcccaggggccatttcttcgagggagcaccatcatccgctctaagaccttctccccaggaccccagagccagtacgtgtgccggctgaatcggagtgatagtgacagctccactctgtccaaaaagccaccttttgttcgaaactccctggagcgacgcagcgtccggatgaagcggccttcctcggtcaagtcgctgcgctccgagcgtctgatccgtacctcgctggacctggagttagacctgcaggcgacaagaacctggcacagccaattgacccaggagatctcggtgctgaaggagctcaaggagcagctggaacaagccaagagccacggggagaaggagctgccacagtggttgcgtgaggacgagcgtttccgcctgctgctgaggatgctggagaagcggatggaccgagcggagcacaagggtgagcttcagacagacaagatgatgagggcagctgccaaggatgtgcacaggctccgaggccagagctgtaaggaacccccagaagttcagtctttcagggagaagatggcatttttcacccggcctcggatgaatatcccagctctctctgcagatgacgtctaatcgccagaaaagtatttcctttgttccactgaccaggctgtgaacattgactgtggctaaagttatttatgtggtgttatatgaaggtactgagtcacaagtcctctagtgctcttgttggtttgaagatgaaccgactttttagtttgggtcctactgttgttattaaaaacagaacaaaaacaaaacacacacacacacaaaaacagaaacaaaaaaaaccagcattaaaataataagattgtatagtttgtatatttaggagtgtatttttgggaaagaaaatttaaatgaactaaagcagtattgagttgctgctcttcttaaaatcgtttagattttttttggtttgtacagctccaccttttagaggtcttactgcaataagaagtaatgcctgggggacggtaatcctaataggacgtcccgcacttgtcacagtacagctaatttttcctagttaacatattttgtacaatattaaaaaaatgcacagaaaccattgggggggattcagaggtgcatccacggatcttcttgagctgtgacgtgtttttatgtggctgcccaacgtggagcgggcagtgtgataggctgggtgggctaagcagcctagtctatgtgggtgacaggccacgctggtctcagatgcccagtgaagccactaacatgagtgaggggagggctgtggggaactccattcagttttatctccatcaataaagtggcctttcaaaaagaatcttcctcttgctctctttttctttcctacccctcacttcatctgtttccctgatttttgactctccccttt

SEQ ID NO: 5507 - protein, 709 aa, Homo sapiens; identical to SEQ ID NO: 5505

SEQ ID NO: 5508 - DNA, 841 bp, Homo sapiens
aagaaagacagtcagcaaagcctgggagagctccagctcctccctccctgctctgctcaacttcactctcctcctcggttcccttggagtaccttgtgccccggcagtgctgtcccggccctggcatcctgaggtcctcccgtggtgaggacttaagtggacagcaggagtgggtggagagagggagggagagtttgccctgcaggctctctggatgcagaagccagactcgctgcagaggcagctgtgctgttcccggagcctggcttcaggggtgcatccgtcactcagggttcattcacccaggcaggctccaagttcctggggtgcacaaggtgggcactgtcccttctgggtgctgacagcagagcctggctcccctccgccaccatgagcggctgctccaaaagatgcaagcttgggttcgtgaaatttgcccagaccatctttaagctcatcactgggaccctcagcaaagatggagtcaaaagtggaactggggcccgcagagccggatagcttgggcagtacgtgtgtgcacctgcaggctgtggagacaggtatttccatggagctcactcgccctgcctctcatccaggcctgaaaatcatagagcatcccgctggccatctgcatcagcccgacccccacaggatagaagactggcacatccaagttgctccttccacaccctctccccactgaggcctcgtctcctccgccctgtggccaattgaagactcagcatcatcaagactggagggacagagcatttgaatcatcagacgctgggccagacgtcaccccacgcgttttctcattttatcgtcctaagaagcc

SEQ ID NO: 5509 - protein, 75 aa, Homo sapiens
MESKVELGPAEPDSLGSTCVHLQAVETGISMELTRPASHPGLKIIEHPAGHLHQPDPHRIEDWHIQVAPSTPSPH

SEQ ID NO: 5510 - DNA, 1502 bp, Homo sapiens
atgagcggctgctccaaaagatgcaagcttgggttcgtgaaatttgcccagaccatctttaagctcatcactgggaccctcagcaaagataagattgaagatgagctggagatgaccatggtttgccatcggcccgagggactggagcagctcgaggcccagaccaacttcaccaagagggagctgcaggtcctttatcgaggcttcaaaaatgagtgccccagtggtgtggtcaacgaagacacattcaagcagatctatgctcagtttttccctcatggagatgccagcacgtatgcccattacctcttcaatgccttcgacaccactcagacaggctccgtgaagttcgaggactttgtaaccgctctgtcgattttattgagaggaactgtccacgagaaactaaggtggacatttaatttgtatgacatcaacaaggacggatacataaacaaagaggagatgatggacattgtcaaagccatctatgacatgatggggaaatacacatatcctgtgctcaaagaggacactccaaggcagcatgtggacgtcttcttccagaaaatggacaaaaataaagatggcatcgtaactttagatgaatttcttgaatcatgtcaggaggacgacaacatcatgaggtctctccagctgtttcaaaatgtcatgtaactggtgacactcagccattcagctctcagagacattgtactaaacaaccaccttaacaccctgatctgcccttgttctgattttacacaccaactcttgggacagaaacaccttttacactttggaagaattctctgctgaagactttctatggaacccagcatcatgtggctcagtctctgattgccaactcttcctctttcttcttcttgagagagacaagatgaaatttgagtttgttttggaagcatgctcatctcctcacactgctgccctatggaaggtccctctgcttaagcttaaacagtagtgcacaaaatatgctgcttacgtgcccccagcccactgcctccaagtcaggcagaccttggtgaatctggaagcaagaggacctgagccagatgcacaccatctctgatggcctcccaaaccaatgtgcctgtttctcttcctttggtgggaagaatgagagttatccagaacaattaggatctgtcatgaccagattgggagagccagcacctaacatatgtgggataggactgaattattaagcatgatattgtctgatgacccaaactgcccatgtcatttgtttccagaaacgaggaccaataattctctcacactggcatttgtgctggtagtacaagtcctttaatatgtccaggaagggagccattgcccagtggtccatatctccaccacatcccctgcttgagcccagcgctgcatgtccctcccaagaagtccagaatgcctgcaaattgctgtaattttataccatgttctaaccaataaacagaactatttcttacactctc

SEQ ID NO: 5511 - protein, 225 aa, Homo sapiens; identical to SEQ ID NO: 711

SEQ ID NO: 5512 - DNA, 561 bp, Homo sapiens
aagcagatgctgtggtcacgggttgagctctttcctgctgccttgagcctgaggcaggctattcttcctgtgcggctccacagcttcaggccagccccctccccgctcaaatccctgaggcagagctcctctgaagaagacttccgatattaggttgcctgggcccagcttgaatcaggcacccccagccgagtcgccctccaggggatggaatacgggactcccagccccggaaaacggagtccgcctgagccacgggactcggatggaaggcaagtgaagcctgatacctcagtgcagatacgtggctggctttgttgcaggattttccttagtttagctaaagacgggatcttgtccatcccatggccatgaaaatttaggctcacagacgctttaaagggttccacacaggaagaggcggttcccaggttccacacaggaagaggcggttcccaggttccacacaggaagaggcggttcccaggttccacacaggaagaggcggttcccaggttccacacaggaagagacgcccaggttccacacaggaagaggcgg

SEQ ID NO: 5513 - protein, 55 aa, Homo sapiens
MEYGTPSPGKRSPPEPRDSDGRQVKPDTSVQIRGWLCCRIFLSLAKDGILSIPWP

SEQ ID NO: 5514 - DNA, 1204 bp, Homo sapiens
aggctatgtggttgatgttgcagaatgatgagccggaggacttcgttatagctactggggaggtccatagtgtccgggaatttgtcgagaaatcattcttgcacattggaaaaaccattgtgtggactttctgcagggcgactgcaccaaagcgaaacagaagctgaactggaagccccgggtcgctttcgatgagctggtgagggagatggtgcacgccgacgtggagctcatgaggacaaaccccaatgcctgagcagcgcctcggagcccggcccgccctccggctacaatccccgcagagtctccggtgcagacgcgctgcggggatggggagcggcgtgccaatctgcgggtcccctgcggcccctgctgccgctgcgctgtcccggccgcaagagcggggccgccccgccgaggtttgtagcagccgggatgtgaccctccagggtttgggtcgctttgcgtttgtcgaagcctcctctgaatggctttgtgaaatcaagatgttttaatcacattcactttacttgaaattatgttgttacacaacaaattgtggggccttcaaattgtttttctcttttcatattaaaaatggtctttctgtgaactagcattcacagggtcagtgtggatgttttctcccaagttatgaacacggctataggggtccccaaacaaccccacaatccaggccttggaatgagatcgctgtggtcaggccttgccctgttttgagaaagcccttggtgggaggactcctgcaaggctaaggggggcgggggtgctccggcgagcctcctccttagtctttgcctgggacatttctttccccctcctggtgacaagtcactctggaaacctagttcctgcagaagggaggaattcacaccctggctggtctctgctgactataattagaacccaagggctctcacccatctgaaaaagaagtcttgagaaatagaggggggtcagaagaagaaacttgaaggtaagcaaatactgttggaacattccatggcaaagccaccaagttacctagaggtctctgagcctgtgcctttccttgtggtctagaatcttttacacagtgcttatttgcagcctcttcttatgactactaggtcactttttaaatctcagtttaatgtattcattcagccatttatgttaagtgcctaatacatgccagacattg

SEQ ID NO: 5515 - protein, 53 aa, Homo sapiens
MWLMLQNDEPEDFVIATGEVHSVREFVEKSFLHIGKTIVWTFCRATAPKRNRS

SEQ ID NO: 5516 - DNA, 2397 bp, Homo sapiens
ctcagaagtgccttttaactttgtgatctttgaaaaagcagatagagttttcattaaagaccagagaacattaaaacaatttcagtgctttcatcaagatatggcccctttcaaccaatcatttcaaaatattacacaaaatttaggagccctttctgtaaataacactgaaatgaatttggaaagtggcattgccttaagtatagtacagagaaacttttgcccaggggccatatcatatcatttggatggctgtgcaggtttctaaataagagccatcaccacttattttgttaagagaaaggcagcctaaataaattcctttcttgtttcctttaactagttaccctgtgaactaagctatgtttctttctctccccatgagtcccaaagtagctttattaataggaatatatgatgtttgtgttcttaaaaaaaatcagggtggtcttagatgtctgtcgtccattctggcatttccctttatacaacccttttgaattttctgtttaaaaactggcattccaacagcttttctttggcctaatgcctgggttgcatattgaagcaacaaattaggaatgttaagatgtcccccaaagaaaaacgtttgttctgaaagtagagctgatgtgacacatggaattagggcttcttaacttgtctaaatgacagttaatgatcttttctctttttcttttcttttattgttttaacagggtggctgggagtgtagaatgaaagaaatgcccagaggccgaaatcgggtttggttcaccaaactgttaaatgtgtcaagtgcacttgactgatactacatcttttgcctctttttaggagctaatttcgttactcgaaaaattagccggtcagtagctaagatttaccttggacaactggaatgtttcagtttgggaaatctggatgccaaacgagattggggccatgccaaggactatgtggaggctatgtggttgatgttgcagaatgatgagccggaggacttcgttatagctactggggaggtccatagtgtccgggaatttgtcgagaaatcattcttgcacattggaaaaaccattgtgtgggaaggaaagaatgaaaatgaagtgggcagatgtaaagagaccggcaaagttcacgtgactgtggatctcaagtactaccggccaactgaagtgatcttcatgcagaaaaagttacttgttccttagtactgccagctgtgtgcttcttgacccaggggtagaaaggatgatcgtggtggaaggtagggatatgctgaattggtgatcgacttctgattctgcctaaacggactttctgcagggcgactgcaccaaagcgaaacagaagctgaactggaagccccgggtcgctttcgatgagctggtgagggagatggtgcacgccgacgtggagctcatgaggacaaaccccaatgcctgagcagcgcctcggagcccggcccgccctccggctacaatccccgcagagtctccggtgcagacgcgctgcggggatggggagcggcgtgccaatctgcgggtcccctgcggcccctgctgccgctgcgctgtcccggccgcaagagcggggccgccccgccgaggtttgtagcagccgggatgtgaccctccagggtttgggtcgctttgcgtttgtcgaagcctcctctgaatggctttgtgaaatcaagatgttttaatcacattcactttacttgaaattatgttgttacacaacaaattgtggggccttcaaattgtttttctcttttcatattaaaaatggtctttctgtgaactagcattcacagggtcagtgtggatgttttctcccaagttatgaacacggctataggggtccccaaacaaccccacaatccaggccttggaatgagatcgctgtggtcaggccttgccctgttttgagaaagcccttggtgggaggactcctgcaaggctaaggggggcgggggtgctccggcgagcctcctccttagtctttgcctgggacatttctttccccctcctggtgacaagtcactctggaaacctagttcctgcagaagggaggaattcacaccctggctggtctctgctgactataattagaacccaagggctctcacccatctgaaaaagaagtcttgagaaatagaggggggtcagaagaagaaacttgaaggtaagcaaatactgttggaacattccatggcaaagccaccaagttacctagaggtctctgagcctgtgcctttccttgtggtctagaatcttttacacagtgcttatttgcagcctcttcttatgactactaggtcactttttaaatctcagtttaatgtattcattcagccatttatgttaagtgcctaatacatgccagacattg

SEQ ID NO: 5517 - protein, 81 aa, Homo sapiens
MWLMLQNDEPEDFVIATGEVHSVREFVEKSFLHIGKTIVWEGKNENEVGRCKETGKVHVTVDLKYYRPTEVIFMQKKLLVP

SEQ ID NO: 5518 - DNA, 2326 bp, Homo sapiens
cgctgcgccagtcaggccgcagccccgctgcttggcccgtcgggcccgccttggccggctcggcccgcccccggccctccctgcacggcctcccgtgcgcccctgtcagactgtggcggccggtcgcgcggtgcgctctccctccctgcccgcagcctggagaggcgcttcgtgctgcacacccccgcgttcctgccggcaccgcgcctgccctctgccgcgctccgccctgccgccgaccgcacgcccgccgcgggacatggcacacgcaccggcacgctgccccagcgcccggggctccggggacggcgagatgggcaagcccaggaacgtggcgctcatcaccggtatcacaggccaggatggttcctacctggctgagttcctgctggagaaaggctatgaggtccatggaattgtacggcggtccagttcatttaatacgggtcgaattgagcatctgtataagaatccccaggctcacattgaaggaaacatgaagttgcactatggcgatctcactgacagtacctgccttgtgaagatcattaatgaagtaaagcccacagagatctacaaccttggagcccagagccacgtcaaaatttcctttgacctcgctgagtacactgcggacgttgacggagttggcactctacgacttctagatgcagttaagacttgtggccttatcaactctgtgaagttctaccaagcctcaacaagtgaactttatgggaaagtgcaggaaataccccagaaggagaccacccctttctatccccggtcaccctatggggcagcaaaactctatgcctattggattgtggtgaacttccgtgaggcgtataatctctttgcagtgaacggcattctcttcaatcatgagagtcccagaagaggagctaatttcgttactcgaaaaattagccggtcagtagctaagatttaccttggacaactggaatgtttcagtttgggaaatctggatgccaaacgagattggggccatgccaaggactatgtggaggctatgtggttgatgttgcagaatgatgagccggaggacttcgttatagctactggggaggtccatagtgtccgggaatttgtcgagaaatcattcttgcacattggaaaaaccattgtgtgggaaggaaagaatgaaaatgaagtgggcagatgtaaagagaccggcaaagttcacgtgactgtggatctcaagtactaccggccaactgaagtggactttctgcagggcgactgcaccaaagcgaaacagaagctgaactggaagccccgggtcgctttcgatgagctggtgagggagatggtgcacgccgacgtggagctcatgaggacaaaccccaatgcctgagcagcgcctcggagcccggcccgccctccggctacaatccccgcagagtctccggtgcagacgcgctgcggggatggggagcggcgtgccaatctgcgggtcccctgcggcccctgctgccgctgcgctgtcccggccgcaagagcggggccgccccgccgaggtttgtagcagccgggatgtgaccctccagggtttgggtcgctttgcgtttgtcgaagcctcctctgaatggctttgtgaaatcaagatgttttaatcacattcactttacttgaaattatgttgttacacaacaaattgtggggccttcaaattgtttttctcttttcatattaaaaatggtctttctgtgaactagcattcacagggtcagtgtggatgttttctcccaagttatgaacacggctataggggtccccaaacaaccccacaatccaggccttggaatgagatcgctgtggtcaggccttgccctgttttgagaaagcccttggtgggaggactcctgcaaggctaaggggggcgggggtgctccggcgagcctcctccttagtctttgcctgggacatttctttccccctcctggtgacaagtcactctggaaacctagttcctgcagaagggaggaattcacaccctggctggtctctgctgactataattagaacccaagggctctcacccatctgaaaaagaagtcttgagaaatagaggggggtcagaagaagaaacttgaaggtaagcaaatactgttggaacattccatggcaaagccaccaagttacctagaggtctctgagcctgtgcctttccttgtggtctagaatcttttacacagtgcttatttgcagcctcttcttatgactactaggtcactttttaaatctcagtttaatgtattcattcagccatttatgttaagtgcctaatacatgccagacattg

SEQ ID NO: 5519 - protein, 372 aa, Homo sapiens; identical to SEQ ID NO: 715

SEQ ID NO: 5520 - DNA, 1815 bp, Homo sapiens
ctcagaagtgccttttaactttgtgatctttgaaaaagcagatagagttttcattaaagaccagagaacattaaaacaatttcagtgctttcatcaagatatggcccctttcaaccaatcatttcaaaatattacacaaaatttaggagccctttctgtaaataacactgaaatgaatttggaaagtggcattgccttaagtatagtacagagaaacttttgcccaggggccatatcatatcatttggatggctgtgcaggtttctaaataagagccatcaccacttattttgttaagagaaaggcagcctaaataaattcctttcttgtttcctttaactagttaccctgtgaactaagctatgtttctttctctccccatgagtcccaaagtagctttattaataggaatatatgatgtttgtgttcttaaaaaaaatcagggtggtcttagatgtctgtcgtccattctggcatttccctttatacaacccttttgaattttctgtttaaaaactggcattccaacagcttttctttggcctaatgcctgggttgcatattgaagcaacaaattaggaatgttaagatgtcccccaaagaaaaacgtttgttctgaaagtagagctgatgtgacacatggaattagggcttcttaacttgtctaaatgacagttaatgatcttttctctttttcttttcttttattgttttaacagggtggctgggagtgtagaatgaaagaaatgcccagaggccgaaatcgggtttggttcaccaaactgttaaatgtgtcaagtgcacttgactgatactacatcttttgcctctttttaggagctaatttcgttactcgaaaaattagccggtcagtagctaagatttaccttggacaactggaatgtttcagtttgggaaatctggatgccaaacgagattggggccatgccaaggactatgtggaggctatgtggttgatgttgcagaatgatgagccggaggacttcgttatagctactggggaggtccatagtgtccgggaatttgtcgagaaatcattcttgcacattggaaaaaccattgtgtgggaaggaaagaatgaaaatgaagtgggcagatgtaaagagaccggcaaagttcacgtgactgtggatctcaagtactaccggccaactgaagtgatcttcatgcagaaaaagttacttgttccttagtactgccagctgtgtgcttcttgacccaggggtagaaaggatgatcgtggtggaaggtagggatatgctgaattggtgatcgacttctgattctgcctaaacggactttctgcagggcgactgcaccaaagcgaaacagaagctgaactggaagccccgggtcgctttcgatgagctggtgagggagatggtgcacgccgacgtggagctcatgaggacaaaccccaatgcctgagcagcgcctcggagcccggcccgccctccggctacaatccccgcagagtctccggtgcagacgcgctgcggggatggggagcggcgtgccaatctgcgggtcccctgcggcccctgctgccgctgcgctgtcccggccgcaagagcggggccgccccgccgaggtttgtagcagccgggatgtgaccctccagggtttgggtcgctttgcgtttgtcgaagcctcctctgaatggctttgtgaaatcaagatgttttaatcacattcactttacttgaaattatgttgttacacaacaaattgtggggccttcaaattgtttttctcttttcatattaaaaatggtctttctgtgaactagcattc

SEQ ID NO: 5521 - protein, 81 aa, Homo sapiens; identical to SEQ ID NO: 5517

SEQ ID NO: 5522 - DNA, 1443 bp, Homo sapiens
tgtacacaggcagtttgttgggagcgttaccattgcctctggttcctcatgtgtaaaatggatggttcctacctggctgagttcctgctggagaaaggctatgaggtccatggaattgtacggcggtccagttcatttaatacgggtcgaattgagcatctgtataagaatccccaggctcacattgaaggaaacatgaagttgcactatggcgatctcactgacagtacctgccttgtgaagatcattaatgaagtaaagcccacagagatctacaaccttggagcccagagccacgtcaaaatttcctttgacctcgctgagtacactgcggacgttgacggagttggcactctacgacttctagatgcagttaagacttgtggccttatcaactctgtgaagttctaccaagcctcaacaagtgaactttatgggaaagtgcaggaaataccccagaaggagaccacccctttctatccccggtcaccctatggggcagcaaaactctatgcctattggattgtggtgaacttccgtgaggcgtataatctctttgcagtgaacggcattctcttcaatcatgagagtcccagaagaggagctaatttcgttactcgaaaaattagccggtcagtagctaagatttaccttggacaactggaatgtttcagtttgggaaatctggatgccaaacgagattggggccatgccaaggactatgtggaggctatgtggttgatgttgcagaatgatgagccggaggacttcgttatagctactggggaggtccatagtgtccgggaatttgtcgagaaatcattcttgcacattggaaaaaccattgtgtgggaaggaaagaatgaaaatgaagtgggcagatgtaaagagaccggcaaagttcacgtgactgtggatctcaagtactaccggccaactgaagtggactttctgcagggcgactgcaccaaagcgaaacagaagctgaactggaagccccgggtcgctttcgatgagctggtgagggagatggtgcacgccgacgtggagctcatgaggacaaaccccaatgcctgagcagcgcctcggagcccggcccgccctccggctacaatccccgcagagtctccggtgcagacgcgctgcggggatggggagcggcgtgccaatctgcgggtcccctgcggcccctgctgccgctgcgctgtcccggccgcaagagcggggccgccccgccgaggtttgtagcagccgggatgtgaccctccagggtttgggtcgctttgcgtttgtcgaagcctcctctgaatggctttgtgaaatcaagatgttttaatcacattcactttacttgaaattatgttgttacacaacaaattgtggggccttcaaattgtttttctcttttcatattaaaaatggtctttctgtgaactagcattc

SEQ ID NO: 5523 - protein, 342 aa, Homo sapiens
MCKMDGSYLAEFLLEKGYEVHGIVRRSSSFNTGRIEHLYKNPQAHIEGNMKLHYGDLTDSTCLVKIINEVKPTEIYNLGAQSHVKISFDLAEYTADVDGVGTLRLLDAVKTCGLINSVKFYQASTSELYGKVQEIPQKETTPFYPRSPYGAAKLYAYWIVVNFREAYNLFAVNGILFNHESPRRGANFVTRKISRSVAKIYLGQLECFSLGNLDAKRDWGHAKDYVEAMWLMLQNDEPEDFVIATGEVHSVREFVEKSFLHIGKTIVWEGKNENEVGRCKETGKVHVTVDLKYYRPTEVDFLQGDCTKAKQKLNWKPRVAFDELVREMVHADVELMRTNPNA

SEQ ID NO: 5524 - DNA, 1744 bp, Homo sapiens
cgctgcgccagtcaggccgcagccccgctgcttggcccgtcgggcccgccttggccggctcggcccgcccccggccctccctgcacggcctcccgtgcgcccctgtcagactgtggcggccggtcgcgcggtgcgctctccctccctgcccgcagcctggagaggcgcttcgtgctgcacacccccgcgttcctgccggcaccgcgcctgccctctgccgcgctccgccctgccgccgaccgcacgcccgccgcgggacatggcacacgcaccggcacgctgccccagcgcccggggctccggggacggcgagatgggcaagcccaggaacgtggcgctcatcaccggtatcacaggccaggatggttcctacctggctgagttcctgctggagaaaggctatgaggtccatggaattgtacggcggtccagttcatttaatacgggtcgaattgagcatctgtataagaatccccaggctcacattgaaggaaacatgaagttgcactatggcgatctcactgacagtacctgccttgtgaagatcattaatgaagtaaagcccacagagatctacaaccttggagcccagagccacgtcaaaatttcctttgacctcgctgagtacactgcggacgttgacggagttggcactctacgacttctagatgcagttaagacttgtggccttatcaactctgtgaagttctaccaagcctcaacaagtgaactttatgggaaagtgcaggaaataccccagaaggagaccacccctttctatccccggtcaccctatggggcagcaaaactctatgcctattggattgtggtgaacttccgtgaggcgtataatctctttgcagtgaacggcattctcttcaatcatgagagtcccagaagaggagctaatttcgttactcgaaaaattagccggtcagtagctaagatttaccttggacaactggaatgtttcagtttgggaaatctggatgccaaacgagattggggccatgccaaggactatgtggaggctatgtggttgatgttgcagaatgatgagccggaggacttcgttatagctactggggaggtccatagtgtccgggaatttgtcgagaaatcattcttgcacattggaaaaaccattgtgtgggaaggaaagaatgaaaatgaagtgggcagatgtaaagagaccggcaaagttcacgtgactgtggatctcaagtactaccggccaactgaagtggactttctgcagggcgactgcaccaaagcgaaacagaagctgaactggaagccccgggtcgctttcgatgagctggtgagggagatggtgcacgccgacgtggagctcatgaggacaaaccccaatgcctgagcagcgcctcggagcccggcccgccctccggctacaatccccgcagagtctccggtgcagacgcgctgcggggatggggagcggcgtgccaatctgcgggtcccctgcggcccctgctgccgctgcgctgtcccggccgcaagagcggggccgccccgccgaggtttgtagcagccgggatgtgaccctccagggtttgggtcgctttgcgtttgtcgaagcctcctctgaatggctttgtgaaatcaagatgttttaatcacattcactttacttgaaattatgttgttacacaacaaattgtggggccttcaaattgtttttctcttttcatattaaaaatggtctttctgtgaactagcattc

SEQ ID NO: 5525 - protein, 372 aa, Homo sapiens; identical to SEQ ID NO: 715

SEQ ID NO: 5526 - DNA, 619 bp, Homo sapiens
aggctatgtggttgatgttgcagaatgatgagccggaggacttcgttatagctactggggaggtccatagtgtccgggaatttgtcgagaaatcattcttgcacattggaaaaaccattgtgtggactttctgcagggcgactgcaccaaagcgaaacagaagctgaactggaagccccgggtcgctttcgatgagctggtgagggagatggtgcacgccgacgtggagctcatgaggacaaaccccaatgcctgagcagcgcctcggagcccggcccgccctccggctacaatccccgcagagtctccggtgcagacgcgctgcggggatggggagcggcgtgccaatctgcgggtcccctgcggcccctgctgccgctgcgctgtcccggccgcaagagcggggccgccccgccgaggtttgtagcagccgggatgtgaccctccagggtttgggtcgctttgcgtttgtcgaagcctcctctgaatggctttgtgaaatcaagatgttttaatcacattcactttacttgaaattatgttgttacacaacaaattgtggggccttcaaattgtttttctcttttcatattaaaaatggtctttctgtgaactagca

SEQ ID NO: 5527 - protein, 53 aa, Homo sapiens; identical to SEQ ID NO: 5515

SEQ ID NO: 5528 - DNA, 548 bp, Homo sapiens
agtaggagccttgtgcaaggattcaggagaggcctctagaaactgaggatggccctcaactggcaagcacaggcaactgaattcggccaggcatctgggtcctgtgctaggggctaggaagacaaagagaaacagagtcacatcctcccacaaaaatccatgagatgtcggagagccgaacttgtaaacagccatcatcaacacaaagaaggatgcactgatgctctctagaggctcacaggaaatgattcatgggcatagaggtgtgcaatttgcttcctgccccagccctgaccctgagatgcagcatggagggagtagaggggtggggtttgcgaagtcacttccagtcatcgtgggacctttatggaaacctgggctccactccacaggatgagtctcaactggaacccttgcccattgggctcactgttccaatctaaagggcaggctttccactactctttgggacttgtagtttgtgggtttttttcacatgcacatcatcttacttacagttccccaagaataaaagctttccatctcaa

SEQ ID NO: 5529 - protein, 63 aa, Homo sapiens
MGIEVCNLLPAPALTLRCSMEGVEGWGLRSHFQSSWDLYGNLGSTPQDESQLEPLPIGLTVPI

SEQ ID NO: 5530 - DNA, 3162 bp, Homo sapiens
cccaaacctctctcgcacgcggggactgagcacggcccgaaaagccgaggacagccggactcaccctgtagttatagtagtgcgtctgcacaagatgccggtggcgcgacttgtggttgccgaagttggatttctcgcaaaccaagatggggtcttgctgtgttgcccagactggtctcaaactcctgagctcaagtgatccacccaccgtggcctcccaaagtgctgagattaaagacagagtttcactctcgttgcccaggctggagttcaatggcacgatctcggctcactgcaacctctgcagtgtggtagaacgcagatgtggtagaaatagccaccgcatcggcccacatcaaagttttaaacaaagatatgctaagctgtgtctgttggatgtgccaaggacctgcaattttggttacctgcaaaatgctttcctactgtggccttgtgctaccagccaacgtgacaggatgccagaagcacaggccctttgaaactgttgtacttatgctgaggatgctgcccttcattgaaagagcataagagaatgtcttccgctttagcaccagaaagagttacaattcttctaagaaagtggctgcttcggtatcacagacactctgactcacattactaatcatggtcctctccctgcataggctgctgggaagctcagaaccagacctgaggccgtgctcctggctgcttactgtcctgccttctaaccacccttttgcttggaaacctcatcccaggacttattttggttttcctattcttattttcctgatttttcttacttaacacacccacaaacaattctgatctgtggttaaaaatatatcgaaattcagaataaaattaaatgcaacttgttttcaaataaactatgggagtataaactatatactgagagacatgatagggttctaaaatttcttactgagaatttggaacaacaatgttaaatgatggtaaggttcacagggcagtccaagtaaatttaatttaaccatgctgcagcaaaatgacagtgttaagagaagtcactcccagcgtaattctatactcatgttaaaaaagaaattcttattagaggatttgtgtttaaagagacatcattgattatctgaatttgtataggcactggatatattaagtcaactaacaaatcataagcatttaaataggagtaagtccaggggccttgtaaataacccatagtttattcagtcagttgacttgttcttttttccttacataaacaagtaacagggtgatttaattcagtgagagtggtgaagtgaatacagatctgtgaagaacaataaaatgttaattttatgatcctgtttattttgctgaagtttctacatgataggaaacaaatgcaaattttgacccagggtcagtccttactatttccagcagcagaaaatgaatctactaggatacctgaattttataagcaaatccaacctatttcatataaacataataaggtcttggacacagttattcatagtccgagactattaactgggctctcattcagcatttatgcatttgaaatctacctagtcaaattttcttgacaaaatgttagcctctaaaggaagaattctgcttctgataacccattatgctacttttacacgcatgtgttaagcaagcagcagaatcagatttggaatttagaaagatattctttccggtggcaataggcaggatgcctggcagagcaaagaacaggaggtagatagacccggagggggctgtacaaaatgcagacagaaactgatgaaccaacaaaaagcaatcaactcgtgagacataaagaaggtccggcaagggaaataagtgagagaacctgctgggcataaggacctactgactacggtaaagtaaggggagaaagtgaagtgacttccagcttgcacaaggaaatactgggatgatgagaggcaatgctggagtgttgagtttgcctgaaggattaggttggggatgggttagggatgatgtggagttttagtttagatacgaggtgttggtagcataaccagaaaatgcccaggaggcccctggaaaggacaaatggaggggaatcactagagcacacaaggttggagccatgagttgtgggcatctagggagggtgtgggaaggtcaagatggagtgcaaggggcctccaatgtcaagcggagccaagagaggagcagacaaggagaaggtggtgtcccgcacgctagggaaggaagaaagaagctggagactggttaattgggccaaagatacaatgaaggaaagtgacaagaaggaaggtggcaggccagactgcagcagagtgaggagtgagggcagctgacagccgggagagtgcacagaccattcccaccagctgcaggctgtcagggtatcactgacttcctaatcggcacaggccacattggtcttttcccaaggctcttccagacctgcagaatctgggtttctgctctatgagggtccctgagcataggcccttaaaaacattctcaccacccccatagggaacagtacctggccatggcgcagaacaagtgcatgagaggacagagagagaagggaagctgatgcccccggcagggatgctcatgctgcctgccgcagccaatcaggtggaacccagggcctgtggtctaggatctttccttccattaaggtaaacagggcaaaataagactcaaaacaccacaggcttcgaagacatcacctttcagtactccacctagctctgccaaacctagcctcagctgtatcctattgctgaaaactctccttacagtacatccaacctttccaggccttctctacgtctgcttgttccctgactcactctggtaaaatctcacctcctatctttcctttctcttcattttttctgccatccattattactactctgcagaagtatttacattaacactactccccctcctctgctgacactttggaatatggcatgtacccaagttaatttattttcaatgtataaaactgtaccctttgtgataatattaccttaggatactcaaacacaatacaaaaatatttacttaagaaatctaaaacaatagcagctgggagaaatatctattaaaataccaactgtg

SEQ ID NO: 5531 - protein, 117 aa, Homo sapiens
MGSCCVAQTGLKLLSSSDPPTVASQSAEIKDRVSLSLPRLEFNGTISAHCNLCSVVERRCGRNSHRIGPHQSFKQRYAKLCLLDVPRTCNFGYLQNAFLLWPCATSQRDRMPEAQAL

SEQ ID NO: 5532 - DNA, 1073 bp, Homo sapiens
cttcggtaacccgggcaacgcggcctcctggatgtaggaaggggcgctgcccccgaaacacaaatgtctccgccaagaccccagacggttcccaaaggctctccgtgatgcaactgcacgtccctcgaatgcctgggcctccgatatccgtccgccaggagcttggctggatgcacgggcggccagtcctcttatttccccgccctcccgccgcgtggagcggctgctgggtcccgagcctccgggcgggggcgggatcggggcggggcggaggcatctccctcccagcaccgcccccttagctgccccgagccctgcctgcgcccgcccccgaagcggcgcgggacgcctggcgccgtccgcgatccgcagggctgcccgcttaggcttaggcccggcccgctggcaaagccgagccgcagcattttatttcgttcgtggtttccgcacaggctggagtttcgtgggttgggtcgtacttgggacctcggcgaagaggacccgtttatttttttttctttccaaaatggcagcctccagtcgcgcacaagtgttatctctgtaccgggcgatgctgagagagagcaagcgtttcagcgcctacaattacagaacatatgctgtcaggaggataagagatgccttcagagaaaataaaaatgtaaaggatcctgtagaaattcaaaccctagtgaataaagccaagagagaccttggagtaattcgtcgacagtgtcccctttccaacgggattaagtcacgtacacagggtctgcaacagagacagcacgcagtgggccctgggtgtgctatttggaagggctgcggcgtggaagagccaagcctcaagatcatgggacatttgaacctatgacgtcagaatacatcaacaggtgttttgatgtgagttttcttccggaccatcacactgttgtactcttatgtttgcgctcacccatgatcaatagtcatggcactgtgaagtcaggacagtaaacagtggcccatggctctgtgtggggtgaggggccggcgtgctggcaggaggcctttatgatcccaggcaagtcctg

SEQ ID NO: 5533 - protein, 115 aa, Homo sapiens
MAASSRAQVLSLYRAMLRESKRFSAYNYRTYAVRRIRDAFRENKNVKDPVEIQTLVNKAKRDLGVIRRQCPLSNGIKSRTQGLQQRQHAVGPGCAIWKGCGVEEPSLKIMGHLNL

SEQ ID NO: 5534 - DNA, 1154 bp, Homo sapiens
cttcggtaacccgggcaacgcggcctcctggatgtaggaaggggcgctgcccccgaaacacaaatgtctccgccaagaccccagacggttcccaaaggctctccgtgatgcaactgcacgtccctcgaatgcctgggcctccgatatccgtccgccaggagcttggctggatgcacgggcggccagtcctcttatttccccgccctcccgccgcgtggagcggctgctgggtcccgagcctccgggcgggggcgggatcggggcggggcggaggcatctccctcccagcaccgcccccttagctgccccgagccctgcctgcgcccgcccccgaagcggcgcgggacgcctggcgccgtccgcgatccgcagggctgcccgcttaggcttaggcccggcccgctggcaaagccgagccgcagcattttatttcgttcgtggtttccgcacaggctggagtttcgtgggttgggtcgtacttgggacctcggcgaagaggacccgtttatttttttttctttccaaaatggcagcctccagtcgcgcacaagtgttatctctgtaccgggcgatgctgagagagagcaagcgtttcagcgcctacaattacagaacatatgctgtcaggaggataagagatgccttcagagaaaataaaaatgtaaaggatcctgtagaaattcaaaccctagtgaataaagccaagagagaccttggagtaattcgtcgacagattgctgttgcctccccagtgtgacccacctgcagtcctctggtgcagctctgatagagaaatctttgatgccaactatatccacctaccaatgtcccctttccaacgggattaagtcacgtacacagggtctgcaacagagacagcacgcagtgggccctgggtgtgctatttggaagggctgcggcgtggaagagccaagcctcaagatcatgggacatttgaacctatgacgtcagaatacatcaacaggtgttttgatgtgagttttcttccggaccatcacactgttgtactcttatgtttgcgctcacccatgatcaatagtcatggcactgtgaagtcaggacagtaaacagtggcccatggctctgtgtggggtgaggggccggcgtgctggcaggaggcctttatgatccca

SEQ ID NO: 5535 - protein, 76 aa, Homo sapiens
MAASSRAQVLSLYRAMLRESKRFSAYNYRTYAVRRIRDAFRENKNVKDPVEIQTLVNKAKRDLGVIRRQIAVASPV

SEQ ID NO: 5536 - DNA, 1059 bp, Homo sapiens
atggagcccataggggcgcggctaagtttggaggcgccgggaccagcgcccttccgagaggccccgccggccgaggagctgcccgccccggtggtcccctgtgtgcagggaagaggccgccccccaggagcaggaggagctgctggaatgccgccgccgctgccgcgcgcgctccttttccttgcccgccgaccccatcttgcaggcggccaagttcctgcagcagcagcagcaacaggcggtggcactgggcggcgagggggcggaggacgcacagctcggcccgggcggctgctgcgccaagtgcaagaagcgggtgcagttcgcggacacgctggggctaagcctggccagcgtgaagcacttcagcgaggcggaggagccgcaggtgccgcccgccgtgctctcgcgcctgcgaagcttccctatgcgtgccgaggacctggagcagctcggggggctgctggccgcggcggcagtggccgcgcccctttcagcgccgccttcccggctccggccgctcttccagctcccggggccgagcgccgcggccgagcgtctgcagcggcagcgcgtgtgcctggagcgcgtgcagtgctcgacggcctcgggcgctgaggtgaagggctccggccgggtgctcagctgccctgggcccagggccgtgaccgtgcgctacacctttaccgagtggcgctccttcctggacgtgccggctgagctgcagcccgagccgctggagccacagcagccagaggcaccgtctggggcctccgagccagggtccggggatgccaagaaagagccaggcgccgagtgcttccacttctcgctgtgcctgcccccgggcctgcagcctgaggacgaagaggacgccgacgagcgcggcgtcgcggtccacttcgctgtctgctaccgctgcgcgcagggcgagtactgggacaacaacgcgggcgccaactacacgctgcgctacgcgcgccctgcggacgcgctctgagcctggagagtttcgaagagccgtggggcggggttgattagcacgtggagctcgggctg

SEQ ID NO: 5537 - protein, 205 aa, Homo sapiens [sequence omitted]

SEQ ID NO: 5538 - DNA, 1240 bp, Homo sapiens
caggtccacattggccaactgtattcaactgacaagctgatcattgagaatcgagacatgcccaggacctagcaagccggggaccagccaccagtggcggccagggaccaccttcagcatccactctctgtttgagatgggggctcccaaaaccagcttacaatagccttttgcgctgcctgtcctgtgggagctgataaaccaagtcacatttgcattctgttgcaggcttagtgaaaaaggactgctgtctttccttggttcaagtgttagaatggagagctggagttcgttcagaatagtgctgtgtgttaccacgtctcccctgcaccccattcctaccttgtagctcatgaccattgtgtatagcatttctacactttgtttcttggtccttggcaataaaaagaatgatctccctgagcctttgaccccagataaacccctcccaattaatgcattttcatttcctactgatacaaggcctggagagggctgttgggggccctcagggagggttcaactctgagacgagaactgccttggtgaaggcaagttcaagcaccacttgagactgggggcagcatggagtagggcagggctacggggatacacggtgcaccctgcaacttatacctgagcccagtacaacaaaggtgacgggtgtgtaggtacacacccagagatggagcactgcagatcagcaacctcagccccacctgggaatttgctggaaatgcaggctcaagcccctccccacacctggtgaatgagagagccccagcctgacccaagcccagggcgactcccataccctgaagcctggggcatgctgggcagcaccggtgcccaaatctggctggtggacagaagcacctggagagttggagagctttttaaaaagacatctctcagcacttccctctctgcagattctgactcaattaaagaatatctcctccaggtgtggtggctcacacctgtaatcccagcactttgggaagccgaggtggatggaccacgatgtcaggagttcaagaccagcctggccaacatggtgaaaccccatctctcctaaagatacaaaaaaaattagccaggcgtggcagtgggcgcctgtaatcccagctactcaggagactgaggcagagaattgcttgaagccagaggcagaggttgcaatgagccgggatcacgccactgaactccagcctgggtgacagagtgagactcttgtctc

SEQ ID NO: 5539 - protein, 102 aa, Homo sapiens
MREPQPDPSPGRLPYPEAWGMLGSTGAQIWLVDRSTWRVGELFKKTSLSTSLSADSDSIKEYLLQVWWLTPVIPALWEAEVDGPRCQEFKTSLANMVKPHLS

SEQ ID NO: 5540 - DNA, 1332 bp, Homo sapiens
tgacaagctgatcattgagaatcgagacatgcccaggacctagcaagccggggaccagccaccagtggcggccagggaccaccttcagcatccactctctgtttgagatgggggctcccaaaaccagcttacaatagccttttgcgctgcctgtcctgtgggagctgataaaccaagtcacatttgcattctgttgcaggcttagtgaaaaaggactgctgtctttccttggttcaagtgttagaatggagagctggagttcgttcagaatagtgctgtgtgttaccacgtctcccctgcaccccattcctaccttgtagctcatgaccattgtgtatagcatttctacactttgtttcttggtccttggcaataaaaagaatgatctccctgagcctttgaccccagataaacccctcccaattaatgcattttcatttcctactgatacaaggcctggagagggctgttgggggccctcagggagggttcaactctgagacgagaactgccttggtgaaggcaagttcaagcaccacttgagactgggggcagcatggagtagggcagggctacggggatacacggtgcaccctgcaacttatacctgagcccacacctggtgaatgagagagccccagcctgacccaagcccagggcgactcccataccctgaagcctggggcatgctgggcagcaccggtgcccaaatctggctggtggacagaagcacctggagagttggagagctttttaaaaagacatctctcagcacttccctctctgcagattctgactcagtaagtgaggggtgaggcacagtcatttttctctattctgaagctctcccactgttttcaatgtttaaccaactggggacccctgctctttaagtatattacaggtaataaagatattgtttgtatgcttttattcttggaaacagattcattccaaacatagaaagaacatattaaataacttgcttgtcatctggggagtttacgagggaccagacctggcagagcggtttcttgtttccctttgcatacagtgctcagtggatttggtatctgtgggttaaggtttggaacaggctcctataaatagcaccggtcctggaatagctgcagcactgtcaccccctcattttaactccgacggtcatgggagtgagtacgcactgtctgagcccgtgttcttctcaccctcatatgagaactcatgtcttccagtcgcttttagagagcatagatttgctgcaatgatgcgttcaaatagatgtaacgtgtagccattctatttggcagtacaacttttgatttcaggata

SEQ ID NO: 5541 - protein, 62 aa, Homo sapiens
MREPQPDPSPGRLPYPEAWGMLGSTGAQIWLVDRSTWRVGELFKKTSLSTSLSADSDSVSEG

SEQ ID NO: 5542 - DNA, 1649 bp, Homo sapiens
ctgataggccacagctgctgctggctctgcagccttggcagagttgcaaataggttaaacggagatgggagttctagttctcttttgcttcagccagcttccttttctggctaaatctgagtaaactcaaaagaaactgggcaaggggtttacggctccccatggtgcttcacaaaggtccacattggccaactgtattcaactgacaagctgatcattgagaatcgagacatgcccaggacctagcaagccggggaccagccaccagtggcggccagggaccaccttcagcatccactctctgtttgagatgggggctcccaaaaccagcttacaatagccttttgcgctgcctgtcctgtgggagctgataaaccaagtcacatttgcattctgttgcaggcttagtgaaaaaggactgctgtctttccttggttcaagtgttagaatggagagctggagttcgttcagaatagtgctgtgtgttaccacgtctcccctgcaccccattcctaccttgtagctcatgaccattgtgtatagcatttctacactttgtttcttggtccttggcaataaaaagaatgatctccctgagcctttgaccccagataaacccctcccaattaatgcattttcatttcctactgatacaaggcctggagagggctgttgggggccctcagggagggttcaactctgagacgagaactgccttggtgaaggcaagttcaagcaccacttgagactgggggcagcatggagtagggcagggctacggggatacacggtgcaccctgcaacttatacctgagcccagtacaacaaaggtgacgggtgtgtaggtacacacccagagatggagcactgcagatcagcaacctcagccccacctgggaatttgctggaaatgcaggctcaagcccctccccacacctggtgaatgagagagccccagcctgacccaagcccagggcgactcccataccctgaagcctggggcatgctgggcagcaccggtgcccaaatctggctggtggacagaagcacctggagagttggagagctttttaaaaagacatctctcagcacttccctctctgcagattctgactcagtaagtgaggggtgaggcacagtcatttttctctattctgaagctctcccactgttttcaatgtttaaccaactggggacccctgctctttaagtatattacaggtaataaagatattgtttgtatgcttttattcttggaaacagattcattccaaacatagaaagaacatattaaataacttgcttgtcatctggggagtttacgagggaccagacctggcagagcggtttcttgtttccctttgcatacagtgctcagtggatttggtatctgtgggttaaggtttggaacaggctcctataaatagcaccggtcctggaatagctgcagcactgtcaccccctcattttaactccgacggtcatgggagtgagtacgcactgtctgagcccgtgttcttctcaccctcatatgagaactcatgtcttccagtcgcttttagagagcatagatttgctgcaatgatgcgttcaaatagatgtaacgtgtagccattctatttggcagtacaacttttgatttcaggata

SEQ ID NO: 5543 - protein, 62 aa, Homo sapiens; identical to SEQ ID NO: 5541

SEQ ID NO: 5544 - DNA, 1567 bp, Homo sapiens
ctttccaaaatggcagcctccagtcgcgcacaagtgttatctctgtaccgggcgatgctgagagagagcaagcgtttcagcgcctacaattacaggtccacattggccaactgtattcaactgacaagctgatcattgagaatcgagacatgcccaggacctagcaagccggggaccagccaccagtggcggccagggaccaccttcagcatccactctctgtttgagatgggggctcccaaaaccagcttacaatagccttttgcgctgcctgtcctgtgggagctgataaaccaagtcacatttgcattctgttgcaggcttagtgaaaaaggactgctgtctttccttggttcaagtgttagaatggagagctggagttcgttcagaatagtgctgtgtgttaccacgtctcccctgcaccccattcctaccttgtagctcatgaccattgtgtatagcatttctacactttgtttcttggtccttggcaataaaaagaatgatctccctgagcctttgaccccagataaacccctcccaattaatgcattttcatttcctactgatacaaggcctggagagggctgttgggggccctcagggagggttcaactctgagacgagaactgccttggtgaaggcaagttcaagcaccacttgagactgggggcagcatggagtagggcagggctacggggatacacggtgcaccctgcaacttatacctgagcccagtacaacaaaggtgacgggtgtgtaggtacacacccagagatggagcactgcagatcagcaacctcagccccacctgggaatttgctggaaatgcaggctcaagcccctccccacacctggtgaatgagagagccccagcctgacccaagcccagggcgactcccataccctgaagcctggggcatgctgggcagcaccggtgcccaaatctggctggtggacagaagcacctggagagttggagagctttttaaaaagacatctctcagcacttccctctctgcagattctgactcagtaagtgaggggtgaggcacagtcatttttctctattctgaagctctcccactgttttcaatgtttaaccaactggggacccctgctctttaagtatattacaggtaataaagatattgtttgtatgcttttattcttggaaacagattcattccaaacatagaaagaacatattaaataacttgcttgtcatctggggagtttacgagggaccagacctggcagagcggtttcttgtttccctttgcatacagtgctcagtggatttggtatctgtgggttaaggtttggaacaggctcctataaatagcaccggtcctggaatagctgcagcactgtcaccccctcattttaactccgacggtcatgggagtgagtacgcactgtctgagcccgtgttcttctcaccctcatatgagaactcatgtcttccagtcgcttttagagagcatagatttgctgcaatgatgcgttcaaatagatgtaacgtgtagccattctatttggcagtacaacttttgatttcaggata

SEQ ID NO: 5545 - protein, 40 aa, Homo sapiens
MAASSRAQVLSLYRAMLRESKRFSAYNYRSTLANCIQLTS

SEQ ID NO: 5546 - DNA, 2330 bp, Homo sapiens
cttcggtaacccgggcaacgcggcctcctggatgtaggaaggggcgctgcccccgaaacacaaatgtctccgccaagaccccagacggttcccaaaggctctccgtgatgcaactgcacgtccctcgaatgcctgggcctccgatatccgtccgccaggagcttggctggatgcacgggcggccagtcctcttatttccccgccctcccgccgcgtggagcggctgctgggtcccgagcctccgggcgggggcgggatcggggcggggcggaggcatctccctcccagcaccgcccccttagctgccccgagccctgcctgcgcccgcccccgaagcggcgcgggacgcctggcgccgtccgcgatccgcagggctgcccgcttaggcttaggcccggcccgctggcaaagccgagccgcagcattttatttcgttcgtggtttccgcacaggctggagtttcgtgggttgggtcgtacttgggacctcggcgaagaggacccgtttatttttttttctttccaaaatggcagcctccagtcgcgcacaagtgttatctctgtaccgggcgatgctgagagagagcaagcgtttcagcgcctacaattacagaacatatgctgtcaggaggataagagatgccttcagagaaaataaaaatgtaaaggatcctgtagaaattcaaaccctagtgaataaagccaagagagaccttggagtaattcgtcgacaggtagctgagcaaggcacagccgccaggaggaagtcggggaacagcagccggagcctggggaagccctgcacaagttggccttgaggaaaccacctgacagacgtttgctcttcctcacagagctggtccacattggccaactgtattcaactgacaagctgatcattgagaatcgagacatgcccaggacctagcaagccggggaccagccaccagtggcggccagggaccaccttcagcatccactctctgtttgagatgggggctcccaaaaccagcttacaatagccttttgcgctgcctgtcctgtgggagctgataaaccaagtcacatttgcattctgttgcaggcttagtgaaaaaggactgctgtctttccttggttcaagtgttagaatggagagctggagttcgttcagaatagtgctgtgtgttaccacgtctcccctgcaccccattcctaccttgtagctcatgaccattgtgtatagcatttctacactttgtttcttggtccttggcaataaaaagaatgatctccctgagcctttgaccccagataaacccctcccaattaatgcattttcatttcctactgatacaaggcctggagagggctgttgggggccctcagggagggttcaactctgagacgagaactgccttggtgaaggcaagttcaagcaccacttgagactgggggcagcatggagtagggcagggctacggggatacacggtgcaccctgcaacttatacctgagcccagtacaacaaaggtgacgggtgtgtaggtacacacccagagatggagcactgcagatcagcaacctcagccccacctgggaatttgctggaaatgcaggctcaagcccctccccacacctggtgaatgagagagccccagcctgacccaagcccagggcgactcccataccctgaagcctggggcatgctgggcagcaccggtgcccaaatctggctggtggacagaagcacctggagagttggagagctttttaaaaagacatctctcagcacttccctctctgcagattctgactcagtaagtgaggggtgaggcacagtcatttttctctattctgaagctctcccactgttttcaatgtttaaccaactggggacccctgctctttaagtatattacaggtaataaagatattgtttgtatgcttttattcttggaaacagattcattccaaacatagaaagaacatattaaataacttgcttgtcatctggggagtttacgagggaccagacctggcagagcggtttcttgtttccctttgcatacagtgctcagtggatttggtatctgtgggttaaggtttggaacaggctcctataaatagcaccggtcctggaatagctgcagcactgtcaccccctcattttaactccgacggtcatgggagtgagtacgcactgtctgagcccgtgttcttctcaccctcatatgagaactcatgtcttccagtcgcttttagagagcatagatttgctgcaatgatgcgttcaaatagatgtaacgtgtagccattctatttggcagtacaacttttgatttcaggata

SEQ ID NO: 5547 - protein, 96 aa, Homo sapiens
MAASSRAQVLSLYRAMLRESKRFSAYNYRTYAVRRIRDAFRENKNVKDPVEIQTLVNKAKRDLGVIRRQVAEQGTAARRKSGNSSRSLGKPCTSWP

SEQ ID NO: 5548 - DNA, 2205 bp, Homo sapiens
cttcggtaacccgggcaacgcggcctcctggatgtaggaaggggcgctgcccccgaaacacaaatgtctccgccaagaccccagacggttcccaaaggctctccgtgatgcaactgcacgtccctcgaatgcctgggcctccgatatccgtccgccaggagcttggctggatgcacgggcggccagtcctcttatttccccgccctcccgccgcgtggagcggctgctgggtcccgagcctccgggcgggggcgggatcggggcggggcggaggcatctccctcccagcaccgcccccttagctgccccgagccctgcctgcgcccgcccccgaagcggcgcgggacgcctggcgccgtccgcgatccgcagggctgcccgcttaggcttaggcccggcccgctggcaaagccgagccgcagcattttatttcgttcgtggtttccgcacaggctggagtttcgtgggttgggtcgtacttgggacctcggcgaagaggacccgtttatttttttttctttccaaaatggcagcctccagtcgcgcacaagtgttatctctgtaccgggcgatgctgagagagagcaagcgtttcagcgcctacaattacagaacatatgctgtcaggaggataagagatgccttcagagaaaataaaaatgtaaaggatcctgtagaaattcaaaccctagtgaataaagccaagagagaccttggagtaattcgtcgacaggtccacattggccaactgtattcaactgacaagctgatcattgagaatcgagacatgcccaggacctagcaagccggggaccagccaccagtggcggccagggaccaccttcagcatccactctctgtttgagatgggggctcccaaaaccagcttacaatagccttttgcgctgcctgtcctgtgggagctgataaaccaagtcacatttgcattctgttgcaggcttagtgaaaaaggactgctgtctttccttggttcaagtgttagaatggagagctggagttcgttcagaatagtgctgtgtgttaccacgtctcccctgcaccccattcctaccttgtagctcatgaccattgtgtatagcatttctacactttgtttcttggtccttggcaataaaaagaatgatctccctgagcctttgaccccagataaacccctcccaattaatgcattttcatttcctactgatacaaggcctggagagggctgttgggggccctcagggagggttcaactctgagacgagaactgccttggtgaaggcaagttcaagcaccacttgagactgggggcagcatggagtagggcagggctacggggatacacggtgcaccctgcaacttatacctgagcccagtacaacaaaggtgacgggtgtgtaggtacacacccagagatggagcactgcagatcagcaacctcagccccacctgggaatttgctggaaatgcaggctcaagcccctccccacacctggtgaatgagagagccccagcctgacccaagcccagggcgactcccataccctgaagcctggggcatgctgggcagcaccggtgcccaaatctggctggtggacagaagcacctggagagttggagagctttttaaaaagacatctctcagcacttccctctctgcagattctgactcagtaagtgaggggtgaggcacagtcatttttctctattctgaagctctcccactgttttcaatgtttaaccaactggggacccctgctctttaagtatattacaggtaataaagatattgtttgtatgcttttattcttggaaacagattcattccaaacatagaaagaacatattaaataacttgcttgtcatctggggagtttacgagggaccagacctggcagagcggtttcttgtttccctttgcatacagtgctcagtggatttggtatctgtgggttaaggtttggaacaggctcctataaatagcaccggtcctggaatagctgcagcactgtcaccccctcattttaactccgacggtcatgggagtgagtacgcactgtctgagcccgtgttcttctcaccctcatatgagaactcatgtcttccagtcgcttttagagagcatagatttgctgcaatgatgcgttcaaatagatgtaacgtgtagccattctatttggcagtacaacttttgatttcaggata

SEQ ID NO: 5549 - protein, 91 aa, Homo sapiens; identical to SEQ ID NO: 718

SEQ ID NO: 5550 - DNA, 1249 bp, Homo sapiens
ctgataggccacagctgctgctggctctgcagccttggcagagttgcaaataggttaaacggagatgggagttctagttctcttttgcttcagccagcttccttttctggctaaatctgagtaaactcaaaagaaactgggcaaggggtttacggctccccatggtgcttcacaaaggtccacattggccaactgtattcaactgacaagctgatcattgagaatcgagacatgcccaggacctagcaagccggggaccagccaccagtggcggccagggaccaccttcagcatccactctctgtttgagatgggggctcccaaaaccagcttacaatagccttttgcgctgcctgtcctgtgggagctgataaaccaagtcacatttgcattctgttgcaggcttagtgaaaaaggactgctgtctttccttggttcaagtgttagaatggagagctggagttcgttcagaatagtgctgtgtgttaccacgtctcccctgcaccccattcctaccttgtagctcatgaccattgtgtatagcatttctacactttgtttcttggtccttggcaataaaaagaatgatctccctgagcctttgaccccagataaacccctcccaattaatgcattttcatttcctactgatacaaggcctggagagggctgttgggggccctcagggagggttcaactctgagacgagaactgccttggtgaaggcaagttcaagcaccacttgagactgggggcagcatggagtagggcagggctacggggatacacggtgcaccctgcaacttatacctgagcccagtacaacaaaggtgacgggtgtgtaggtacacacccagagatggagcactgcagatcagcaacctcagccccacctgggaatttgctggaaatgcaggctcaagcccctccccacacctggtgaatgagagagccccagcctgacccaagcccagggcgactcccataccctgaagcctggggcatgctgggcagcaccggtgcccaaatctggctggtggacagaagcacctggagagttggagagctttttaaaaagacatctctcagcacttccctctctgcagattctgactcagtaagtgaggggtgaggcacagtcatttttctctattctgaagctctcccactgttttcaatgtttaaccaactggggacccctgctctttaagtatattacaggtaataaagatattgtttgtatgctttt

SEQ ID NO: 5551 - protein, 62 aa, Homo sapiens; identical to SEQ ID NO: 5541

SEQ ID NO: 5552 - DNA, 1167 bp, Homo sapiens
ctttccaaaatggcagcctccagtcgcgcacaagtgttatctctgtaccgggcgatgctgagagagagcaagcgtttcagcgcctacaattacaggtccacattggccaactgtattcaactgacaagctgatcattgagaatcgagacatgcccaggacctagcaagccggggaccagccaccagtggcggccagggaccaccttcagcatccactctctgtttgagatgggggctcccaaaaccagcttacaatagccttttgcgctgcctgtcctgtgggagctgataaaccaagtcacatttgcattctgttgcaggcttagtgaaaaaggactgctgtctttccttggttcaagtgttagaatggagagctggagttcgttcagaatagtgctgtgtgttaccacgtctcccctgcaccccattcctaccttgtagctcatgaccattgtgtatagcatttctacactttgtttcttggtccttggcaataaaaagaatgatctccctgagcctttgaccccagataaacccctcccaattaatgcattttcatttcctactgatacaaggcctggagagggctgttgggggccctcagggagggttcaactctgagacgagaactgccttggtgaaggcaagttcaagcaccacttgagactgggggcagcatggagtagggcagggctacggggatacacggtgcaccctgcaacttatacctgagcccagtacaacaaaggtgacgggtgtgtaggtacacacccagagatggagcactgcagatcagcaacctcagccccacctgggaatttgctggaaatgcaggctcaagcccctccccacacctggtgaatgagagagccccagcctgacccaagcccagggcgactcccataccctgaagcctggggcatgctgggcagcaccggtgcccaaatctggctggtggacagaagcacctggagagttggagagctttttaaaaagacatctctcagcacttccctctctgcagattctgactcagtaagtgaggggtgaggcacagtcatttttctctattctgaagctctcccactgttttcaatgtttaaccaactggggacccctgctctttaagtatattacaggtaataaagatattgtttgtatgctttt

SEQ ID NO: 5553 - protein, 40 aa, Homo sapiens; identical to SEQ ID NO: 5545

SEQ ID NO: 5554 - DNA, 1805 bp, Homo sapiens
cttcggtaacccgggcaacgcggcctcctggatgtaggaaggggcgctgcccccgaaacacaaatgtctccgccaagaccccagacggttcccaaaggctctccgtgatgcaactgcacgtccctcgaatgcctgggcctccgatatccgtccgccaggagcttggctggatgcacgggcggccagtcctcttatttccccgccctcccgccgcgtggagcggctgctgggtcccgagcctccgggcgggggcgggatcggggcggggcggaggcatctccctcccagcaccgcccccttagctgccccgagccctgcctgcgcccgcccccgaagcggcgcgggacgcctggcgccgtccgcgatccgcagggctgcccgcttaggcttaggcccggcccgctggcaaagccgagccgcagcattttatttcgttcgtggtttccgcacaggctggagtttcgtgggttgggtcgtacttgggacctcggcgaagaggacccgtttatttttttttctttccaaaatggcagcctccagtcgcgcacaagtgttatctctgtaccgggcgatgctgagagagagcaagcgtttcagcgcctacaattacagaacatatgctgtcaggaggataagagatgccttcagagaaaataaaaatgtaaaggatcctgtagaaattcaaaccctagtgaataaagccaagagagaccttggagtaattcgtcgacaggtccacattggccaactgtattcaactgacaagctgatcattgagaatcgagacatgcccaggacctagcaagccggggaccagccaccagtggcggccagggaccaccttcagcatccactctctgtttgagatgggggctcccaaaaccagcttacaatagccttttgcgctgcctgtcctgtgggagctgataaaccaagtcacatttgcattctgttgcaggcttagtgaaaaaggactgctgtctttccttggttcaagtgttagaatggagagctggagttcgttcagaatagtgctgtgtgttaccacgtctcccctgcaccccattcctaccttgtagctcatgaccattgtgtatagcatttctacactttgtttcttggtccttggcaataaaaagaatgatctccctgagcctttgaccccagataaacccctcccaattaatgcattttcatttcctactgatacaaggcctggagagggctgttgggggccctcagggagggttcaactctgagacgagaactgccttggtgaaggcaagttcaagcaccacttgagactgggggcagcatggagtagggcagggctacggggatacacggtgcaccctgcaacttatacctgagcccagtacaacaaaggtgacgggtgtgtaggtacacacccagagatggagcactgcagatcagcaacctcagccccacctgggaatttgctggaaatgcaggctcaagcccctccccacacctggtgaatgagagagccccagcctgacccaagcccagggcgactcccataccctgaagcctggggcatgctgggcagcaccggtgcccaaatctggctggtggacagaagcacctggagagttggagagctttttaaaaagacatctctcagcacttccctctctgcagattctgactcagtaagtgaggggtgaggcacagtcatttttctctattctgaagctctcccactgttttcaatgtttaaccaactggggacccctgctctttaagtatattacaggtaataaagatattgtttgtatgctttt

SEQ ID NO: 5555 - protein, 91 aa, Homo sapiens; identical to SEQ ID NO: 718

SEQ ID NO: 5556 - DNA, 1930 bp, Homo sapiens
cttcggtaacccgggcaacgcggcctcctggatgtaggaaggggcgctgcccccgaaacacaaatgtctccgccaagaccccagacggttcccaaaggctctccgtgatgcaactgcacgtccctcgaatgcctgggcctccgatatccgtccgccaggagcttggctggatgcacgggcggccagtcctcttatttccccgccctcccgccgcgtggagcggctgctgggtcccgagcctccgggcgggggcgggatcggggcggggcggaggcatctccctcccagcaccgcccccttagctgccccgagccctgcctgcgcccgcccccgaagcggcgcgggacgcctggcgccgtccgcgatccgcagggctgcccgcttaggcttaggcccggcccgctggcaaagccgagccgcagcattttatttcgttcgtggtttccgcacaggctggagtttcgtgggttgggtcgtacttgggacctcggcgaagaggacccgtttatttttttttctttccaaaatggcagcctccagtcgcgcacaagtgttatctctgtaccgggcgatgctgagagagagcaagcgtttcagcgcctacaattacagaacatatgctgtcaggaggataagagatgccttcagagaaaataaaaatgtaaaggatcctgtagaaattcaaaccctagtgaataaagccaagagagaccttggagtaattcgtcgacaggtagctgagcaaggcacagccgccaggaggaagtcggggaacagcagccggagcctggggaagccctgcacaagttggccttgaggaaaccacctgacagacgtttgctcttcctcacagagctggtccacattggccaactgtattcaactgacaagctgatcattgagaatcgagacatgcccaggacctagcaagccggggaccagccaccagtggcggccagggaccaccttcagcatccactctctgtttgagatgggggctcccaaaaccagcttacaatagccttttgcgctgcctgtcctgtgggagctgataaaccaagtcacatttgcattctgttgcaggcttagtgaaaaaggactgctgtctttccttggttcaagtgttagaatggagagctggagttcgttcagaatagtgctgtgtgttaccacgtctcccctgcaccccattcctaccttgtagctcatgaccattgtgtatagcatttctacactttgtttcttggtccttggcaataaaaagaatgatctccctgagcctttgaccccagataaacccctcccaattaatgcattttcatttcctactgatacaaggcctggagagggctgttgggggccctcagggagggttcaactctgagacgagaactgccttggtgaaggcaagttcaagcaccacttgagactgggggcagcatggagtagggcagggctacggggatacacggtgcaccctgcaacttatacctgagcccagtacaacaaaggtgacgggtgtgtaggtacacacccagagatggagcactgcagatcagcaacctcagccccacctgggaatttgctggaaatgcaggctcaagcccctccccacacctggtgaatgagagagccccagcctgacccaagcccagggcgactcccataccctgaagcctggggcatgctgggcagcaccggtgcccaaatctggctggtggacagaagcacctggagagttggagagctttttaaaaagacatctctcagcacttccctctctgcagattctgactcagtaagtgaggggtgaggcacagtcatttttctctattctgaagctctcccactgttttcaatgtttaaccaactggggacccctgctctttaagtatattacaggtaataaagatattgtttgtatgctttt

SEQ ID NO: 5557 - protein, 96 aa, Homo sapiens; identical to SEQ ID NO: 5547

SEQ ID NO: 5558 - DNA, 530 bp, Homo sapiens
cagcttccttttctggctaaatctgagtaaactcaaaagaaactgggcaaggggtttacggctccccatggtgcttcacaaaggtccacattggccaactgtattcaactgacaagctgatcattgagaatcgagacatgcccaggacctagcaagccggggaccagccaccagtggcggccagggaccaccttcagcatccactctctgtttgagatgggggctcccaaaaccagcttacaatagccttttgcgctgcctgtcctgtgggagctgataaaccaagtcacatttgcattctgttgcaggcttagtgaaaaaggactgctgtctttccttggttcaagtgttagaatggagagctggagttcgttcagaatagtgctgtgtgttaccacgtctcccctgcaccccattcctaccttgtagctcatgaccattgtgtatagcatttctacactttgtttcttggtccttggcaataaaaagaatgatctccctgagcctttgaccccagataaacccctccc

SEQ ID NO: 5559 - protein, 31 aa, Homo sapiens
MTIVYSISTLCFLVLGNKKNDLPEPLTPDKP

SEQ ID NO: 5560 - DNA, 1180 bp, Homo sapiens
cttcggtaacccgggcaacgcggcctcctggatgtaggaaggggcgctgcccccgaaacacaaatgtctccgccaagaccccagacggttcccaaaggctctccgtgatgcaactgcacgtccctcgaatgcctgggcctccgatatccgtccgccaggagcttggctggatgcacgggcggccagtcctcttatttccccgccctcccgccgcgtggagcggctgctgggtcccgagcctccgggcgggggcgggatcggggcggggcggaggcatctccctcccagcaccgcccccttagctgccccgagccctgcctgcgcccgcccccgaagcggcgcgggacgcctggcgccgtccgcgatccgcagggctgcccgcttaggcttaggcccggcccgctggcaaagccgagccgcagcattttatttcgttcgtggtttccgcacaggctggagtttcgtgggttgggtcgtacttgggacctcggcgaagaggacccgtttatttttttttctttccaaaatggcagcctccagtcgcgcacaagtgttatctctgtaccgggcgatgctgagagagagcaagcgtttcagcgcctacaattacagaacatatgctgtcaggaggataagagatgccttcagagaaaataaaaatgtaaaggatcctgtagaaattcaaaccctagtgaataaagccaagagagaccttggagtaattcgtcgacaggtccacattggccaactgtattcaactgacaagctgatcattgagaatcgagacatgcccaggacctagcaagccggggaccagccaccagtggcggccagggaccaccttcagcatccactctctgtttgagatgggggctcccaaaaccagcttacaatagccttttgcgctgcctgtcctgtgggagctgataaaccaagtcacatttgcattctgttgcaggcttagtgaaaaaggactgctgtctttccttggttcaagtgttagaatggagagctggagttcgttcagaatagtgctgtgtgttaccacgtctcccctgcaccccattcctaccttgtagctcatgaccattgtgtatagcatttctacactttgtttcttggtccttggcaataaaaagaatgatctccctgagcctttgaccccagataaacccctccc

SEQ ID NO: 5561 - protein, 91 aa, Homo sapiens; identical to SEQ ID NO: 718

SEQ ID NO: 5562 - DNA, 2317 bp, Homo sapiens
aaaggggaagcggactccagcactgcacgggcaggtttagcaaaggtctctaatgggtattttctttttcttagccctgcccccgaattgtcagacggcgggcgtctgcctctgaagttagcagtgatttcctttcgggcctggccttatctccggctgcacgttgcctgttggtgactaataacacaataacattgtctggggctggaataaagtcggagctgtttacccccactctaataggggttcaatataaaaagccggcagagagctgtccaagtcagacgcgcctctgcatctgcgccaggcgaacgggtcctgcgcctcctgcagtcccagctctccaccgccgcgtgcgcctgcagacgctccgctcgctgccttctctcctggcaggcgctgccttttctccccgttaaaagggcacttgggctgaaggatcgctttgagatctgaggaacccgcagcgctttgagggacctgaagctgtttttcttcgttttcctttgggttcagtttgaacgggaggtttttgatccctttttttcagaatggattatttgctcatgattttctctctgctgtttgtggcttgccaaggagctccagaaacagcagtcttaggcgctgagctcagcgcggtgggtgagaacggcggggagaaacccactcccagtccaccctggcggctccgccggtccaagcgctgctcctgctcgtccctgatggataaagagtgtgtctacttctgccacctggacatcatttgggtcaacactcccgagcacgttgttccgtatggacttggaagccctaggtccaagagagccttggagaatttacttcccacaaaggcaacagaccgtgaaaatagatgccaatgtgctagccaaaaagacaagaagtgctggaatttttgccaagcaggaaaagaactcagggctgaagacattatggagaaagactggaataatcataagaaaggaaaagactgttccaagcttgggaaaaagtgtatttatcagcagttagtgagaggaagaaaaatcagaagaagttcagaggaacacctaagacaaaccaggtcggagaccatgagaaacagcgtcaaatcatcttttcatgatcccaagctgaaaggcaagccctccagagagcgttatgtgacccacaaccgagcacattggtgacagaccttcggggcctgtctgaagccatagcctccacggagagccctgtggccgactctgcactctccaccctggctgggatcagagcaggagcatcctctgctggttcctgactggcaaaggaccagcgtcctcgttcaaaacattccaagaaaggttaaggagttcccccaaccatcttcactggcttccatcagtggtaactgctttggtctcttctttcatctggggatgacaatggacctctcagcagaaacacacagtcacattcgaattcgggtggcatcctccggagagagagagaggaaggagattccacacaggggtggagtttctgacgaaggtcctaagggagtgtttgtgtctgactcaggcgcctggcacatttcagggagaaactccaaagtccacacaaagattttctaaggaatgcacaaattgaaaacacactcaaaagacaaacatgcaagtaaagaaaaaaaaaagaaagacttttgtttaaatttgtaaaatgcaaaactgaatgaaactgttactaccataaatcaggatatgtttcatgaatatgagtctacctcacctatattgcactctggcagaagtatttcccacatttaattattgcctccccaaactcttcccacccctgctgccccttcctccatcccccatactaaatcctagcctcgtagaagtctggtctaatgtgtcagcagtagatataatattttcatggtaatctactagctctgatccataagaaaaaaaagatcattaaatcaggagattccctgtccttgatttttggagacacaatggtatagggttgtttatgaaatatattgaaaagtaagtgtttgttacgctttaaagcagtaaaattattttcctttatataaccggctaatgaaagaggttggattgaattttgatgtacttatttttttatagatatttatattcaaacaatttattccttatatttaccatgttaaatatctgtttgggcaggccatattggtctatgtatttttaaaatatgtatttctaaatgaaattgagaacatgctttgttttgcctgtcaaggtaatgactttagaaaataaatatttttttccttactgta

SEQ ID NO: 5563 - protein, 212 aa, Homo sapiens; identical to SEQ ID NO: 720

SEQ ID NO: 5564 - DNA, 1554 bp, Homo sapiens
ccaggcgaacgggtcctgcgcctcctgcagtcccagctctccaccgccgcgtgcgcctgcagacgctccgctcgctgccttctctcctggcaggcgctgccttttctccccgttaaaagggcacttgggctgaaggatcgctttgagatctgaggaacccgcagcgctttgagggacctgaagctacattatggagaaagactggaataatcataagaaaggaaaagactgttccaagcttgggaaaaagtgtatttatcagcagttagtgagaggaagaaaaatcagaagaagttcagaggaacacctaagacaaaccaggtcggagaccatgagaaacagcgtcaaatcatcttttcatgatcccaagctgaaaggcaagccctccagagagcgttatgtgacccacaaccgagcacattggtgacagaccttcggggcctgtctgaagccatagcctccacggagagccctgtggccgactctgcactctccaccctggctgggatcagagcaggagcatcctctgctggttcctgactggcaaaggaccagcgtcctcgttcaaaacattccaagaaaggttaaggagttcccccaaccatcttcactggcttccatcagtggtaactgctttggtctcttctttcatctggggatgacaatggacctctcagcagaaacacacagtcacattcgaattcgggtggcatcctccggagagagagagaggaaggagattccacacaggggtggagtttctgacgaaggtcctaagggagtgtttgtgtctgactcaggcgcctggcacatttcagggagaaactccaaagtccacacaaagattttctaaggaatgcacaaattgaaaacacactcaaaagacaaacatgcaagtaaagaaaaaaaaaagaaagacttttgtttaaatttgtaaaatgcaaaactgaatgaaactgttactaccataaatcaggatatgtttcatgaatatgagtctacctcacctatattgcactctggcagaagtatttcccacatttaattattgcctccccaaactcttcccacccctgctgccccttcctccatcccccatactaaatcctagcctcgtagaagtctggtctaatgtgtcagcagtagatataatattttcatggtaatctactagctctgatccataagaaaaaaaagatcattaaatcaggagattccctgtccttgatttttggagacacaatggtatagggttgtttatgaaatatattgaaaagtaagtgtttgttacgctttaaagcagtaaaattattttcctttatataaccggctaatgaaagaggttggattgaattttgatgtacttatttttttatagatatttatattcaaacaatttattccttatatttaccatgttaaatatctgtttgggcaggccatattggtctatgtatttttaaaatatgtatttctaaatgaaattgagaacatgctttgttttgcctgtcaaggtaatgactttagaaaataaatatttttttccttactgta

SEQ ID NO: 5565 - protein, 78 aa, Homo sapiens
MEKDWNNHKKGKDCSKLGKKCIYQQLVRGRKIRRSSEEHLRQTRSETMRNSVKSSFHDPKLKGKPSRERYVTHNRAHW

SEQ ID NO: 5566 - DNA, 1299 bp, Homo sapiens
gctcatgggaaaaaaatgtctctcgggctgtgagcagtgaattggcttgtgcccaagtaatgtcctcaaggtgtgccatgagagatgaagtcacttggctcattttaccagcttcaggatggcattaagacctgacaaagccaggcaacacgtacaaggaaactaacctgaggcaggaccgtggcactgaaggagtctccctggatgcagcaaaggtggagaccttgtccaagaaaaatgctggacgggcctttaccccaaagaggaaagctgggtcatggaacaaggaaatgaattacatcaagtgaaaatgcacatctgatgcccagtccagaccaagcacgtctgttcctgctgacttcgaatgattgtcaagtggctggactcagatgttagccgtctgtcattgctgctaataacatattcatgtacaaaaacaacagaggggtatctaggcagctggagccctctgtgttccggactacagattcggggacccaaagaaaatctttgtgtggactttggagtttctccctgaaatgtgccaggcgcctgagtcagacacaaacactcccttaggaccttcgtcagaaactccacccctgtgtggaatctccttcctctctctctctccggaggatgccacccgaattcgaatgtgactgtgtgtttctgctgagaggtccattgtcatccccagatgaaagaagagaccaaagcagttaccactgatggaagccagtgaagatggttgggggaactccttaacctttcttggaatgttttgaacgaggacgctggtcctttgccagtcaggaaccagcagaggatgctcctgctctgatcccagccagggtggagagtgcagagtcggccacagggctctccgtggaggctatggcttcagacaggccccgaaggtctgtcaccaatgtgctcggttgtgggtcacataacgctctctggagggcttgcctttcagcttgggatcatgaaaagatgatttgacgctgtttctcatggtctccgacctaataaagcaagataagagaaaacaaatgttattttaaaaaaatcaccctttggcaaaagaaacatgtaaaattagaatctggcacaaacaaaacctgaatctggttgtgaactttcaccacccgccgcaactctttgataaaacctcaagtgatatctattaccattgtaaaaataaagcctgcccctatgcttagaatgggagcgaggggtcatatggtcaagtctaaggggaagtgggcagtaaatacaggttttaaataaact

SEQ ID NO: 5567 - protein, 57 aa, Homo sapiens
MIVKWLDSDVSRLSLLLITYSCTKTTEGYLGSWSPLCSGLQIRGPKENLCVDFGVSP

SEQ ID NO: 5568 - DNA, 836 bp, Homo sapiens
caaatcatcttttcatgatcccaagctgaaaggcaagccctccagagagcgttatgtgacccacaaccgagcacattggtgacagaccttcggggcctgtctgaagccatagcctccacggagagccctgtggccgactctgcactctccaccctggctgggatcagagcaggagcatcctctgctggttcctgactggcaaaggaccagcgtcctcgttcaaaacattccaagaaaggttaaggagttcccccaaccatcttcactggcttccatcagtggtaactgctttggtctcttctttcatctggggatgacaatggacctctcagcagaaacacacagtcacattcgaattcgggtggcatctccatcccccatactaaatcctagcctcgtagaagtctggtctaatgtgtcagcagtagatataatattttcatggtaatctactagctctgatccataagaaaaaaaagatcattaaatcaggagattccctgtccttgatttttggagacacaatggtatagggttgtttatgaaatatattgaaaagtaagtgtttgttacgctttaaagcagtaaaattattttcctttatataaccggctaatgaaagaggttggattgaattttgatgtacttatttttttatagatatttatattcaaacaatttattccttatatttaccatgttaaatatctgtttgggcaggccatattggtctatgtatttttaaaatatgtatttctaaatgaaattgagaacatgctttgttttgcctgtcaaggtaatgactttagaaaataaatatttttttccttactgta

SEQ ID NO: 5569 - protein, 44 aa, Homo sapiens
MTMDLSAETHSHIRIRVASPSPILNPSLVEVWSNVSAVDIIFSW

SEQ ID NO: 5570 - DNA, 883 bp, Homo sapiens
ttggtgacagaccttcggggcctgtctgaagccatagcctccacggagagccctgtggccgactctgcactctccaccctggctgggatcagagcaggagcatcctctgctggttcctgactggcaaaggaccagcgtcctcgttcaaaacattctccaaagtccacacaaagattttctaaggaatgcacaaattgaaaacacactcaaaagacaaacatgcaagtaaagaaaaaaaaaagaaagacttttgtttaaatttgtaaaatgcaaaactgaatgaaactgttactaccataaatcaggatatgtttcatgaatatgagtctacctcacctatattgcactctggcagaagtatttcccacatttaattattgcctccccaaactcttcccacccctgctgccccttcctccatcccccatactaaatcctagcctcgtagaagtctggtctaatgtgtcagcagtagatataatattttcatggtaatctactagctctgatccataagaaaaaaaagatcattaaatcaggagattccctgtccttgatttttggagacacaatggtatagggttgtttatgaaatatattgaaaagtaagtgtttgttacgctttaaagcagtaaaattattttcctttatataaccggctaatgaaagaggttggattgaattttgatgtacttatttttttatagatatttatattcaaacaatttattccttatatttaccatgttaaatatctgtttgggcaggccatattggtctatgtatttttaaaatatgtatttctaaatgaaattgagaacatgctttgttttgcctgtcaaggtaatgactttagaaaataaatatttttttccttactgta

SEQ ID NO: 5571 - protein, 59 aa, Homo sapiens [sequence omitted]

SEQ ID NO: 5572 - DNA, 6078 bp, Homo sapiens
tggatagcctctctctcattggttagggggcttggaaaaaagagactcggcgagccctcgctgtggtgctgccgccgccgccgccgccgccgctggagttgactcttctgctcgcactgctgctgcagcacaaacgtgacttccaacattttttatttatctttcccttttcttttccaagatgtaactacggatcagacactaaggaccttcacgtttcgctgatgtagtttttggaggaaaaaggggggggagtgaagggcgtcggtttttttttgtgtgtgtgtgtatgtgtttcgggggaaattttccattatgagtgttttactaaagtgaatttttttttgtttgcttcgttcgtctttggctctttttttttccttcccaatttcggatttatttcaaggcgaatctggctttgggggaagaggaagaaaagtcggattacaagatcaaccaccaccaacaacaataaaaaccaccaggatatttttttgcaaatttctgacggctttaaattcatgaagcaattgtccccttttgcaatcagcatttggatctcagaatgagcaaggaaagacccaagaggaatatcattcagaagaaatacgatgacagtgatgggattccgtggtcagaagaacgggtggtacgtaaagtcctttatttgtctctgaaggagttcaagaattcccagaagaggcagcatgcggaaggcattgctgggagcctgaaaactgtgaatgggctccttggtaatgaccagtctaagggattaggaccagcatcagaacagtcagagaatgaaaaggacgatgcatcccaagtgtcctccactagcaacgatgttagttcttcagattttgaagaagggccgtcgaggaaaaggcccaggctgcaagcacaaaggaagtttgctcagtctcagccgaatagtcccagcacaactccagtaaagatagtggagccattgctaccccctccagctactcagatatcagacctctctaaaaggaagcctaagacagaagattttcttacctttctctgccttcgaggttctcctgcgctgcccaacagcatggtgtattttggaagctctcaggatgaggaggaagtcgaggaggaagatgatgagacagaagacgtcaaaacagccaccaacaatgcttcatcttcatgccagtcgacccccaggaaaggaaaaacccacaaacatgttcacaacgggcatgttttcaatggttccagcaggtcaacacgggagaaggaacctgttcaaaaacacaaaagcaaagaggccactcccgcaaaggagaagcacagcgatcaccgggctgacagccgccgggagcaggcttcagctaaccaccccgcagcggccccctccacgggttcctcggccaaggggcttgctgccacccatcaccacccccctctgcatcggtcggctcaggacttacggaaacaggtttctaaggtaaacggagtcactcgaatgtcatctctgggtgcaggtgtaaccagtgccaaaaagatgcgcgaggtcagaccttcaccatccaaaactgtgaagtacactgccacggtgacgaagggggctgtcacatacaccaaagccaagagagaactggtcaaggacaccaaacccaatcaccacaagcccagttccgctgtcaaccacacaatctcagggaaaactgaaagtagcaatgcaaaaacccgcaaacaggtgctatccctcgggggggcgtccaagtccactgggcccgccgtcaatggcctcaaggtcagtggcaggttgaacccaaagtcatgcactaaggaggtgggggggcggcagctgcgggagggcctgcagctgcgggaggggctgcggaactccaagaggagactggaagaggcacaccaggcggagaagccgcagtcgccccccaagaagatgaaaggggcggctggccccgccgaaggccctggcaagaaggccccggccgagagaggtctgctgaacggacacgtgaagaaggaagtgccggagcgcagtctggagaggaatcggccgaagcgggccacggccgggaagagcacgccaggcagacaagcacatggcaaggcggacagcgcctcctgtgaaaatcgttctacctcgcaaccggagtccgtgcacaagccgcaggactcgggcaaggccgagaagggcggcggcaaggccgggtgggcggccatggacgagatccccgtcctcaggccctccgccaaggagttccacgatccgctcatctacatcgagtcggtccgcgctcaggtggagaagttcgggatgtgcagggtgatcccccctccggactggcggcccgagtgcaagctcaacgatgagatgcggtttgtcacgcagattcagcacatccacaagctgggccggcgctggggccccaacgtgcagcggctggcctgcatcaagaagcacctcaaatctcagggcatcaccatggacgagctcccgctcatagggggctgtgagctcgacctggcctgctttttccggctgattaatgagatgggcggcatgcagcaagtgactgacctcaaaaaatggaacaaactagcagacatgctgcgcatccccagaactgcccaggaccggctggccaagctgcaggaggcctactgccagtacctactctcctacgactccctgtccccagaggagcaccggcggctggagaaggaggtgctgatggagaaggagatcctggagaagcgcaaggggccgctggaaggccacacagagaacgaccaccacaagttccaccctctgccccgcttcgagcccaagaatgggctcatccacggcgtggcccccaggaacggcttccgcagcaagctcaaggaggtgggccaggcccagttgaagactggccggcggcgactcttcgctcaggaaaaagaagtggtcaaggaagaggaggaggacaaaggcgtcctcaatgacttccacaagtgcatctataagggaaggtctgtttctctaacaactttttatcgaacagcgaggaatatcatgagcatgtgtttcagcaaggagcctgccccagccgaaatcgagcaagagtactggaggctagtggaagagaaggactgccacgtggcagtgcactgcggcaaggtggacaccaacactcacggcagtggattcccagtaggaaaatcagaacccttttcgaggcatggatggaacctcaccgtcctccccaataacacagggtccatcctgcgtcacctcggtgctgtgcctggagtgactattccctggctaaatattggcatggtcttttctacctcatgctggtctcgagaccaaaatcaccttccatacattgactacttacacactggtgctgactgcatttggtattgcattcctgctgaggaggagaacaagctggaagatgtggtccacaccctgctgcaagccaatggcaccccagggctgcagatgctggaaagcaacgtcatgatctccccggaggtgctgtgcaaagaggggatcaaggtgcacaggaccgtgcagcagagtggccagtttgtcgtctgcttcccgggatcctttgtgtccaaagtgtgctgtgggtacagcgtgtctgaaaccgtgcactttgctaccacccagtggacaagtatgggctttgagaccgccaaggaaatgaagcgtcgccatatagctaagccattctccatggagaagttactctaccagattgcacaagcagaagcaaaaaaagaaaacggtcccactctcagtaccatctcagccctcctggatgagctcagggatacagagctgcggcagcgcaggcagctgttcgaggctggcctccactcctccgcacgctatggcagccacgatggcagcagcacggtggcggacgggaagaaaaagcctcgaaagtggctgcagttggagacgtcagagaggaggtgtcagatctgccagcacctgtgctacctgtccatggtggtacaagagaacgaaaacgtcgtgttctgtctggagtgtgctctgcgccacgtggagaaacagaagtcctgccgagggctgaagttgatgtaccgctacgatgaggaacagattatcagtctggtcaatcagatctgcggcaaagtgtctggtaaaaacggcagcattgagaactgtctcagtaaacccacaccaaaaagaggtccccgcaagagagcgacagtggacgtgcccccctcccgtctgtcagcctccagttcatccaaaagtgcttcgagctcatcatgaagatgccaacgcccgtggtcgatttatatatatttttttgtaattattatattctagtttggagtacttgctgtaggattcaagctgtctttgcactagctctaaagaagattttcttctggttttagagaactaattttgttttagcattaaactgttgaacttttttttgtacttagaaaacctagatactgcagtcagattttggaaactgccgtatagtcactgttttaaaaaccccggaggggctgtattaatttgtattgccccatggctgacaaaagcctttttttttggttttgatttttttttttttgtaactgttggggggaaaaaggctttttaacccatttttgaagagggtgaagtttggagaacaaatttaaaaaccatcagtcatgtgagcagattttttagaagggataggagacacacgcgcacacacacacacacacgaaacttgaaatggctttgctttggctgtcgtcttctgccgtgtgccagatgagcttgtgatctgggaagccggggcacccccgttttgtttctctgggcggttgtggcagctgaaggcggacgttgtttcctaaccataggtggaacgaggagacgggagcgagtgggctctccaccagcacatcactatgcatctgttccaggaaagaagaaaagcgagcgaggaagacggaaaagactgcctgccttggaggggtcacatgagggagacctgtgcctgatttcattaggaaatccattctgttattttttggtgctgttggctactttatcaaaaaacccttcaatagcatccttaagatttaaaaaaaaaaaaaaaaaaaaggaaaaaaaagtgatggaagccgtaagtgcttctttgtcatcgacgtgcaatctttctaacattccatctccatctcaccgcttcttgtttgacaccttcacaagtcagcattaatctttcttttaaaacttgtttcatttatgatcatgtagagagccactaggaggcctgcagttatttttgaatgtgaaaatgcatttgcgttcatcttgtctattttttctcttcatgttgtaacaaaaaggaaaaaagaaaaaaaaatcccatcccttttgtacatatgcctgtaaattgttttaaatacttgagcctttttctcggtggggggtggggaggggggtgagaagacaagatgaagaaaagccttacatttcagtttcttcatcggttggattggatgcttacagggtttttcttgtaacatttataagtgctgcttacatcactgaacaacaacaaaaaaataataatggagtagctgttgcccttctccggttgtgtgtacagtatgtgtggaataaaaaagggaaactgttttcacaagctgttctttgtttcataattggattcatcaatcccgtagctacccatattgcactgagcttgccagtggtgactgccaggaacgtcctatgatccactttgttggttgttgttgcagaagactgaactgttttggaatatttaacaattacagaaacagtcaagtgttttccaatgtggttgtccggtttctatggccttgctgtgtactttccctctttttgacagtaaacttctgcctatggcttacagtttgacatttaatttattagcgctgctctgcacccctcccttgggagggagacttcatgtggtttattgcgagttttttgtttacttttcaggtttgtactacaaggtttaataataaaaacaaagttttttggac

SEQ ID NO: 5573 - protein, 1246 aa, Homo sapiens [sequence omitted]

SEQ ID NO: 5574 - DNA, 6095 bp, Homo sapiens
tggatagcctctctctcattggttagggggcttggaaaaaagagactcggcgagccctcgctgtggtgctgccgccgccgccgccgccgccgctggagttgactcttctgctcgcactgctgctgcagcacaaacgtgacttccaacattttttatttatctttcccttttcttttccaagatgtaactacggatcagacactaaggaccttcacgtttcgctgatgtagtttttggaggaaaaaggggggggagtgaagggcgtcggtttttttttgtgtgtgtgtgtatgtgtttcgggggaaattttccattatgagtgttttactaaagtgaatttttttttgtttgcttcgttcgtctttggctctttttttttccttcccaatttcggatttatttcaaggcgaatctggctttgggggaagaggaagaaaagtcggattacaagatcaaccaccaccaacaacaataaaaaccaccaggatatttttttgcaaatttctgacggctttaaattcatgaagcaattgtccccttttgcaatcagcatttggatctcagaatgagcaaggaaagacccaagaggaatatcattcagaagaaatacgatgacagtgatgggattccgtggtcagaagaacgggtggtacgtaaagtcctttatttgtctctgaaggagttcaagaattcccagaagaggcagcatgcggaaggcattgctgggagcctgaaaactgtgaatgggctccttggtaatgaccagtctaagggattaggaccagcatcagaacagtcagagaatgaaaaggacgatgcatcccaagtgtcctccactagcaacgatgttagttcttcagattttgaagaagggccgtcgaggaaaaggcccaggctgcaagcacaaaggaagtttgctcagtctcagccgaatagtcccagcacaactccagtaaagatagtggagccattgctaccccctccagctactcagatatcagacctctctaaaaggaagcctaagacagaagattttcttacctttctctgccttcgaggttctcctgcgctgcccaacagcatggtgtattttggaagctctcaggatgaggaggaagtcgaggaggaagatgatgagacagaagacgtcaaaacagccaccaacaatgcttcatcttcatgccagtcgacccccaggaaaggaaaaacccacaaacatgttcacaacgggcatgttttcaatggttccagcaggtcaacacgggagaaggaacctgttcaaaaacacaaaagcaaagaggccactcccgcaaaggagaagcacagcgatcaccgggctgacagccgccgggagcaggcttcagctaaccaccccgcagcggccccctccacgggttcctcggccaaggggcttgctgccacccatcaccacccccctctgcatcggtcggctcaggacttacggaaacaggtttctaaggtaaacggagtcactcgaatgtcatctctgggtgcaggtgtaaccagtgccaaaaagatgcgcgaggtcagaccttcaccatccaaaactgtgaagtacactgccacggtgacgaagggggctgtcacatacaccaaagccaagagagaactggtcaaggacaccaaacccaatcaccacaagcccagttccgctgtcaaccacacaatctcagggaaaactgaaagtagcaatgcaaaaacccgcaaacaggtgctatccctcgggggggcgtccaagtccactgggcccgccgtcaatggcctcaaggtcagtggcaggttgaacccaaagtcatgcactaaggaggtgggggggcggcagctgcgggagggcctgcagctgcgggaggggctgcggaactccaagaggagactggaagaggcacaccaggcggagaagccgcagtcgccccccaagaagatgaaaggggcggctggccccgccgaaggccctggcaagaaggccccggccgagagaggtctgctgaacggacacgtgaagaaggaagtgccggagcgcagtctggagaggaatcggccgaagcgggccacggccgggaagagcacgccaggcagacaagcacatggcaaggcggacagcgcctcctgtgaaaatcgttctacctcgcaaccggagtccgtgcacaagccgcaggactcgggcaaggccgagaagggcggcggcaaggccgggtgggcggccatggacgagatccccgtcctcaggccctccgccaaggagttccacgatccgctcatctacatcgagtcggtccgcgctcaggtggagaagttcgggatgtgcagggtgatcccccctccggactggcggcccgagtgcaagctcaacgatgagatgcggtttgtcacgcagattcagcacatccacaagctgggccggcgctggggccccaacgtgcagcggctggcctgcatcaagaagcacctcaaatctcagggcatcaccatggacgagctcccgctcatagggggctgtgagctcgacctggcctgctttttccggctgattaatgagatgggcggcatgcagcaagtgactgacctcaaaaaatggaacaaactagcagacatgctgcgcatccccagaactgcccaggaccggctggccaagctgcaggaggcctactgccagtacctactctcctacgactccctgtccccagaggagcaccggcggctggagaaggaggtgctgatggagaaggagatcctggagaagcgcaaggggccgctggaaggccacacagagaacgaccaccacaagttccaccctctgccccgcttcgagcccaagaatgggctcatccacggcgtggcccccaggaacggcttccgcagcaagctcaaggaggtgggccaggcccagttgaagactggccggcggcgactcttcgctcaggaaaaagaagtggtcaaggaagaggaggaggacaaaggcgtcctcaatgacttccacaagtgcatctataagggaaggtctgtttctctaacaactttttatcgaacagcgaggaatatcatgagcatgtgtttcagcaaggagcctgccccagccgaaatcgagcaagagtactggaggctagtggaagagaaggactgccacgtggcagtgcactgcggcaaggtggacaccaacactcacggcagtggattcccagtaggaaaatcagaacccttttcgaggcatggatggaacctcaccgtcctccccaataacacagggtccatcctgcgtcacctcggtgctgtgcctggagtgactattccctggctaaatattggcatggtcttttctacctcatgctggtctcgagaccaaaatcaccttccatacattgactacttacacactggtgctgactgcatttggtattgcattcctgctgaggaggagaacaagctggaagatgtggtccacaccctgctgcaagccaatggcaccccagggctgcagatgctggaaagcaacgtcatgatctccccggaggtgctgtgcaaagaggggatcaaggtgcacaggaccgtgcagcagagtggccagtttgtcgtctgcttcccgggatcctttgtgtccaaagtgtgctgtgggtacagcgtgtctgaaaccgtgcactttgctaccacccagtggacaagtatgggctttgagaccgccaaggaaatgaagcgtcgccatatagctaagccattctccatggagaagttactctaccagattgcacaagcagaagcaaaaaaagaaaacggtcccactctcagtaccatctcagccctcctggatgagctcagggatacagagctgcggcagcgcaggcagctgttcgaggctggcctccactcctccgcacgctatggcagccacgatggcagcagcacggtggcggacgggaagaaaaagcctcgaaagtggctgcagttggagacgtcagagaggaggtgtcagatctgccagcacctgtgctacctgtccatggtggtacaagagaacgaaaacgtcgtgttctgtctggagtgtgctctgcgccacgtggagaaacagaagtcctgccgagggctgaagttgatgtaccgctacgatgaggaacagattatcagtctggtcaatcagatctgcggcaaagtgtctggtaaaaacggcagcattgagaactgtctcagtaaacccacaccaaaaagaggtccccgcaagagagcgacagtggacgtgcccccctcccgtctgtcagcctccagttcatccaaaagtgcttcgagctcatcatgaagatgccaacgcccgtggtcgatttatatatatttttttgtaattattatattctagtttggagtacttgctgtaggattcaagctgtctttgcactagctctaaagaagattttcttctggttttagagaactaattttgttttagcattaaactgttgaacttttttttgtacttagaaaacctagatactgcagtcagattttggaaactgccgtatagtcactgttttaaaaaccccggaggggctgtattaatttgtattgccccatggctgacaaaagcctttttttttggttttgatttttttttttttgtaactgttggggggaaaaaggctttttaacccatttttgaagagggtgaagtttggagaacaaatttaaaaaccatcagtcatgtgagcagattttttagaagggataggagacacacgcgcacacacacacacacacgaaacttgaaatggctttgctttggctgtcgtcttctgccgtgtgccagatgagcttgtgatctgggaagccggggcacccccgttttgtttctctgggcggttgtggcagctgaaggcggacgttgtttcctaaccataggtggaacgaggagacgggagcgagtgggctctccaccagcacatcactatgcatctgttccaggaaagaagaaaagcgagcgaggaagacggaaaagactgcctgccttggaggggtcacatgagggagacctgtgcctgatttcattaggaaatccattctgttattttttggtgctgttggctactttatcaaaaaacccttcaatagcatccttaagatttaaaaaaaaaaaaaaaaaaaaggaaaaaaaagtgatggaagccgtaagtgcttctttgtcatcgacgtgcaatctttctaacattccatctccatctcaccgcttcttgtttgacaccttcacaagtcagcattaatctttcttttaaaacttgtttcatttatgatcatgtagagagccactaggaggcctgcagttatttttgaatgtgaaaatgcatttgcgttcatcttgtctattttttctcttcatgttgtaacaaaaaggaaaaaagaaaaaaaaatcccatcccttttgtacatatgcctgtaaattgttttaaatacttgagcctttttctcggtggggggtggggaggggggtgagaagacaagatgaagaaaagccttacatttcagtttcttcatcggttggattggatgcttacagggtttttcttgtaacatttataagtgctgcttacatcactgaacaacaacaaaaaaataataatggagtagctgttgcccttctccggttgtgtgtacagtatgtgtggaataaaaaagggaaactgttttcacaagctgttctttgtttcataattggattcatcaatcccgtagctacccatattgcactgagcttgccagtggtgactgccaggaacgtcctatgatccactttgttggttgttgttgcagaagactgaactgttttggaatatttaacaattacagaaacagtcaagtgttttccaatgtggttgtccggtttctatggccttgctgtgtactttccctctttttgacagtaaacttctgcctatggcttacagtttgacatttaatttattagcgctgctctgcacccctcccttgggagggagacttcatgtggtttattgcgagttttttgtttacttttcaggtttgtactacaaggtttaataataaaaacaaagttttttggacatttgtctgtcttgtgg

SEQ ID NO: 5575 - protein, 1246 aa, Homo sapiens [sequence omitted]

SEQ ID NO: 5576 - DNA, 2874 bp, Homo sapiens
ggaagtggggagaatcaaggcggggaaatcggacttttgggtcgctgggggcaacgaagcctggagaggccttctttccattcccagaatatgtttgctgctttttcctctccccactggcctaaatggatcgctccgcctgtttcctccccagcacctagggcgcaatggaatattccattgcccctcctgtcctgggtctgtgttgcggggaacgctcgcgcggttgccagagaaagccccggacgtgacggatttgcgcgaccccaagcagcccgcccttccccctcccatccgtcattcccctgcgctctctttcctcacccttccccccgccaccgtgggttccagacttgggataagtaaacagcgggtggagcgaggcctacggacccaggccaggtgggagtctgcactcttcaaggggcctgggctgctgctcacgggtattaaagaactccgcgttgttcatggctgaggcgatgcattaggaagatcctggacctagagaacaagtcccccgaacgctgagttggaggcgggacttcgggtgcgcgttggcgggagcatgctggggctctgcgggcagcggctccccgcggcgtgggtcctgcttctgttgcctttcctgccgctgctgctgcttgcagcccccgcgccccaccgcgcgtcctacaagccggtcatcgtggtgcatgggctcttcgacagctcgtacagcttccgccacctgctggaatacatcaatgagacacaccccgggactgtggtgacagtgctcgatctcttcgatgggagagagagcttgcgacccctgtgggaacaggtgcaagggttccgagaggctgtggtccccatcatggcaaaggcccctcaaggggtgcatctcatctgctactcgcaggggggccttgtgtgccgggctctgctttctgtcatggatgatcacaacgtggattctttcatctccctctcctctccacagatgggacagtatggagacacggactacttgaagtggctgttccccacctccatgcggtctaacctctatcggatctgctatagcccctggggccaggaattctccatctgcaactactggcatgatccccaccacgatgacttgtacctcaatgccagcagcttcctggccctgatcaatggggaaagagaccatcccaatgccacagtatggcggaagaactttctgcgtgtgggccacctggtgctgattgggggccctgatgatggtgttattactccctggcagtccagcttctttggtttctatgatgcaaatgagaccgtcctggagatggaggagcaactgcctgccaggcccacccaccagtctgagctgcttctgctgaggctggtctgcttgaagcctcccaggagaaagaagccagcctgtagggtccagcgtcaaagcgaatcatggggtccagggctgagctgtgcactctcttaggcggattctccttcctcctgctactgataccaggcgagggggccaagggtggatccctcagagagaggtgacaacagagggggtagggcccggggtgagctcttctcaggagccttctgctgggggtggggcttcacaggaggcaaaacataactgtaagtttagaatgggggtgagaggctgtcatctggagggagagcggggggcctcagtagcctcttgagggaagtgggactcctggctccccagggcctggcctactcaatctctcccacctcatcctctggcatggacgcagtcagggagtctgctccaagcagacactggtggtcccgctccactacaacgagtcctacagccaaccagtgtacaagccctacctgaccttgtgcgctgggaggcgcatctgcagcacttacaggaccatgtaccgcgttatgtggcgggaggtgaggcgggaggttcagcagacccatgcagtgtgctgccagggctggaagaagcggcacccgggggcgctcacctgtgaagccatctgcgccaagccttgcctgaacggaggcgtctgcgttaggcctgaccagtgcgagtgcgcccccggctggggagggaagcactgtcatgtggacgtggatgaatgtaggaccagcatcaccctctgctcgcaccattgttttaatacggcaggcagcttcacctgcggctgcccccatgacctagtgctaggcgtggacgggcgcacctgcatggaggggtccccagagcccccaaccagtgccagcatactcagcgtggccgttcgggaggcggaaaaagatgagcgcgctctgaagcaggagattcacgagctgcgagggcgcctggagcggctggagcagtgggccggtcaggctggggcctgggtcagagcggtgctgcccgtgccgcctgaagagctgcagccagaacaggtggctgagctgtggggccggggtgaccggatcgaatctctcagcgaccaggtgctgctgctggaggagaggctaggtgcctgctcctgtgaggacaacagcctgggcctcggcgtcaatcatcgataagaagcctctacagcacccctgccccctaatttatacagaaaccggacccactaatcctctgggattggccgactgtgagctgcagataaggctatcagccaccaaagagcaatgaacaatggaaacttcagagagctgaagaaagggggaggcctgtgttcttggcctgcccctgagtcttctggctgggggcaggttgcctgggcaagaactgcttcttcaattccttaacaaatgcaaccaccaacacccagatctctctctctctttattttcagtttttttgctgttatccagataattaataaaaaccaaccacgc

SEQ ID NO: 5577 - protein, 301 aa, Homo sapiens
MLGLCGQRLPAAWVLLLLPFLPLLLLAAPAPHRASYKPVIVVHGLFDSSYSFRHLLEYINETHPGTVVTVLDLFDGRESLRPLWEQVQGFREAVVPIMAKAPQGVHLICYSQGGLVCRALLSVMDDHNVDSFISLSSPQMGQYGDTDYLKWLFPTSMRSNLYRICYSPWGQEFSICNYWHDPHHDDLYLNASSFLALINGERDHPNATVWRKNFLRVGHLVLIGGPDDGVITPWQSSFFGFYDANETVLEMEEQLPARPTHQSELLLLRLVCLKPPRRKKPACRVQRQSESWGPGLSCALS

SEQ ID NO: 5578 - DNA, 4309 bp, Homo sapiens
ggaagtggggagaatcaaggcggggaaatcggacttttgggtcgctgggggcaacgaagcctggagaggccttctttccattcccagaatatgtttgctgctttttcctctccccactggcctaaatggatcgctccgcctgtttcctccccagcacctagggcgcaatggaatattccattgcccctcctgtcctgggtctgtgttgcggggaacgctcgcgcggttgccagagaaagccccggacgtgacggatttgcgcgaccccaagcagcccgcccttccccctcccatccgtcattcccctgcgctctctttcctcacccttccccccgccaccgtgggttccagacttgggataagtaaacagcgggtggagcgaggcctacggacccaggccaggtgggagtctgcactcttcaaggggcctgggctgctgctcacgggtattaaagaactccgcgttgttcatggctgaggcgatgcattaggaagatcctggacctagagaacaagtcccccgaacgctgagttggaggcgggacttcgggtgcgcgttggcgggagcatgctggggctctgcgggcagcggctccccgcggcgtgggtcctgcttctgttgcctttcctgccgctgctgctgcttgcagcccccgcgccccaccgcgcgtcctacaagccggtcatcgtggtgcatgggctcttcgacagctcgtacagcttccgccacctgctggaatacatcaatgagacacaccccgggactgtggtgacagtgctcgatctcttcgatgggagagagagcttgcgacccctgtgggaacaggtgcaagggttccgagaggctgtggtccccatcatggcaaaggcccctcaaggggtgcatctcatctgctactcgcaggggggccttgtgtgccgggctctgctttctgtcatggatgatcacaacgtggattctttcatctccctctcctctccacagatgggacagtatggagacacggactacttgaagtggctgttccccacctccatgcggtctaacctctatcggatctgctatagcccctggggccaggaattctccatctgcaactactggcatgatccccaccacgatgacttgtacctcaatgccagcagcttcctggccctgatcaatggggaaagagaccatcccaatgccacagtatggcggaagaactttctgcgtgtgggccacctggtgctgattgggggccctgatgatggtgttattactccctggcagtccagcttctttggtttctatgatgcaaatgagaccgtcctggagatggaggagcaactgcctgccaggcccacccaccagtctgagctgcttctgctgaggctggtctgcttgaagcctcccaggagaaagaagccagcctgtagggtccagcgtcaaagcgaatcatggggtccagggctgagctgtgcactctcttaggcggattctccttcctcctgctactgataccaggcgagggggccaagggtggatccctcagagagaggtgacaacagagggggtagggcccggggtgagctcttctcaggagccttctgctgggggtggggcttcacaggaggcaaaacataactgtaagtttagaatgggggtgagaggctgtcatctggagggagagcggggggcctcagtagcctcttgagggaagtgggactcctggctccccagggcctggcctactcaatctctcccacctcatcctctggcatggacgcagtcagggagtctgctccaagcagacactggtggtcccgctccactacaacgagtcctacagccaaccagtgtacaagccctacctgaccttgtgcgctgggaggcgcatctgcagcacttacaggaccatgtaccgcgttatgtggcgggaggtgaggcgggaggttcagcagacccatgcagtgtgctgccagggctggaagaagcggcacccgggggcgctcacctgtgaagccatctgcgccaagccttgcctgaacggaggcgtctgcgttaggcctgaccagtgcgagtgcgcccccggctggggagggaagcactgtcatgtggacgtggatgaatgtaggaccagcatcaccctctgctcgcaccattgttttaatacggcaggcagcttcacctgcggctgcccccatgacctagtgctaggcgtggacgggcgcacctgcatggaggggtccccagagcccccaaccagtgccagcatactcagcgtggccgttcgggaggcggaaaaagatgagcgcgctctgaagcaggagattcacgagctgcgagggcgcctggagcggctggagcagtgggccggtcaggctggggcctgggtcagagcggtgctgcccgtgccgcctgaagagctgcagccagaacaggtggctgagctgtggggccggggtgaccggatcgaatctctcagcgaccaggtgctgctgctggaggagaggctaggtgcctgctcctgtgaggacaacagcctgggcctcggcgtcaatcatcgataagaagcctctacagcacccctgccccctaatttatacagaaaccggacccactaatcctctgggattggccgactgtgagctgcagataaggctatcagccaccaaagagcaatgaacaatggaaacttcagagagctgaagaaagggggaggcctgtgttcttggcctgcccctgagtcttctggctgggggcaggttgcctgggcaagaactgcttcttcaattccttaacaaatgcaaccaccaacacccagatctctctctctctttattttcagtttttttgctgttatccagataattaataaaaaccaaccacgcaaaactgggtcccaccctctccttttgctcccagcctacctccccagttgtgggaacaggtctggagtgagaggcagggagtggctaatgccaccaggaagaaatgaaaactggctcagagagggggaagcctcaacagaaaaagaaataaattaaaagccctcctatcccctccagccagggttcgttcctttccccaactccccagggggcagaagtgagtgcagcacctgatgtctgcttcttccccttgtgtctggtgagatggtgcagcagggctgcagggggctgggtggggtcatgtccactgaagaactgtactatggggacagaaaaccagaaatgtggagactgaactggtatcccagagagtgcacgaccctgggcatctgggcaagggcaggcatgagacctctgaattagaagggtccagcccccactgacaggaggctacactgggagggaaggtgaaggtgctgaggaaagctcccatgatgagcctgggagtgcttcaggtatcagcttccagccagagggcgagaagtcctcctcacaaatggatgagtccattgaatccatggactttggagtgggggggatttgttccaaagaatggatgagtccactggccaatgtggggtagaggggtagagaagaccacataggaagagactccactggggatggaatgttcccctcccttgtgtaggctgagtcactggagatgagggggaggcaactgtcccacagacaagacagtaggaggtgggggtcaagagtggagactgcaccgaggcaagagtccatggatggggccaagagggggcaggagtggcgctgtatccacattcacttcagaagttgaagattccaaagaggagaataagtggggagaggggagacaaggaagagggtttggccctgcttcagggcccactgggtgggtaggtgtggggaggaagatggggacagatgggaggagagctcagagccagggttcacccaccgcccccaggcttcttcagatagtcaccaccaccccggccatcagtggagatttcccggaaaacagtgagcatggagtgccggactctgtcagccagagctgggacgtcatctggtgtcagcccttccgtgggcactgggggcagcacccgcacctgacattgtcctggggcaaggggagcaccatcatggcctgtccacccaggtctttgcccacaggtggggcccagcttccgagtgatactcttcctcaacctttcagttctcttcccccaaccctggacaaccatccctgggcttgccagctgccacttctgaggcccttctcctatacaaagccttctccaatccccagttcagacatctcctcagcacccctccagcccccctcctctgggtttggcatttactgctgaatgagtgttattca

SEQ ID NO: 5579 - protein, 301 aa, Homo sapiens; identical to SEQ ID NO: 5577

SEQ ID NO: 5580 - DNA, 755 bp, Homo sapiens
cacccaccagtctgagctgcttctgctgaggctggtctgcttgaagcctcccaggagaaagaagccagcctgtagggtccagcgtcaaagcgaatcatggggtccagggctgagctgtgcactctcttaggcggattctccttcctcctgctactgataccaggcgagggggccaagggtggatccctcagagagagtcagggagtctgctccaagcagacactggtggtcccgctccactacaacgagtcctacagccaaccagtgtacaagccctacctgaccttgtgcgctgggaggcgcatctgcagcacttacaggaccatgtaccgcgttatgtggcgggaggtgaggcgggaggttcagcagacccatgcagtgtgctgccagggctggaagaagcggcacccgggggcgctcacctgtgaagccatctgcgccaagccttgcctgaacggaggcgtctgcgttaggcctgaccagtgcgagtgcgcccccggctggggagggaagcactgtcatgtggacgtggatgaatgtaggaccagcatcaccctctgctcgcaccattgttttaatacggcaggcagcttcacctgcggctgcccccatgacctagtgctaggcgtggacgggcgcacctgcatggaggggtccccagagcccccaaccagtgccagcatactcagcgtggccgttcgggaggcggaaaaagatgagcgcgctctgaagcaggagattcacgagctgcgagg

SEQ ID NO: 5581 - protein, 218 aa, Homo sapiens
MGSRAELCTLLGGFSFLLLLIPGEGAKGGSLRESQGVCSKQTLVVPLHYNESYSQPVYKPYLTLCAGRRICSTYRTMYRVMWREVRREVQQTHAVCCQGWKKRHPGALTCEAICAKPCLNGGVCVRPDQCECAPGWGGKHCHVDVDECRTSITLCSHHCFNTAGSFTCGCPHDLVLGVDGRTCMEGSPEPPTSASILSVAVREAEKDERALKQEIHEL

SEQ ID NO: 5582 - DNA, 2719 bp, Homo sapiens
gctgcttctgctgaggctggtctgcttgaagcctcccaggagaaagaagccagcctgtagggtccagcgtcaaagcgaatcatggggtccagggctgagctgtgcactctcttaggcggattctccttcctcctgctactgataccaggcgagggggccaagggtggatccctcagagagagtcagggagtctgctccaagcagacactggtggtcccgctccactacaacgagtcctacagccaaccagtgtacaagccctacctgaccttgtgcgctgggaggcgcatctgcagcacttacaggaccatgtaccgcgttatgtggcgggaggtgaggcgggaggttcagcagacccatgcagtgtgctgccagggctggaagaagcggcacccgggggcgctcacctgtgaagccatctgcgccaagccttgcctgaacggaggcgtctgcgttaggcctgaccagtgcgagtgcgcccccggctggggagggaagcactgtcatgtggacgtggatgaatgtaggaccagcatcaccctctgctcgcaccattgttttaatacggcaggcagcttcacctgcggctgcccccatgacctagtgctaggcgtggacgggcgcacctgcatggaggggtccccagagcccccaaccagtgccagcatactcagcgtggccgttcgggaggcggaaaaagatgagcgcgctctgaagcaggagattcacgagctgcgagggcgcctggagcggctggagcagtgggccggtcaggctggggcctgggtcagagcggtgctgcccgtgccgcctgaagagctgcagccagaacaggtggctgagctgtggggccggggtgaccggatcgaatctctcagcgaccaggtgctgctgctggaggagaggctaggtgcctgctcctgtgaggacaacagcctgggcctcggcgtcaatcatcgataagaagcctctacagcacccctgccccctaatttatacagaaaccggacccactaatcctctgggattggccgactgtgagctgcagataaggctatcagccaccaaagagcaatgaacaatggaaacttcagagagctgaagaaagggggaggcctgtgttcttggcctgcccctgagtcttctggctgggggcaggttgcctgggcaagaactgcttcttcaattccttaacaaatgcaaccaccaacacccagatctctctctctctttattttcagtttttttgctgttatccagataattaataaaaaccaaccacgcaaaactgggtcccaccctctccttttgctcccagcctacctccccagttgtgggaacaggtctggagtgagaggcagggagtggctaatgccaccaggaagaaatgaaaactggctcagagagggggaagcctcaacagaaaaagaaataaattaaaagccctcctatcccctccagccagggttcgttcctttccccaactccccagggggcagaagtgagtgcagcacctgatgtctgcttcttccccttgtgtctggtgagatggtgcagcagggctgcagggggctgggtggggtcatgtccactgaagaactgtactatggggacagaaaaccagaaatgtggagactgaactggtatcccagagagtgcacgaccctgggcatctgggcaagggcaggcatgagacctctgaattagaagggtccagcccccactgacaggaggctacactgggagggaaggtgaaggtgctgaggaaagctcccatgatgagcctgggagtgcttcaggtatcagcttccagccagagggcgagaagtcctcctcacaaatggatgagtccattgaatccatggactttggagtgggggggatttgttccaaagaatggatgagtccactggccaatgtggggtagaggggtagagaagaccacataggaagagactccactggggatggaatgttcccctcccttgtgtaggctgagtcactggagatgagggggaggcaactgtcccacagacaagacagtaggaggtgggggtcaagagtggagactgcaccgaggcaagagtccatggatggggccaagagggggcaggagtggcgctgtatccacattcacttcagaagttgaagattccaaagaggagaataagtggggagaggggagacaaggaagagggtttggccctgcttcagggcccactgggtgggtaggtgtggggaggaagatggggacagatgggaggagagctcagagccagggttcacccaccgcccccaggcttcttcagatagtcaccaccaccccggccatcagtggagatttcccggaaaacagtgagcatggagtgccggactctgtcagccagagctgggacgtcatctggtgtcagcccttccgtgggcactgggggcagcacccgcacctgacattgtcctggggcaaggggagcaccatcatggcctgtccacccaggtctttgcccacaggtggggcccagcttccgagtgatactcttcctcaacctttcagttctcttcccccaaccctggacaaccatccctgggcttgccagctgccacttctgaggcccttctcctatacaaagccttctccaatccccagttcagacatctcctcagcacccctccagcccccctcctctgggtttggcatttactgctgaatgagtgttattca

SEQ ID NO: 5583 - protein, 293 aa, Homo sapiens; identical to SEQ ID NO: 724

SEQ ID NO: 5584 - DNA, 1216 bp, Homo sapiens
ctgcttctgctgaggctggtctgcttgaagcctcccaggagaaagaagccagcctgtagggtccagcgtcaaagcgaatcatggggtccagggctgagctgtgcactctcttaggcggattctccttcctcctgctactgataccaggcgagggggccaagggtggatccctcagagagagtcagggagtctgctccaagcagacactggtggtcccgctccactacaacgagtcctacagccaaccagtgtacaagccctacctgaccttgtgcgctgggaggcgcatctgcagcacttacaggaccatgtaccgcgttatgtggcgggaggtgaggcgggaggttcagcagacccatgcagtgtgctgccagggctggaagaagcggcacccgggggcgctcacctgtgaagccatctgcgccaagccttgcctgaacggaggcgtctgcgttaggcctgaccagtgcgagtgcgcccccggctggggagggaagcactgtcatgtggacgtggatgaatgtaggaccagcatcaccctctgctcgcaccattgttttaatacggcaggcagcttcacctgcggctgcccccatgacctagtgctaggcgtggacgggcgcacctgcatggaggggtccccagagcccccaaccagtgccagcatactcagcgtggccgttcgggaggcggaaaaagatgagcgcgctctgaagcaggagattcacgagctgcgagggcgcctggagcggctggagcagtgggccggtcaggctggggcctgggtcagagcggtgctgcccgtgccgcctgaagagctgcagccagaacaggtggctgagctgtggggccggggtgaccggatcgaatctctcagcgaccaggtgctgctgctggaggagaggctaggtgcctgctcctgtgaggacaacagcctgggcctcggcgtcaatcatcgataagaagcctctacagcacccctgccccctaatttatacagaaaccggacccactaatcctctgggattggccgactgtgagctgcagataaggctatcagccaccaaagagcaatgaacaatggaaacttcagagagctgaagaaagggggaggcctgtgttcttggcctgcccctgagtcttctggctgggggcaggttgcctgggcaagaactgcttcttcaattccttaacaaatgcaaccaccaacacccag

SEQ ID NO: 5585 - protein, 293 aa, Homo sapiens; identical to SEQ ID NO: 724

SEQ ID NO: 5586 - DNA, 1283 bp, Homo sapiens
ctgcttctgctgaggctggtctgcttgaagcctcccaggagaaagaagccagcctgtagggtccagcgtcaaagcgaatcatggggtccagggctgagctgtgcactctcttaggcggattctccttcctcctgctactgataccaggcgagggggccaagggtggatccctcagagagagtcagggagtctgctccaagcagacactggtggtcccgctccactacaacgagtcctacagccaaccagtgtacaagccctacctgaccttgtgcgctgggaggcgcatctgcagcacttacaggaccatgtaccgcgttatgtggcgggaggtgaggcgggaggttcagcagacccatgcagtgtgctgccagggctggaagaagcggcacccgggggcgctcacctgtgaagccatctgcgccaagccttgcctgaacggaggcgtctgcgttaggcctgaccagtgcgagtgcgcccccggctggggagggaagcactgtcatgtggacgtggatgaatgtaggaccagcatcaccctctgctcgcaccattgttttaatacggcaggcagcttcacctgcggctgcccccatgacctagtgctaggcgtggacgggcgcacctgcatggaggggtccccagagcccccaaccagtgccagcatactcagcgtggccgttcgggaggcggaaaaagatgagcgcgctctgaagcaggagattcacgagctgcgagggcgcctggagcggctggagcagtgggccggtcaggctggggcctgggtcagagcggtgctgcccgtgccgcctgaagagctgcagccagaacaggtggctgagctgtggggccggggtgaccggatcgaatctctcagcgaccaggtgctgctgctggaggagaggctaggtgcctgctcctgtgaggacaacagcctgggcctcggcgtcaatcatcgataagaagcctctacagcacccctgccccctaatttatacagaaaccggacccactaatcctctgggattggccgactgtgagctgcagataaggctatcagccaccaaagagcaatgaacaatggaaacttcagagagctgaagaaagggggaggcctgtgttcttggcctgcccctgagtcttctggctgggggcaggttgcctgggcaagaactgcttcttcaattccttaacaaatgcaaccaccaacacccagatctctctctctctttattttcagtttttttgctgttatccagataattaataaaaaccaaccacgc

SEQ ID NO: 5587 - protein, 293 aa, Homo sapiens; identical to SEQ ID NO: 724

SEQ ID NO: 5588 - DNA, 2437 bp, Homo sapiens
ttataagagggcatgttaaagacaggagggttggccaggcatggtggctcacacctgtaatcccagcactttgggaggccaaggcaggcggatcacctgaagtcgggagttcgagaccagcctgaccaacatggagaaaccccgtctctactaaaaatacaaaacaaaattagccgggcgtggtggcaggcgcctgtagtcccagctactcgggaggctgaggcaggagaatggcatgaacccgggaggcggagcttgcagcaagccgagatcgcaccactgcactccagccagggtgacagcgagactccgtctcaaaaaacaacaacaaaaaaaaaaccaaaaaaaaaaaaccctagctatataccctcacaccctacaaaacaaaacaaaacaaaattagccaggcgtggtggcgcatgcctgtaatcccagctatttgggaggctgaggcaggagaatcacttgaacctggggggcggaggtcgtgcggtgaggcaagaacatgccattgcattccagcctgggtagtaagagcgaaactccttctcaaaaacaaaaacaaaaaaaaacccaaaaaaagacaggagggtcataaggggagggttgactgtgtgtccctccaggttgtgcagaggggattagaagtaagtaggttagaggggaggtggagggagtgtgctggggtgtgagcttttatgatgctgaaaggatcatgatatgctaaggacaggatagtgttgggttgtacacacaggtgtaggcaatcctggtggctagtatgtaaaagtgaatgtcctgactcccttagagggtacctgcagagtgcccttggagggactagtgctggagaaattaataggagaggggacgggcatccattaaccttttcttgcctgcagcctgtagggtccagcgtcaaagcgaatcatggggtccagggctgagctgtgcactctcttaggcggattctccttcctcctgctactgataccaggcgagggggccaagggtggatccctcagagagaggtgacaacagagggggtagggcccggggtgagctcttctcaggagccttctgctgggggtggggcttcacaggaggcaaaacataactgtaagtttagaatgggggtgagaggctgtcatctggagggagagcggggggcctcagtagcctcttgagggaagtgggactcctggctccccagggcctggcctactcaatctctcccacctcatcctctggcatggacgcagtcagggagtctgctccaagcagacactggtggtcccgctccactacaacgagtcctacagccaaccagtgtacaagccctacctgaccttgtgcgctgggaggcgcatctgcagcacttacaggaccatgtaccgcgttatgtggcgggaggtgaggcgggaggttcagcagacccatgcagtgtgctgccagggctggaagaagcggcacccgggggcgctcacctgtgaagccatctgcgccaagccttgcctgaacggaggcgtctgcgttaggcctgaccagtgcgagtgcgcccccggctggggagggaagcactgtcatgtggacgtggatgaatgtaggaccagcatcaccctctgctcgcaccattgttttaatacggcaggcagcttcacctgcggctgcccccatgacctagtgctaggcgtggacgggcgcacctgcatggaggggtccccagagcccccaaccagtgccagcatactcagcgtggccgttcgggaggcggaaaaagatgagcgcgctctgaagcaggagattcacgagctgcgagggcgcctggagcggctggagcaggtgagccaagcctgctgggtggggcgaggccagacgtcactgtcaataccctgaggcatctcttcctttctagtgggccggtcaggctggggcctgggtcagagcggtgctgcccgtgccgcctgaagagctgcagccagaacaggtggctgagctgtggggccggggtgaccggatcgaatctctcagcgaccaggtgctgctgctggaggagaggctaggtgcctgctcctgtgaggacaacagcctgggcctcggcgtcaatcatcgataagaagcctctacagcacccctgccccctaatttatacagaaaccggacccactaatcctctgggattggccgactgtgagctgcagataaggctatcagccaccaaagagcaatgaacaatggaaacttcagagagctgaagaaagggggaggcctgtgttcttggcctgcccctgagtcttctggctgggggcaggttgcctgggcaagaactgcttcttcaattccttaacaaatgcaaccaccaacacccagatctctctctctctttattttcagtttttttgctgttatccagataattaataaaaaccaaccacgc

SEQ ID NO: 5589 - protein, 168 aa, Homo sapiens [sequence omitted]

SEQ ID NO: 5590 - DNA, 3872 bp, Homo sapiens
ttataagagggcatgttaaagacaggagggttggccaggcatggtggctcacacctgtaatcccagcactttgggaggccaaggcaggcggatcacctgaagtcgggagttcgagaccagcctgaccaacatggagaaaccccgtctctactaaaaatacaaaacaaaattagccgggcgtggtggcaggcgcctgtagtcccagctactcgggaggctgaggcaggagaatggcatgaacccgggaggcggagcttgcagcaagccgagatcgcaccactgcactccagccagggtgacagcgagactccgtctcaaaaaacaacaacaaaaaaaaaaccaaaaaaaaaaaaccctagctatataccctcacaccctacaaaacaaaacaaaacaaaattagccaggcgtggtggcgcatgcctgtaatcccagctatttgggaggctgaggcaggagaatcacttgaacctggggggcggaggtcgtgcggtgaggcaagaacatgccattgcattccagcctgggtagtaagagcgaaactccttctcaaaaacaaaaacaaaaaaaaacccaaaaaaagacaggagggtcataaggggagggttgactgtgtgtccctccaggttgtgcagaggggattagaagtaagtaggttagaggggaggtggagggagtgtgctggggtgtgagcttttatgatgctgaaaggatcatgatatgctaaggacaggatagtgttgggttgtacacacaggtgtaggcaatcctggtggctagtatgtaaaagtgaatgtcctgactcccttagagggtacctgcagagtgcccttggagggactagtgctggagaaattaataggagaggggacgggcatccattaaccttttcttgcctgcagcctgtagggtccagcgtcaaagcgaatcatggggtccagggctgagctgtgcactctcttaggcggattctccttcctcctgctactgataccaggcgagggggccaagggtggatccctcagagagaggtgacaacagagggggtagggcccggggtgagctcttctcaggagccttctgctgggggtggggcttcacaggaggcaaaacataactgtaagtttagaatgggggtgagaggctgtcatctggagggagagcggggggcctcagtagcctcttgagggaagtgggactcctggctccccagggcctggcctactcaatctctcccacctcatcctctggcatggacgcagtcagggagtctgctccaagcagacactggtggtcccgctccactacaacgagtcctacagccaaccagtgtacaagccctacctgaccttgtgcgctgggaggcgcatctgcagcacttacaggaccatgtaccgcgttatgtggcgggaggtgaggcgggaggttcagcagacccatgcagtgtgctgccagggctggaagaagcggcacccgggggcgctcacctgtgaagccatctgcgccaagccttgcctgaacggaggcgtctgcgttaggcctgaccagtgcgagtgcgcccccggctggggagggaagcactgtcatgtggacgtggatgaatgtaggaccagcatcaccctctgctcgcaccattgttttaatacggcaggcagcttcacctgcggctgcccccatgacctagtgctaggcgtggacgggcgcacctgcatggaggggtccccagagcccccaaccagtgccagcatactcagcgtggccgttcgggaggcggaaaaagatgagcgcgctctgaagcaggagattcacgagctgcgagggcgcctggagcggctggagcaggtgagccaagcctgctgggtggggcgaggccagacgtcactgtcaataccctgaggcatctcttcctttctagtgggccggtcaggctggggcctgggtcagagcggtgctgcccgtgccgcctgaagagctgcagccagaacaggtggctgagctgtggggccggggtgaccggatcgaatctctcagcgaccaggtgctgctgctggaggagaggctaggtgcctgctcctgtgaggacaacagcctgggcctcggcgtcaatcatcgataagaagcctctacagcacccctgccccctaatttatacagaaaccggacccactaatcctctgggattggccgactgtgagctgcagataaggctatcagccaccaaagagcaatgaacaatggaaacttcagagagctgaagaaagggggaggcctgtgttcttggcctgcccctgagtcttctggctgggggcaggttgcctgggcaagaactgcttcttcaattccttaacaaatgcaaccaccaacacccagatctctctctctctttattttcagtttttttgctgttatccagataattaataaaaaccaaccacgcaaaactgggtcccaccctctccttttgctcccagcctacctccccagttgtgggaacaggtctggagtgagaggcagggagtggctaatgccaccaggaagaaatgaaaactggctcagagagggggaagcctcaacagaaaaagaaataaattaaaagccctcctatcccctccagccagggttcgttcctttccccaactccccagggggcagaagtgagtgcagcacctgatgtctgcttcttccccttgtgtctggtgagatggtgcagcagggctgcagggggctgggtggggtcatgtccactgaagaactgtactatggggacagaaaaccagaaatgtggagactgaactggtatcccagagagtgcacgaccctgggcatctgggcaagggcaggcatgagacctctgaattagaagggtccagcccccactgacaggaggctacactgggagggaaggtgaaggtgctgaggaaagctcccatgatgagcctgggagtgcttcaggtatcagcttccagccagagggcgagaagtcctcctcacaaatggatgagtccattgaatccatggactttggagtgggggggatttgttccaaagaatggatgagtccactggccaatgtggggtagaggggtagagaagaccacataggaagagactccactggggatggaatgttcccctcccttgtgtaggctgagtcactggagatgagggggaggcaactgtcccacagacaagacagtaggaggtgggggtcaagagtggagactgcaccgaggcaagagtccatggatggggccaagagggggcaggagtggcgctgtatccacattcacttcagaagttgaagattccaaagaggagaataagtggggagaggggagacaaggaagagggtttggccctgcttcagggcccactgggtgggtaggtgtggggaggaagatggggacagatgggaggagagctcagagccagggttcacccaccgcccccaggcttcttcagatagtcaccaccaccccggccatcagtggagatttcccggaaaacagtgagcatggagtgccggactctgtcagccagagctgggacgtcatctggtgtcagcccttccgtgggcactgggggcagcacccgcacctgacattgtcctggggcaaggggagcaccatcatggcctgtccacccaggtctttgcccacaggtggggcccagcttccgagtgatactcttcctcaacctttcagttctcttcccccaaccctggacaaccatccctgggcttgccagctgccacttctgaggcccttctcctatacaaagccttctccaatccccagttcagacatctcctcagcacccctccagcccccctcctctgggtttggcatttactgctgaatgagtgttattca

SEQ ID NO: 5591 - protein, 168 aa, Homo sapiens [sequence omitted]

SEQ ID NO: 5592 - DNA, 533 bp, Homo sapiens
ctcttaggcggattctccttcctcctgctactgataccagtcagggagtctgctccaagcagacactggtggtcccgctccactacaacgagtcctacagccaaccagtgtacaagccctacctgaccttgtgcgctgggaggcgcatctgcagcacttacaggaccatgtaccgcgttatgtggcgggaggtgaggcgggaggttcagcagacccatgcagtgtgctgccagggctggaagaagcggcacccgggggcgctcacctgtgaagccatctgcgccaagccttgcctgaacggaggcgtctgcgttaggcctgaccagtgcgagtgcgcccccggctggggagggaagcactgtcatgtgggtgagtcagcttgtcctccccacctacccaggtgcttgcccccgccccctctctcagccccttccttttttcggtaactagacgtggatgaatgtaggaccagcatcaccctctgctcgcaccattgttttaatacggcaggcagcttcacctgcggctgcccc

SEQ ID NO: 5593 - protein, 92 aa, Homo sapiens
MYRVMWREVRREVQQTHAVCCQGWKKRHPGALTCEAICAKPCLNGGVCVRPDQCECAPGWGGKHCHVGESACPPHLPRCLPPPPLSAPSFFR

SEQ ID NO: 5594 - DNA, 281 bp, Homo sapiens
aaccagtgccagcatactcagcgtggccgttcgggaggcggaaaaagatgagcgcgctctgaagcaggagattcacgagctgcgagggcgcctggagcggtgtgagctgcagataaggctatcagccaccaaagagcaatgaacaatggaaacttcagagagctgaagaaagggggaggcctgtgttcttggcctgcccctgagtcttctggctgggggcaggttgcctgggcaagaactgcttcttcaattccttaacaaatgcaaccaccaacacccag

SEQ ID NO: 5595 - protein, 39 aa, Homo sapiens
MNNGNFRELKKGGGLCSWPAPESSGWGQVAWARTASSIP

SEQ ID NO: 5596 - DNA, 1783 bp, Homo sapiens
aaccagtgccagcatactcagcgtggccgttcgggaggcggaaaaagatgagcgcgctctgaagcaggagattcacgagctgcgagggcgcctggagcggtgtgagctgcagataaggctatcagccaccaaagagcaatgaacaatggaaacttcagagagctgaagaaagggggaggcctgtgttcttggcctgcccctgagtcttctggctgggggcaggttgcctgggcaagaactgcttcttcaattccttaacaaatgcaaccaccaacacccagatctctctctctctttattttcagtttttttgctgttatccagataattaataaaaaccaaccacgcaaaactgggtcccaccctctccttttgctcccagcctacctccccagttgtgggaacaggtctggagtgagaggcagggagtggctaatgccaccaggaagaaatgaaaactggctcagagagggggaagcctcaacagaaaaagaaataaattaaaagccctcctatcccctccagccagggttcgttcctttccccaactccccagggggcagaagtgagtgcagcacctgatgtctgcttcttccccttgtgtctggtgagatggtgcagcagggctgcagggggctgggtggggtcatgtccactgaagaactgtactatggggacagaaaaccagaaatgtggagactgaactggtatcccagagagtgcacgaccctgggcatctgggcaagggcaggcatgagacctctgaattagaagggtccagcccccactgacaggaggctacactgggagggaaggtgaaggtgctgaggaaagctcccatgatgagcctgggagtgcttcaggtatcagcttccagccagagggcgagaagtcctcctcacaaatggatgagtccattgaatccatggactttggagtgggggggatttgttccaaagaatggatgagtccactggccaatgtggggtagaggggtagagaagaccacataggaagagactccactggggatggaatgttcccctcccttgtgtaggctgagtcactggagatgagggggaggcaactgtcccacagacaagacagtaggaggtgggggtcaagagtggagactgcaccgaggcaagagtccatggatggggccaagagggggcaggagtggcgctgtatccacattcacttcagaagttgaagattccaaagaggagaataagtggggagaggggagacaaggaagagggtttggccctgcttcagggcccactgggtgggtaggtgtggggaggaagatggggacagatgggaggagagctcagagccagggttcacccaccgcccccaggcttcttcagatagtcaccaccaccccggccatcagtggagatttcccggaaaacagtgagcatggagtgccggactctgtcagccagagctgggacgtcatctggtgtcagcccttccgtgggcactgggggcagcacccgcacctgacattgtcctggggcaaggggagcaccatcatggcctgtccacccaggtctttgcccacaggtggggcccagcttccgagtgatactcttcctcaacctttcagttctcttcccccaaccctggacaaccatccctgggcttgccagctgccacttctgaggcccttctcctatacaaagccttctccaatccccagttcagacatctcctcagcacccctccagcccccctcctctgggtttggcatttactgctgaatgagtgttattca

SEQ ID NO: 5597 - protein, 203 aa, Homo sapiens [sequence omitted]

SEQ ID NO: 5598 - DNA, 1083 bp, Homo sapiens
aggaaagataaggcctgtgtgcacaaagctgtaatgaataacactcattcagcagtaaatgccaaacccagaggaggggggctggaggggtgctgaggagatgtctgaactggggattggagaaggctttgtataggagaagggcctcagaagtggcagctggcaagcccagggatggttgtccagggttgggggaagagaactgaaaggttgaggaagagtatcactcggaagctgggccccacctgtgggcaaagacctgggtggacaggccatgatggtgctccccttgccccaggacaatgtcaggtgcgggtgctgcccccagtgcccacggaagggctgacaccagatgacgtcccagctctggctgacagagtccggcactccatgctcactgttttccgggaaatctccactgatggccggggtggtggtgactatctgaagaagcctgggggcggtgggtgaaccctggctctgagctctcctcccatctgtccccatcttcctccccacacctacccacccagtgggccctgaagcagggccaaaccctcttccttgtctcccctctccccacttattctcctctttggaatcttcaacttctgaagtgaatgtggatacagcgccactcctgcccccttggggagttggggaaaggaacgaaccctggctggaggggataggagggcttttaatttatttctttttctgttgaggcttccccctctctgagccagttttcatttcttcctggtggcattagccactccctgcctctcactccagacctgttcccacaactggggaggtaggctgggagcaaaaggagagggtgggacccagttttgcgtggttggtttttattaattatctggataacagcaaaaaaactgaaaataaagagagagagagatctgggtgttggtggttgcatttgttaaggaattgaagaagcagttcttgcccaggcaacctgcccccagccagaagactcaggggcaggccaagaacacaggcctccccctttcttcagctctctgaagtttccattgttcattgctctttggtggctga

SEQ ID NO: 5599 - protein, 98 aa, Homo sapiens
MVVQGWGKRTERLRKSITRKLGPTCGQRPGWTGHDGAPLAPGQCQVRVLPPVPTEGLTPDDVPALADRVRHSMLTVFREISTDGRGGGDYLKKPGGGG

SEQ ID NO: 5600 - DNA, 2412 bp, Homo sapiens
acttcctggccggccccggaaaccagcaggcgttggggaggggtggcgggggaatagcggcggcagcagccccagccctcagagagacagcagaaagggagggagggagggtgctggggggacagccccccaccattcctaccgctatgggcccaacctcccactcccacctcccctccatcggccggggctaggacacccccaaatcccgtcgcccccttggcaccgacaccccgacagagacagagacacagccatccgccaccaccgctgccgcagcctggctggggagggggccagccccccaggccccctacccctctgaggtggccagaatggatttgtggccaggggcatggatgctgctgctgctgctcttcctgctgctgctcttcctgctgcccaccctgtggttctgcagccccagtgccaagtacttcttcaagatggccttctacaatggctggatcctcttcctggctgtgctcgccatccctgtgtgtgccgtgcgaggacgcaacgtcgagaacatgaagatcttgcgtctaatgctgctccacatcaaatacctgtacgggatccgagtggaggtgcgaggggctcaccacttccctccctcgcagccctatgttgttgtctccaaccaccagagctctctcgatctgcttgggatgatggaggtactgccaggccgctgtgtgcccattgccaagcgcgagctactgtgggctggctctgccgggctggcctgctggctggcaggagtcatcttcatcgaccggaagcgcacgggggatgccatcagtgtcatgtctgaggtcgcccagaccctgctcacccaggacgtgagggtctgggtgtttcctgagggaacgagaaaccacaatggctccatgctgcccttcaaacgtggcgccttccatcttgcagtgcaggcccaggttcccattgtccccatagtcatgtcctcctaccaagacttctactgcaagaaggagcgtcgcttcacctcgggacaatgtcaggtgcgggtgctgcccccagtgcccacggaagggctgacaccagatgacgtcccagctctggctgacagagtccggcactccatgctcactgttttccgggaaatctccactgatggccggggtggtggtgactatctgaagaagcctgggggcggtgggtgaaccctggctctgagctctcctcccatctgtccccatcttcctccccacacctacccacccagtgggccctgaagcagggccaaaccctcttccttgtctcccctctccccacttattctcctctttggaatcttcaacttctgaagtgaatgtggatacagcgccactcctgccccctcttggccccatccatggactcttgcctcggtgcagtctccactcttgacccccacctcctactgtcttgtctgtgggacagttgcctccccctcatctccagtgactcagcctacacaagggaggggaacattccatccccagtggagtctcttcctatgtggtcttctctacccctctaccccacattggccagtggactcatccattctttggaacaaatcccccccactccaaagtccatggattcaatggactcatccatttgtgaggaggacttctcgccctctggctggaagctgatacctgaagcactcccaggctcatcatgggagctttcctcagcaccttcaccttccctcccagtgtagcctcctgtcagtgggggctggacccttctaattcagaggtctcatgcctgcccttgcccagatgcccagggtcgtgcactctctgggataccagttcagtctccacatttctggttttctgtccccatagtacagttcttcagtggacatgaccccacccagccccctgcagccctgctgcaccatctcaccagacacaaggggaagaagcagacatcaggtgctgcactcacttctgccccctggggagttggggaaaggaacgaaccctggctggaggggataggagggcttttaatttatttctttttctgttgaggcttccccctctctgagccagttttcatttcttcctggtggcattagccactccctgcctctcactccagacctgttcccacaactggggaggtaggctgggagcaaaaggagagggtgggacccagttttgcgtggttggtttttattaattatctggataacagcaaaaaaactgaaaataaagagagagagagatctgggtgttggtggttgcatttgttaaggaattgaagaagcagttcttgcccaggcaacctgcccccagccagaagactcaggggcaggccaagaacacaggcctccccctttcttcagctctctgaagtttccattgttcattgctctttggtggctga

SEQ ID NO: 5601 - protein, 283 aa, Homo sapiens; identical to SEQ ID NO: 726

SEQ ID NO: 5602 - DNA, 2275 bp, Homo sapiens
acttcctggccggccccggaaaccagcaggcgttggggaggggtggcgggggaatagcggcggcagcagccccagccctcagagagacagcagaaagggagggagggagggtgctggggggacagccccccaccattcctaccgctatgggcccaacctcccactcccacctcccctccatcggccggggctaggacacccccaaatcccgtcgcccccttggcaccgacaccccgacagagacagagacacagccatccgccaccaccgctgccgcagcctggctggggagggggccagccccccaggccccctacccctctgaggtggccagaatggatttgtggccaggggcatggatgctgctgctgctgctcttcctgctgctgctcttcctgctgcccaccctgtggttctgcagccccagtgccaagtacttcttcaagatggccttctacaatggctggatcctcttcctggctgtgctcgccatccctgtgtgtgccgtgcgaggacgcaacgtcgagaacatgaagatcttgcgtctaatgctgctccacatcaaatacctgtacgggatccgagtggaggtgcgaggggctcaccacttccctccctcgcagccctatgttgttgtctccaaccaccagagctctctcgatctgcttgggatgatggaggtactgccaggccgctgtgtgcccattgccaagcgcgagctactgtgggctggctctgccgggctggcctgctggctggcaggagtcatcttcatcgaccggaagcgcacgggggatgccatcagtgtcatgtctgaggtcgcccagaccctgctcacccaggacgtgagggtctgggtgtttcctgagggaacgagaaaccacaatggctccatgctgcccttcaaacgtggcgccttccatcttgcagtgcaggcccaggttcccattgtccccatagtcatgtcctcctaccaagacttctactgcaagaaggagcgtcgcttcacctcgggacaatgtcaggtgcgggtgctgcccccagtgcccacggaagggctgacaccagatgacgtcccagctctggctgacagagtccggcactccatgctcactgttttccgggaaatctccactgatggccggggtggtggtgactatctgaagaagcctgggggcggtgggtgaaccctggctctgagctctcctcccatctgtccccatcttcctccccacacctacccacccagtgggccctgaagcagggccaaaccctcttccttgtctcccctctccccacttattctcctctttggaatcttcaacttctgaagtgaatgtggatacagcgccactcctgccccctcttggccccatccatggactcttgcctcggtgcagtctccactcttgacccccacctcctactgtcttgtctgtgggacagttgccccccccactccaaagtccatggattcaatggactcatccatttgtgaggaggacttctcgccctctggctggaagctgatacctgaagcactcccaggctcatcatgggagctttcctcagcaccttcaccttccctcccagtgtagcctcctgtcagtgggggctggacccttctaattcagaggtctcatgcctgcccttgcccagatgcccagggtcgtgcactctctgggataccagttcagtctccacatttctggttttctgtccccatagtacagttcttcagtggacatgaccccacccagccccctgcagccctgctgcaccatctcaccagacacaaggggaagaagcagacatcaggtgctgcactcacttctgccccctggggagttggggaaaggaacgaaccctggctggaggggataggagggcttttaatttatttctttttctgttgaggcttccccctctctgagccagttttcatttcttcctggtggcattagccactccctgcctctcactccagacctgttcccacaactggggaggtaggctgggagcaaaaggagagggtgggacccagttttgcgtggttggtttttattaattatctggataacagcaaaaaaactgaaaataaagagagagagagatctgggtgttggtggttgcatttgttaaggaattgaagaagcagttcttgcccaggcaacctgcccccagccagaagactcaggggcaggccaagaacacaggcctccccctttcttcagctctctgaagtttccattgttcattgctctttggtggctga

SEQ ID NO: 5603 - protein, 283 aa, Homo sapiens; identical to SEQ ID NO: 726

SEQ ID NO: 5604 - DNA, 2608 bp, Homo sapiens
aggaaaagagggaaaacactagggtcgcagggttcaaaatggctccaacctcctttggtgacgtagagagcagaacttgggtctgcccctcccttttagttaagggagcagaactgggattagcccgacgtttggatagtgggaacatcgatctgcggcgctggtgttaacccaactcattcggctggacgactcagccctccccatattaggtgatttacagagcaaaactgaactaaaggcccacccctttcttaatgttgtacacagagtagaacaggattgacttcaactccgttttaaaccttcagagcaggaaagctctgggctcaacccctttgtgagtggtgcaaaagggacaaagcccgccccttttaaggagacccgcggaggctagacccgccctttcctctttataatttgcccatcagaaatagggtcttcttcccaggttggaccccggggagtttgggcttttcctacaatcactgaccctcactgtgactaaaggagcagaattaggtggccagaatggatttgtggccaggggcatggatgctgctgctgctgctcttcctgctgctgctcttcctgctgcccaccctgtggttctgcagccccagtgccaagtacttcttcaagatggccttctacaatggctggatcctcttcctggctgtgctcgccatccctgtgtgtgccgtgcgaggacgcaacgtcgagaacatgaagatcttgcgtctaatgctgctccacatcaaatacctgtacgggatccgagtggaggtgcgaggggctcaccacttccctccctcgcagccctatgttgttgtctccaaccaccagagctctctcgatctgcttgggatgatggaggtactgccaggccgctgtgtgcccattgccaagcgcgagctactgtgggctggctctgccgggctggcctgctggctggcaggagtcatcttcatcgaccggaagcgcacgggggatgccatcagtgtcatgtctgaggtcgcccagaccctgctcacccaggacgtgagggtctgggtgtttcctgagggaacgagaaaccacaatggctccatgctgcccttcaaacgtggcgccttccatcttgcagtgcaggcccaggttcccattgtccccatagtcatgtcctcctaccaagacttctactgcaagaaggagcgtcgcttcacctcgggacaatgtcaggtgcgggtgctgcccccagtgcccacggaagggctgacaccagatgacgtcccagctctggctgacagagtccggcactccatgctcactgttttccgggaaatctccactgatggccggggtggtggtgactatctgaagaagcctgggggcggtgggtgaaccctggctctgagctctcctcccatctgtccccatcttcctccccacacctacccacccagtgggccctgaagcagggccaaaccctcttccttgtctcccctctccccacttattctcctctttggaatcttcaacttctgaagtgaatgtggatacagcgccactcctgccccctcttggccccatccatggactcttgcctcggtgcagtctccactcttgacccccacctcctactgtcttgtctgtgggacagttgcctccccctcatctccagtgactcagcctacacaagggaggggaacattccatccccagtggagtctcttcctatgtggtcttctctacccctctaccccacattggccagtggactcatccattctttggaacaaatcccccccactccaaagtccatggattcaatggactcatccatttgtgaggaggacttctcgccctctggctggaagctgatacctgaagcactcccaggctcatcatgggagctttcctcagcaccttcaccttccctcccagtgtagcctcctgtcagtgggggctggacccttctaattcagaggtctcatgcctgcccttgcccagatgcccagggtcgtgcactctctgggataccagttcagtctccacatttctggttttctgtccccatagtacagttcttcagtggacatgaccccacccagccccctgcagccctgctgcaccatctcaccagacacaaggggaagaagcagacatcaggtgctgcactcacttctgccccctggggagttggggaaaggaacgaaccctggctggaggggataggagggcttttaatttatttctttttctgttgaggcttccccctctctgagccagttttcatttcttcctggtggcattagccactccctgcctctcactccagacctgttcccacaactggggaggtaggctgggagcaaaaggagagggtgggacccagttttgcgtggttggtttttattaattatctggataacagcaaaaaaactgaaaataaagagagagagagatctgggtgttggtggttgcatttgttaaggaattgaagaagcagttcttgcccaggcaacctgcccccagccagaagactcaggggcaggccaagaacacaggcctccccctttcttcagctctctgaagtttccattgttcattgctctttggtggctga

SEQ ID NO: 5605 - protein, 283 aa, Homo sapiens; identical to SEQ ID NO: 726

SEQ ID NO: 5606 - DNA, 2195 bp, Homo sapiens
tctttccttcgcttcctcttttagagaatgtccggattgctattggactttggagcgtatggctccaaatcaactcattggctaaaacttgacggaaaatggtggttaggtggccagaatggatttgtggccaggggcatggatgctgctgctgctgctcttcctgctgctgctcttcctgctgcccaccctgtggttctgcagccccagtgccaagtacttcttcaagatggccttctacaatggctggatcctcttcctggctgtgctcgccatccctgtgtgtgccgtgcgaggacgcaacgtcgagaacatgaagatcttgcgtctaatgctgctccacatcaaatacctgtacgggatccgagtggaggtgcgaggggctcaccacttccctccctcgcagccctatgttgttgtctccaaccaccagagctctctcgatctgcttgggatgatggaggtactgccaggccgctgtgtgcccattgccaagcgcgagctactgtgggctggctctgccgggctggcctgctggctggcaggagtcatcttcatcgaccggaagcgcacgggggatgccatcagtgtcatgtctgaggtcgcccagaccctgctcacccaggacgtgagggtctgggtgtttcctgagggaacgagaaaccacaatggctccatgctgcccttcaaacgtggcgccttccatcttgcagtgcaggcccaggttcccattgtccccatagtcatgtcctcctaccaagacttctactgcaagaaggagcgtcgcttcacctcgggacaatgtcaggtgcgggtgctgcccccagtgcccacggaagggctgacaccagatgacgtcccagctctggctgacagagtccggcactccatgctcactgttttccgggaaatctccactgatggccggggtggtggtgactatctgaagaagcctgggggcggtgggtgaaccctggctctgagctctcctcccatctgtccccatcttcctccccacacctacccacccagtgggccctgaagcagggccaaaccctcttccttgtctcccctctccccacttattctcctctttggaatcttcaacttctgaagtgaatgtggatacagcgccactcctgccccctcttggccccatccatggactcttgcctcggtgcagtctccactcttgacccccacctcctactgtcttgtctgtgggacagttgcctccccctcatctccagtgactcagcctacacaagggaggggaacattccatccccagtggagtctcttcctatgtggtcttctctacccctctaccccacattggccagtggactcatccattctttggaacaaatcccccccactccaaagtccatggattcaatggactcatccatttgtgaggaggacttctcgccctctggctggaagctgatacctgaagcactcccaggctcatcatgggagctttcctcagcaccttcaccttccctcccagtgtagcctcctgtcagtgggggctggacccttctaattcagaggtctcatgcctgcccttgcccagatgcccagggtcgtgcactctctgggataccagttcagtctccacatttctggttttctgtccccatagtacagttcttcagtggacatgaccccacccagccccctgcagccctgctgcaccatctcaccagacacaaggggaagaagcagacatcaggtgctgcactcacttctgccccctggggagttggggaaaggaacgaaccctggctggaggggataggagggcttttaatttatttctttttctgttgaggcttccccctctctgagccagttttcatttcttcctggtggcattagccactccctgcctctcactccagacctgttcccacaactggggaggtaggctgggagcaaaaggagagggtgggacccagttttgcgtggttggtttttattaattatctggataacagcaaaaaaactgaaaataaagagagagagagatctgggtgttggtggttgcatttgttaaggaattgaagaagcagttcttgcccaggcaacctgcccccagccagaagactcaggggcaggccaagaacacaggcctccccctttcttcagctctctgaagtttccattgttcattgctctttggtggctga

SEQ ID NO: 5607 - protein, 283 aa, Homo sapiens; identical to SEQ ID NO: 726

SEQ ID NO: 5608 - DNA, 967 bp, Homo sapiens
gctgacaccagatgacgtcccagctctggctgacagagtccggcactccatgctcactgttttccgggaaatctccactgatggccggggtggtggtgactatctgaagaagcctgggggcggtgggtgaaccctggctctgagctctcctcccatctgtccccatcttcctccccacacctacccacccagtgggccctgaagcagggccaaaccctcttccttgtctcccctctccccacttattctcctctttggaatcttcaacttctgaagtgaatgtggatacagcgccactcctgccccctcttggccccatccatggactcttgcctcggtgcagtctccactcttgacccccacctcctactgtcttgtctgtgggacagttgcctcccctcatcatgggagctttcctcagcaccttcaccttccctcccagtgtagcctcctgtcagtgggggctggacccttctaattcagaggtctcatgcctgcccttgcccagatgcccagggtcgtgcactctctgggataccagttcagtctccacatttctggttttctgtccccatagtacagttcttcagtggacatgaccccacccagccccctgcagccctgctgcaccatctcaccagacacaaggggaagaagcagacatcaggtgctgcactcacttctgccccctggggagttggggaaaggaacgaaccctggctggaggggataggagggcttttaatttatttctttttctgttgaggcttccccctctctgagccagttttcatttcttcctggtggcattagccactccctgcctctcactccagacctgttcccacaactggggaggtaggctgggagcaaaaggagagggtgggacccagttttgcgtggttggtttttattaattatctggataacagcaaaaaaactgaaaataaagagagagagagatctg

SEQ ID NO: 5609 - protein, 55 aa, Homo sapiens
MWIQRHSCPLLAPSMDSCLGAVSTLDPHLLLSCLWDSCLPSSWELSSAPSPSLPV

SEQ ID NO: 5610 - DNA, 2118 bp, Homo sapiens
acttcctggccggccccggaaaccagcaggcgttggggaggggtggcgggggaatagcggcggcagcagccccagccctcagagagacagcagaaagggagggagggagggtgctggggggacagccccccaccattcctaccgctatgggcccaacctcccactcccacctcccctccatcggccggggctaggacacccccaaatcccgtcgcccccttggcaccgacaccccgacagagacagagacacagccatccgccaccaccgctgccgcagcctggctggggagggggccagccccccaggccccctacccctctgaggtggccagaatggatttgtggccaggggcatggatgctgctgctgctgctcttcctgctgctgctcttcctgctgcccaccctgtggttctgcagccccagtgccaagtacttcttcaagatggccttctacaatggctggatcctcttcctggctgtgctcgccatccctgtgtgtgccgtgcgaggacgcaacgtcgagaacatgaagatcttgcgtctaatgctgctccacatcaaatacctgtacgggatccgagtggaggtgcgaggggctcaccacttccctccctcgcagccctatgttgttgtctccaaccaccagagctctctcgatctgcttgggatgatggaggtactgccaggccgctgtgtgcccattgccaagcgcgagctactgtgggctggctctgccgggctggcctgctggctggcaggagtcatcttcatcgaccggaagcgcacgggggatgccatcagtgtcatgtctgaggtcgcccagaccctgctcacccaggacgtgagggtctgggtgtttcctgagggaacgagaaaccacaatggctccatgctgcccttcaaacgtggcgccttccatcttgcagtgcaggcccaggttcccattgtccccatagtcatgtcctcctaccaagacttctactgcaagaaggagcgtcgcttcacctcgggacaatgtcaggtgcgggtgctgcccccagtgcccacggaagggctgacaccagatgacgtcccagctctggctgacagagtccggcactccatgctcactgttttccgggaaatctccactgatggccggggtggtggtgactatctgaagaagcctgggggcggtgggtgaaccctggctctgagctctcctcccatctgtccccatcttcctccccacacctacccacccagtgggccctgaagcagggccaaaccctcttccttgtctcccctctccccacttattctcctctttggaatcttcaacttctgaagtgaatgtggatacagcgccactcctgccccctcttggccccatccatggactcttgcctcggtgcagtctccactcttgacccccacctcctactgtcttgtctgtgggacagttgccccccccactccaaagtccatggattcaatggactcatccatttgtgaggaggacttctcgccctctggctggaagctgatacctgaagcactcccaggctcatcatgggagctttcctcagcaccttcaccttccctcccagtgtagcctcctgtcagtgggggctggacccttctaattcagaggtctcatgcctgcccttgcccagatgcccagggtcgtgcactctctgggataccagttcagtctccacatttctggttttctgtccccatagtacagttcttcagtggacatgaccccacccagccccctgcagccctgctgcaccatctcaccagacacaaggggaagaagcagacatcaggtgctgcactcacttctgccccctggggagttggggaaaggaacgaaccctggctggaggggataggagggcttttaatttatttctttttctgttgaggcttccccctctctgagccagttttcatttcttcctggtggcattagccactccctgcctctcactccagacctgttcccacaactggggaggtaggctgggagcaaaaggagagggtgggacccagttttgcgtggttggtttttattaattatctggataacagcaaaaaaactgaaaataaagagagagagagatctg

SEQ ID NO: 5611 - protein, 283 aa, Homo sapiens; identical to SEQ ID NO: 726

SEQ ID NO: 5612 - DNA, 2255 bp, Homo sapiens
acttcctggccggccccggaaaccagcaggcgttggggaggggtggcgggggaatagcggcggcagcagccccagccctcagagagacagcagaaagggagggagggagggtgctggggggacagccccccaccattcctaccgctatgggcccaacctcccactcccacctcccctccatcggccggggctaggacacccccaaatcccgtcgcccccttggcaccgacaccccgacagagacagagacacagccatccgccaccaccgctgccgcagcctggctggggagggggccagccccccaggccccctacccctctgaggtggccagaatggatttgtggccaggggcatggatgctgctgctgctgctcttcctgctgctgctcttcctgctgcccaccctgtggttctgcagccccagtgccaagtacttcttcaagatggccttctacaatggctggatcctcttcctggctgtgctcgccatccctgtgtgtgccgtgcgaggacgcaacgtcgagaacatgaagatcttgcgtctaatgctgctccacatcaaatacctgtacgggatccgagtggaggtgcgaggggctcaccacttccctccctcgcagccctatgttgttgtctccaaccaccagagctctctcgatctgcttgggatgatggaggtactgccaggccgctgtgtgcccattgccaagcgcgagctactgtgggctggctctgccgggctggcctgctggctggcaggagtcatcttcatcgaccggaagcgcacgggggatgccatcagtgtcatgtctgaggtcgcccagaccctgctcacccaggacgtgagggtctgggtgtttcctgagggaacgagaaaccacaatggctccatgctgcccttcaaacgtggcgccttccatcttgcagtgcaggcccaggttcccattgtccccatagtcatgtcctcctaccaagacttctactgcaagaaggagcgtcgcttcacctcgggacaatgtcaggtgcgggtgctgcccccagtgcccacggaagggctgacaccagatgacgtcccagctctggctgacagagtccggcactccatgctcactgttttccgggaaatctccactgatggccggggtggtggtgactatctgaagaagcctgggggcggtgggtgaaccctggctctgagctctcctcccatctgtccccatcttcctccccacacctacccacccagtgggccctgaagcagggccaaaccctcttccttgtctcccctctccccacttattctcctctttggaatcttcaacttctgaagtgaatgtggatacagcgccactcctgccccctcttggccccatccatggactcttgcctcggtgcagtctccactcttgacccccacctcctactgtcttgtctgtgggacagttgcctccccctcatctccagtgactcagcctacacaagggaggggaacattccatccccagtggagtctcttcctatgtggtcttctctacccctctaccccacattggccagtggactcatccattctttggaacaaatcccccccactccaaagtccatggattcaatggactcatccatttgtgaggaggacttctcgccctctggctggaagctgatacctgaagcactcccaggctcatcatgggagctttcctcagcaccttcaccttccctcccagtgtagcctcctgtcagtgggggctggacccttctaattcagaggtctcatgcctgcccttgcccagatgcccagggtcgtgcactctctgggataccagttcagtctccacatttctggttttctgtccccatagtacagttcttcagtggacatgaccccacccagccccctgcagccctgctgcaccatctcaccagacacaaggggaagaagcagacatcaggtgctgcactcacttctgccccctggggagttggggaaaggaacgaaccctggctggaggggataggagggcttttaatttatttctttttctgttgaggcttccccctctctgagccagttttcatttcttcctggtggcattagccactccctgcctctcactccagacctgttcccacaactggggaggtaggctgggagcaaaaggagagggtgggacccagttttgcgtggttggtttttattaattatctggataacagcaaaaaaactgaaaataaagagagagagagatctg

SEQ ID NO: 5613 - protein, 283 aa, Homo sapiens; identical to SEQ ID NO: 726

SEQ ID NO: 5614 - DNA, 2451 bp, Homo sapiens
aggaaaagagggaaaacactagggtcgcagggttcaaaatggctccaacctcctttggtgacgtagagagcagaacttgggtctgcccctcccttttagttaagggagcagaactgggattagcccgacgtttggatagtgggaacatcgatctgcggcgctggtgttaacccaactcattcggctggacgactcagccctccccatattaggtgatttacagagcaaaactgaactaaaggcccacccctttcttaatgttgtacacagagtagaacaggattgacttcaactccgttttaaaccttcagagcaggaaagctctgggctcaacccctttgtgagtggtgcaaaagggacaaagcccgccccttttaaggagacccgcggaggctagacccgccctttcctctttataatttgcccatcagaaatagggtcttcttcccaggttggaccccggggagtttgggcttttcctacaatcactgaccctcactgtgactaaaggagcagaattaggtggccagaatggatttgtggccaggggcatggatgctgctgctgctgctcttcctgctgctgctcttcctgctgcccaccctgtggttctgcagccccagtgccaagtacttcttcaagatggccttctacaatggctggatcctcttcctggctgtgctcgccatccctgtgtgtgccgtgcgaggacgcaacgtcgagaacatgaagatcttgcgtctaatgctgctccacatcaaatacctgtacgggatccgagtggaggtgcgaggggctcaccacttccctccctcgcagccctatgttgttgtctccaaccaccagagctctctcgatctgcttgggatgatggaggtactgccaggccgctgtgtgcccattgccaagcgcgagctactgtgggctggctctgccgggctggcctgctggctggcaggagtcatcttcatcgaccggaagcgcacgggggatgccatcagtgtcatgtctgaggtcgcccagaccctgctcacccaggacgtgagggtctgggtgtttcctgagggaacgagaaaccacaatggctccatgctgcccttcaaacgtggcgccttccatcttgcagtgcaggcccaggttcccattgtccccatagtcatgtcctcctaccaagacttctactgcaagaaggagcgtcgcttcacctcgggacaatgtcaggtgcgggtgctgcccccagtgcccacggaagggctgacaccagatgacgtcccagctctggctgacagagtccggcactccatgctcactgttttccgggaaatctccactgatggccggggtggtggtgactatctgaagaagcctgggggcggtgggtgaaccctggctctgagctctcctcccatctgtccccatcttcctccccacacctacccacccagtgggccctgaagcagggccaaaccctcttccttgtctcccctctccccacttattctcctctttggaatcttcaacttctgaagtgaatgtggatacagcgccactcctgccccctcttggccccatccatggactcttgcctcggtgcagtctccactcttgacccccacctcctactgtcttgtctgtgggacagttgcctccccctcatctccagtgactcagcctacacaagggaggggaacattccatccccagtggagtctcttcctatgtggtcttctctacccctctaccccacattggccagtggactcatccattctttggaacaaatcccccccactccaaagtccatggattcaatggactcatccatttgtgaggaggacttctcgccctctggctggaagctgatacctgaagcactcccaggctcatcatgggagctttcctcagcaccttcaccttccctcccagtgtagcctcctgtcagtgggggctggacccttctaattcagaggtctcatgcctgcccttgcccagatgcccagggtcgtgcactctctgggataccagttcagtctccacatttctggttttctgtccccatagtacagttcttcagtggacatgaccccacccagccccctgcagccctgctgcaccatctcaccagacacaaggggaagaagcagacatcaggtgctgcactcacttctgccccctggggagttggggaaaggaacgaaccctggctggaggggataggagggcttttaatttatttctttttctgttgaggcttccccctctctgagccagttttcatttcttcctggtggcattagccactccctgcctctcactccagacctgttcccacaactggggaggtaggctgggagcaaaaggagagggtgggacccagttttgcgtggttggtttttattaattatctggataacagcaaaaaaactgaaaataaagagagagagagatctg

SEQ ID NO: 5615 - protein, 283 aa, Homo sapiens; identical to SEQ ID NO: 726

SEQ ID NO: 5616 - DNA, 2038 bp, Homo sapiens
tctttccttcgcttcctcttttagagaatgtccggattgctattggactttggagcgtatggctccaaatcaactcattggctaaaacttgacggaaaatggtggttaggtggccagaatggatttgtggccaggggcatggatgctgctgctgctgctcttcctgctgctgctcttcctgctgcccaccctgtggttctgcagccccagtgccaagtacttcttcaagatggccttctacaatggctggatcctcttcctggctgtgctcgccatccctgtgtgtgccgtgcgaggacgcaacgtcgagaacatgaagatcttgcgtctaatgctgctccacatcaaatacctgtacgggatccgagtggaggtgcgaggggctcaccacttccctccctcgcagccctatgttgttgtctccaaccaccagagctctctcgatctgcttgggatgatggaggtactgccaggccgctgtgtgcccattgccaagcgcgagctactgtgggctggctctgccgggctggcctgctggctggcaggagtcatcttcatcgaccggaagcgcacgggggatgccatcagtgtcatgtctgaggtcgcccagaccctgctcacccaggacgtgagggtctgggtgtttcctgagggaacgagaaaccacaatggctccatgctgcccttcaaacgtggcgccttccatcttgcagtgcaggcccaggttcccattgtccccatagtcatgtcctcctaccaagacttctactgcaagaaggagcgtcgcttcacctcgggacaatgtcaggtgcgggtgctgcccccagtgcccacggaagggctgacaccagatgacgtcccagctctggctgacagagtccggcactccatgctcactgttttccgggaaatctccactgatggccggggtggtggtgactatctgaagaagcctgggggcggtgggtgaaccctggctctgagctctcctcccatctgtccccatcttcctccccacacctacccacccagtgggccctgaagcagggccaaaccctcttccttgtctcccctctccccacttattctcctctttggaatcttcaacttctgaagtgaatgtggatacagcgccactcctgccccctcttggccccatccatggactcttgcctcggtgcagtctccactcttgacccccacctcctactgtcttgtctgtgggacagttgcctccccctcatctccagtgactcagcctacacaagggaggggaacattccatccccagtggagtctcttcctatgtggtcttctctacccctctaccccacattggccagtggactcatccattctttggaacaaatcccccccactccaaagtccatggattcaatggactcatccatttgtgaggaggacttctcgccctctggctggaagctgatacctgaagcactcccaggctcatcatgggagctttcctcagcaccttcaccttccctcccagtgtagcctcctgtcagtgggggctggacccttctaattcagaggtctcatgcctgcccttgcccagatgcccagggtcgtgcactctctgggataccagttcagtctccacatttctggttttctgtccccatagtacagttcttcagtggacatgaccccacccagccccctgcagccctgctgcaccatctcaccagacacaaggggaagaagcagacatcaggtgctgcactcacttctgccccctggggagttggggaaaggaacgaaccctggctggaggggataggagggcttttaatttatttctttttctgttgaggcttccccctctctgagccagttttcatttcttcctggtggcattagccactccctgcctctcactccagacctgttcccacaactggggaggtaggctgggagcaaaaggagagggtgggacccagttttgcgtggttggtttttattaattatctggataacagcaaaaaaactgaaaataaagagagagagagatctg

SEQ ID NO: 5617 - protein, 283 aa, Homo sapiens; identical to SEQ ID NO: 726

SEQ ID NO: 5618 - DNA, 724 bp, Homo sapiens
tgaataacactcattcagcagtaaatgccaaacccagaggaggggggctggaggggtgctgaggagatgtctgaactggggattggagaaggctttgtataggagaagggcctcagaagtggcagctggcaagcccagggatggttgtccagggttgggggaagagaactgaaaggttgaggaagagtatcactcggaagctgggccccacctgtgggcaaagacctgggtggacaggccatgatggtgctccccttgccccaggacaatgtcaggtgcgggtgctgcccccagtgcccacggaagggctgacaccagatgacgtcccagctctggctgacagagtccggcactccatgctcactgttttccgggaaatctccactgatggccggggtggtggtgactatctgaagaagcagacatcaggtgctgcactcacttctgccccctggggagttggggaaaggaacgaaccctggctggaggggataggagggcttttaatttatttctttttctgttgaggcttccccctctctgagccagttttcatttcttcctggtggcattagccactccctgcctctcactccagacctgttcccacaactggggaggtaggctgggagcaaaaggagagggtgggacccagttttgcgtggttggtttttattaattatctggataacagcaaaaaaactgaaaataaagagagagagag

SEQ ID NO: 5619 - protein, 128 aa, Homo sapiens
MVVQGWGKRTERLRKSITRKLGPTCGQRPGWTGHDGAPLAPGQCQVRVLPPVPTEGLTPDDVPALADRVRHSMLTVFREISTDGRGGGDYLKKQTSGAALTSAPWGVGERNEPWLEGIGGLLIYFFFC

SEQ ID NO: 5620 - DNA, 921 bp, Homo sapiens
aggaaagataaggcctgtgtgcacaaagctgtaatgaataacactcattcagcagtaaatgccaaacccagaggaggggggctggaggggtgctgaggagatgtctgaactggggattggagaaggctttgtataggagaagggcctcagaagtggcagctggcaagcccagggatggttgtccagggttgggggaagagaactgaaaggttgaggaagagtatcactcggaagctgggccccacctgtgggcaaagacctgggtggacaggccatgatggtgctccccttgccccaggacaatgtcaggtgcgggtgctgcccccagtgcccacggaagggctgacaccagatgacgtcccagctctggctgacagagtccggcactccatgctcactgttttccgggaaatctccactgatggccggggtggtggtgactatctgaagaagcctgggggcggtgggtgaaccctggctctgagctctcctcccatctgtccccatcttcctccccacacctacccacccagtgggccctgaagcagggccaaaccctcttccttgtctcccctctccccacttattctcctctttggaatcttcaacttctgaagtgaatgtggatacagcgccactcctgcccccttggggagttggggaaaggaacgaaccctggctggaggggataggagggcttttaatttatttctttttctgttgaggcttccccctctctgagccagttttcatttcttcctggtggcattagccactccctgcctctcactccagacctgttcccacaactggggaggtaggctgggagcaaaaggagagggtgggacccagttttgcgtggttggtttttattaattatctggataacagcaaaaaaactgaaaataaagagagagagag

SEQ ID NO: 5621 - protein, 98 aa, Homo sapiens; identical to SEQ ID NO: 5599

SEQ ID NO: 5622 - DNA, 199 bp, Homo sapiens
agcaccatcatggcctgtccacccaggtctttgcccacagggatgtcctcccagcctctccggacacaccctaccccagaactgctcaaagccctcacccgaggtgaagcgacgctccttcttgcagtagaagtcttggatgactcacgtcctgggtgagcagggtctgggcgacctcagacatgacactgatggcatc

SEQ ID NO: 5623 - protein, 49 aa, Homo sapiens
MACPPRSLPTGMSSQPLRTHPTPELLKALTRGEATLLLAVEVLDDSRPG

SEQ ID NO: 5624 - DNA, 531 bp, Homo sapiens
cccggaaaccagcaggcgttggggaggggtggcgggggaatagcggcggcagcagccccagccctcagagagacagcagaaagggagggagggagggtgctggggggacagccccccaccattcctaccgctatgggcccaacctcccactcccacctcccctccatcggccggggctaggacacccccaaatcccgtcgcccccttggcaccgacaccccgacagagacagagacacagccatccgccaccaccgctgccgcagcctggctggggagggggccagccccccaggccccctacccctctgaggtggccagaatggatttgtggccaggggcatggatgctgctgctgctgctcttcctgctgctgctcttcctgctgcccaccctgtggttctgcagccccagtgccaagtacttcttcaagatggccttctacaatggctggatcctcttcctggctgtgctcgccatccctgtgtgtgccgtgcgaggacgcaacgtcgagaacatgaaccctatgttg

SEQ ID NO: 5625 - protein, 69 aa, Homo sapiens
MDLWPGAWMLLLLLFLLLLFLLPTLWFCSPSAKYFFKMAFYNGWILFLAVLAIPVCAVRGRNVENMNPM

SEQ ID NO: 5626 - DNA, 559 bp, Homo sapiens
cccggaaaccagcaggcgttggggaggggtggcgggggaatagcggcggcagcagccccagccctcagagagacagcagaaagggagggagggagggtgctggggggacagccccccaccattcctaccgctatgggcccaacctcccactcccacctcccctccatcggccggggctaggacacccccaaatcccgtcgcccccttggcaccgacaccccgacagagacagagacacagccatccgccaccaccgctgccgcagcctggctggggagggggccagccccccaggccccctacccctctgaggtggccagaatggatttgtggccaggggcatggatgctgctgctgctgctcttcctgctgctgctcttcctgctgcccaccctgtggttctgcagccccagtgccaagtacttcttcaagatggccttctacaatggctggatcctcttcctggctgtgctcgccatccctgtgtgtgccgtgcgaggacgcaacgtcgagaacatgaagtgaggggcaaggggtcttgggcaatgagggaacctaa

SEQ ID NO: 5627 - protein, 71 aa, Homo sapiens
MDAAAAALPAAALPAAHPVVLQPQCQVLLQDGLLQWLDPLPGCARHPCVCRARTQRREHEVRGKGSWAMRE

SEQ ID NO: 5628 - DNA, 1176 bp, Homo sapiens
gaattctttgtgactggcaggcattcagaccaatagtgattaggaaaccttgaagcctgcccaacgatcgtgggcaggaggtggtttctggtttgttggggcgtgtgtatgtgtatttggggggactgaagggtacgtggggcgaaacaaaaccggccatggcagcagcggaggaggaggacgggggccccgaagggccaaatcgcgagcggggcggggcgggcgcgaccttcgaatgtaatatatgtttggagactgctcgggaagctgtggtcagtgtgtgtggccacctgtactgttggccatgtcttcatcagtggctggagacacggccagaacggcaagagtgtccagtatgtaaagctgggatcagcagagagaaggttgtcccgctttatgggcgagggagccagaagccccaggatcccagattaaaaactccaccccgcccccagggccagagaccagctccggagagcagagggggattccagccatttggtgataccgggggcttccacttctcatttggtgttggtgcttttccctttggctttttcaccaccgtcttcaatgcccatgagcctttccgccggggtacaggtgtggatctgggacagggtcacccagcctccagctggcaggattccctcttcctgtttctcgccatcttcttctttttttggctgctcagtatttgagctatgtctgcttcctgcccacctccagccagagaagaatcagtattgagggtccctgctgacccttccgtactcctggacccccttgacccctctatttctgttggctaaggccagccctggacattgtccaggaaggcctggggaggaggagtgaagtctgtgcatagatgggagagccttctgctcagaggctcactcagtaacgttgtttaattctctgccctggggaaggaggatggattgagagaatgtctttctcctctcctaagtctttgctttccctgatttcttgatttgatcttcaaaggtgggcaaagttccctctgactcttcccccactccccatcttactgatttaatttaatttttcactccccagagtctaatatggattctgactcttaagtgcttccgccccctcactacctcctttaatacaaattcaataaaaaaggtgaaatatattgatggg

SEQ ID NO: 5629 - protein, 180 aa, Homo sapiens; identical to SEQ ID NO: 730

SEQ ID NO: 5630 - DNA, 1541 bp, Homo sapiens
gaattctttgtgactggcaggcattcagaccaatagtgattaggaaaccttgaagcctgcccaacgatcgtgggcaggaggtggtttctggtttgttggggcgtgtgtatgtgtatttggggggactgaagggtacgtggggcgaaacaaaaccggccatggcagcagcggaggaggaggacgggggccccgaagggccaaatcgcgagcggggcggggcgggcgcgaccttcgaatgtaatatatgtttggagactgctcgggaagctgtggtcagtgtgtgtggccacctgtactgttggccatgtcttcatcagtggctggagacacggccagaacggcaagagtgtccagtatgtaaagctgggatcagcagagagaaggttgtcccgctttatgggcgagggagccagaagccccaggatcccagattaaaaactccaccccgcccccagggccagagaccagctccggagagcagagggggattccagccatttggtgataccgggggcttccacttctcatttggtgttggtgcttttccctttggctttttcaccaccgtcttcaatgcccatgagcctttccgccggggtacaggtgtggatctgggacagggtcacccagcctccagctggcaggattccctcttcctgtttctcgccatcttcttctttttttggctgctcagtatttgagctatgtctgcttcctgcccacctccagccagagaagaatcagtattgagggtccctgctgacccttccgtactcctggacccccttgacccctctatttctgttggctaaggccagccctggacattgtccaggaaggcctggggaggaggagtgaagtctgtgcatagatgggagagccttctgctcagaggctcactcagtaacgttgtttaattctctgccctggggaaggaggatggattgagagaatgtctttctcctctcctaagtctttgctttccctgatttcttgatttgatcttcaaaggtgggcaaagttccctctgactcttcccccactccccatcttactgatttaatttaatttttcactccccagagtctaatatggattctgactcttaagtgcttccgccccctcactacctcctttaatacaaattcaataaaaaaggtgaaatatattgatgggatctcttcccaagttcgcccccacccccgacagaagcatcttctccccaacttgagtagatgtttggtatagtatggtgaagtatgggggtgagtccctttccttcagggccctcaagggtataggggtgaggttgtgtctcatacacacacacagacacacaagagcaagatgtgtcaggtgtttaatcatcattgtggggggctctggttgtagaagaaagcttggcaaggtggggttatacaggagagagattatacaggagagagttggtctgaggccagaacagttcaagggaaaaagaaaagggagctgatggatgggatctgtctgtgggcccctcaaggccctccagtactactctc

SEQ ID NO: 5631 - protein, 180 aa, Homo sapiens; identical to SEQ ID NO: 730

SEQ ID NO: 5632 - DNA, 851 bp, Homo sapiens
cgtggggcgaaacaaaaccggccatggcagcagcggaggaggaggacgggggccccgaagggccaaatcgcgagcggggcggggcgggcgcgaccttcgaatgtaatatatgtttggagactgctcgggaagctgtggtcagtgtgtgtggccacctgtactgttggccatgtcttcatcagtggctggagacacggccagaacggcaagagttgcttttccctttggctttttcaccaccgtcttcaatgcccatgagcctttccgccggggtacaggtgtggatctgggacagggtcacccagcctccagctggcaggattccctcttcctgtttctcgccatcttcttctttttttggctgctcagtatttgagctatgtctgcttcctgcccacctccagccagagaagaatcagtattgagggtccctgctgacccttccgtactcctggacccccttgacccctctatttctgttggctaaggccagccctggacattgtccaggaaggcctggggaggaggagtgaagtctgtgcatagatgggagagccttctgctcagaggctcactcagtaacgttgtttaattctctgccctggggaaggaggatggattgagagaatgtctttctcctctcctaagtctttgctttccctgatttcttgatttgatcttcaaaggtgggcaaagttccctctgactcttcccccactccccatcttactgatttaatttaatttttcactccccagagtctaatatggattctgactcttaagtgcttccgccccctcactacctcctttaatacaaattcaataaaaaaggtgaaatatattgatggg

SEQ ID NO: 5633 - protein, 133 aa, Homo sapiens
MAAAEEEDGGPEGPNRERGGAGATFECNICLETAREAVVSVCGHLYCWPCLHQWLETRPERQELLFPLAFSPPSSMPMSLSAGVQVWIWDRVTQPPAGRIPSSCFSPSSSFFGCSVFELCLLPAHLQPEKNQY

SEQ ID NO: 5634 - DNA, 986 bp, Homo sapiens
cgtggggcgaaacaaaaccggccatggcagcagcggaggaggaggacgggggccccgaagggccaaatcgcgagcggggcggggcgggcgcgaccttcgaatgtaatatatgtttggagactgctcgggaagctgtggtcagtgtgtgtggccacctgtactgttggccatgtcttcatcagtggctggagacacggccagaacggcaagagtgtccagtatgtaaagctgggatcagcagagagaaggttgtcccgctttatgggcgagggagccagaagccccaggatcccagggattccagccatttggtgataccgggggcttccacttctcatttggtgttggtgcttttccctttggctttttcaccaccgtcttcaatgcccatgagcctttccgccggggtacaggtgtggatctgggacagggtcacccagcctccagctggcaggattccctcttcctgtttctcgccatcttcttctttttttggctgctcagtatttgagctatgtctgcttcctgcccacctccagccagagaagaatcagtattgagggtccctgctgacccttccgtactcctggacccccttgacccctctatttctgttggctaaggccagccctggacattgtccaggaaggcctggggaggaggagtgaagtctgtgcatagatgggagagccttctgctcagaggctcactcagtaacgttgtttaattctctgccctggggaaggaggatggattgagagaatgtctttctcctctcctaagtctttgctttccctgatttcttgatttgatcttcaaaggtgggcaaagttccctctgactcttcccccactccccatcttactgatttaatttaatttttcactccccagagtctaatatggattctgactcttaagtgcttccgccccctcactacctcctttaatacaaattcaataaaaaaggtgaaatatattgatggg

SEQ ID NO: 5635 - protein, 178 aa, Homo sapiens
MAAAEEEDGGPEGPNRERGGAGATFECNICLETAREAVVSVCGHLYCWPCLHQWLETRPERQECPVCKAGISREKVVPLYGRGSQKPQDPRDSSHLVIPGASTSHLVLVLFPLAFSPPSSMPMSLSAGVQVWIWDRVTQPPAGRIPSSCFSPSSSFFGCSVFELCLLPAHLQPEKNQY

SEQ ID NO: 5636 - DNA, 1216 bp, Homo sapiens
cgtggggcgaaacaaaaccggccatggcagcagcggaggaggaggacgggggccccgaagggccaaatcgcgagcggggcggggcgggcgcgaccttcgaatgtaatatatgtttggagactgctcgggaagctgtggtcagtgtgtgtggccacctgtactgttggccatgtcttcatcagtggctggagacacggccagaacggcaagagttgcttttccctttggctttttcaccaccgtcttcaatgcccatgagcctttccgccggggtacaggtgtggatctgggacagggtcacccagcctccagctggcaggattccctcttcctgtttctcgccatcttcttctttttttggctgctcagtatttgagctatgtctgcttcctgcccacctccagccagagaagaatcagtattgagggtccctgctgacccttccgtactcctggacccccttgacccctctatttctgttggctaaggccagccctggacattgtccaggaaggcctggggaggaggagtgaagtctgtgcatagatgggagagccttctgctcagaggctcactcagtaacgttgtttaattctctgccctggggaaggaggatggattgagagaatgtctttctcctctcctaagtctttgctttccctgatttcttgatttgatcttcaaaggtgggcaaagttccctctgactcttcccccactccccatcttactgatttaatttaatttttcactccccagagtctaatatggattctgactcttaagtgcttccgccccctcactacctcctttaatacaaattcaataaaaaaggtgaaatatattgatgggatctcttcccaagttcgcccccacccccgacagaagcatcttctccccaacttgagtagatgtttggtatagtatggtgaagtatgggggtgagtccctttccttcagggccctcaagggtataggggtgaggttgtgtctcatacacacacacagacacacaagagcaagatgtgtcaggtgtttaatcatcattgtggggggctctggttgtagaagaaagcttggcaaggtggggttatacaggagagagattatacaggagagagttggtctgaggccagaacagttcaagggaaaaagaaaagggagctgatggatgggatctgtctgtgggcccctcaaggccctccagtactactctc

SEQ ID NO: 5637 - protein, 133 aa, Homo sapiens; identical to SEQ ID NO: 5633

SEQ ID NO: 5638 - DNA, 1351 bp, Homo sapiens
cgtggggcgaaacaaaaccggccatggcagcagcggaggaggaggacgggggccccgaagggccaaatcgcgagcggggcggggcgggcgcgaccttcgaatgtaatatatgtttggagactgctcgggaagctgtggtcagtgtgtgtggccacctgtactgttggccatgtcttcatcagtggctggagacacggccagaacggcaagagtgtccagtatgtaaagctgggatcagcagagagaaggttgtcccgctttatgggcgagggagccagaagccccaggatcccagggattccagccatttggtgataccgggggcttccacttctcatttggtgttggtgcttttccctttggctttttcaccaccgtcttcaatgcccatgagcctttccgccggggtacaggtgtggatctgggacagggtcacccagcctccagctggcaggattccctcttcctgtttctcgccatcttcttctttttttggctgctcagtatttgagctatgtctgcttcctgcccacctccagccagagaagaatcagtattgagggtccctgctgacccttccgtactcctggacccccttgacccctctatttctgttggctaaggccagccctggacattgtccaggaaggcctggggaggaggagtgaagtctgtgcatagatgggagagccttctgctcagaggctcactcagtaacgttgtttaattctctgccctggggaaggaggatggattgagagaatgtctttctcctctcctaagtctttgctttccctgatttcttgatttgatcttcaaaggtgggcaaagttccctctgactcttcccccactccccatcttactgatttaatttaatttttcactccccagagtctaatatggattctgactcttaagtgcttccgccccctcactacctcctttaatacaaattcaataaaaaaggtgaaatatattgatgggatctcttcccaagttcgcccccacccccgacagaagcatcttctccccaacttgagtagatgtttggtatagtatggtgaagtatgggggtgagtccctttccttcagggccctcaagggtataggggtgaggttgtgtctcatacacacacacagacacacaagagcaagatgtgtcaggtgtttaatcatcattgtggggggctctggttgtagaagaaagcttggcaaggtggggttatacaggagagagattatacaggagagagttggtctgaggccagaacagttcaagggaaaaagaaaagggagctgatggatgggatctgtctgtgggcccctcaaggccctccagtactactctc

SEQ ID NO: 5639 - protein, 178 aa, Homo sapiens; identical to SEQ ID NO: 5635

SEQ ID NO: 5640 - DNA, 499 bp, Homo sapiens
agccatttggtgataccgggggcttccacttctcatttggtgttggtgcttttccctttggctttttcaccaccgtcttcaatgcccatgagcctttccgccggggtacaggtgtggatctgggacagggtcacccagcctccagctggcaggattccctcttcctgtttctcgccatcttcttctttttttggctgctcagtatttgagctatgtctgcttcctgcccacctccagccagagaagaatcagtattgagggggaaggaggatggattgagagaatgtctttctcctctcctaagtctttgctttccctgatttcttgatttgatcttcaaaggtgggcaaagttccctctgactcttcccccactccccatcttactgatttaatttaatttttcactccccagagtctaatatggattctgactcttaagtgcttccgccccctcactacctcctttaatacaaattcaataaaaaaggtgaaatata

SEQ ID NO: 5641 - protein, 58 aa, Homo sapiens
MPMSLSAGVQVWIWDRVTQPPAGRIPSSCFSPSSSFFGCSVFELCLLPAHLQPEKNQY

SEQ ID NO: 5642 - DNA, 872 bp, Homo sapiens
agccatttggtgataccgggggcttccacttctcatttggtgttggtgcttttccctttggctttttcaccaccgtcttcaatgcccatgagcctttccgccggggtacaggtgtggatctgggacagggtcacccagcctccagctggcaggattccctcttcctgtttctcgccatcttcttctttttttggctgctcagtatttgagctatgtctgcttcctgcccacctccagccagagaagaatcagtattgagggggaaggaggatggattgagagaatgtctttctcctctcctaagtctttgctttccctgatttcttgatttgatcttcaaaggtgggcaaagttccctctgactcttcccccactccccatcttactgatttaatttaatttttcactccccagagtctaatatggattctgactcttaagtgcttccgccccctcactacctcctttaatacaaattcaataaaaaaggtgaaatatattgatgggatctcttcccaagttcgcccccacccccgacagaagcatcttctccccaacttgagtagatgtttggtatagtatggtgaagtatgggggtgagtccctttccttcagggccctcaagggtataggggtgaggttgtgtctcatacacacacacagacacacaagagcaagatgtgtcaggtgtttaatcatcattgtggggggctctggttgtagaagaaagcttggcaaggtggggttatacaggagagagattatacaggagagagttggtctgaggccagaacagttcaagggaaaaagaaaagggagctgatggatgggatctgtctgtgggcccctcaaggccctccagtactactctc

SEQ ID NO: 5643 - protein, 58 aa, Homo sapiens; identical to SEQ ID NO: 5641

SEQ ID NO: 5644 - DNA, 887 bp, Homo sapiens
gatccccgtcccaccttctcctgtagcttcagcccaggccttccccgacaccgggccttgcgcacagcccccatccagccccgtgtctggggtgagcataggtggggagggccccaagctcacgtgagcacgttctggaagtctgacccttagggaaagagggagtcaagcccatggccactgggatcactcacaagtgtaactctccacctcaaaacccttccaactcccagagcctgtgcctctggaggaggtccaattggtggtggagccagaaggtggagcagtagctcctggtggaaccgtaaccctgacctgtgaagtccctgcccagccctctcctcaaatccactggatgaaggatggtgtgcccttgccccttccccccagccctgtgctgatcctccctgagatagggcctcaggaccagggaacctacagctgtgtggccacccattccagccacgggccccaggaaagccgtgctgtcagcatcagcatcatcgaaccaggcgaggaggggccaactgcaggtgaggggtttgataaagtcagggaagcagaagatagcccccaacacatgtgactggggggatggtcaacaagaaaggaatggaaggccccagaaaaccaggaggaagaggaggagcgtgcagaactgaatcagtcggaggaacctgaggcaggcgagagtagtactggagggccttgaggggcccacagacagatcccatccatcagctcccttttctttttcccttgaactgttctggcctcagaccaactctctcctgtataatctctctcctgtataaccccaccttgccaagctttcttctacaaccagagccccccacaatgatgattaaacacctgacacatcttgc

SEQ ID NO: 5645 - protein, 76 aa, Homo sapiens
MKDGVPLPLPPSPVLILPEIGPQDQGTYSCVATHSSHGPQESRAVSISIIEPGEEGPTAGEGFDKVREAEDSPQHM

SEQ ID NO: 5646 - DNA, 2155 bp, Homo sapiens
ctgtcccatcctcagccctgaactagctaccatctgatcccctcagacattctcaggattttacaagactgtcagagtggggaacccctcccattaaagatccgggcaggactggggacaggttggaagtgtgatgggtgggggggtgggaggcatgggccgggggcagttctctcctcacttgtaaacttgtgtagtttcacagaaaaaaaacaaaatgcagttttaaataaagaaatttcttttttccctgggtttagttgagaatttttttcaaaaaacatgagaaaccccagaaaaaaaatgattttctttcacgaagttccaaacaggtttctctcctgttccccagccttgccttcatgatgcaggcccaattgcacccttgcagacaacagtctggcctgaaccctattgatgcaactttgcgcaatcaagatggggctccagtgggtcaccaggcagccctgatggactgatggaataaataggatcgggggctctgagggaatgagaccctagagggtacactccccatcccccagggaagtgactgtacccagaggctggtagtacccaggggtggggtgataattatttctctagtacctgaaggactcttgtcccaaaggcatgaattcctagcattccctgtgacaagacgactgaaagatgggggctggagagagggtgcaggccccacctagggcggaggccacagcagggagaggggcagacagagccaggaccctggaaggaagcaggatggctgccggaacagcagttggagcctgggtgctggtcctcagtctgtggggggcagtagtaggtgctcaaaacatcacagcccggattggcgagccactggtgctgaagtgtaagggggcccccaagaaaccaccccagcggctggaatggaaactgaacacaggccggacagaagcttggaaggtcctgtctccccagggaggaggcccctgggacagtgtggctcgtgtccttcccaacggctccctcttccttccggctgtcgggatccaggatgaggggattttccggtgccaggcaatgaacaggaatggaaaggagaccaagtccaactaccgagtccgtgtctaccagattcctgggaagccagaaattgtagattctgcctctgaactcacggctggtgttcccaataaggtggggacatgtgtgtcagagggaagctaccctgcagggactcttagctggcacttggatgggaagcccctggtgcctaatgagaagggagtatctgtgaaggaacagaccaggagacaccctgagacagggctcttcacactgcagtcggagctaatggtgaccccagcccggggaggagatccccgtcccaccttctcctgtagcttcagcccaggccttccccgacaccgggccttgcgcacagcccccatccagccccgtgtctgggagcctgtgcctctggaggaggtccaattggtggtggagccagaaggtggagcagtagctcctggtggaaccgtaaccctgacctgtgaagtccctgcccagccctctcctcaaatccactggatgaaggatggtgtgcccttgccccttccccccagccctgtgctgatcctccctgagatagggcctcaggaccagggaacctacagctgtgtggccacccattccagccacgggccccaggaaagccgtgctgtcagcatcagcatcatcgaaccaggcgaggaggggccaactgcaggctctgtgggaggatcagggctgggaactctagccctggccctggggatcctgggaggcctggggacagccgccctgctcattggggtcatcttgtggcaaaggcggcaacgccgaggagaggagaggaaggccccagaaaaccaggaggaagaggaggagcgtgcagaactgaatcagtcggaggaacctgaggcaggcgagagtagtactggagggccttgaggggcccacagacagatcccatccatcagctcccttttctttttcccttgaactgttctggcctcagaccaactctctcctgtataatctctctcctgtataaccccaccttgccaagctttcttctacaaccagagccccccacaatgatgattaaacacctgacacatcttgc

SEQ ID NO: 5647 - protein, 435 aa, Homo sapiens
MGAGERVQAPPRAEATAGRGADRARTLEGSRMAAGTAVGAWVLVLSLWGAVVGAQNITARIGEPLVLKCKGAPKKPPQRLEWKLNTGRTEAWKVLSPQGGGPWDSVARVLPNGSLFLPAVGIQDEGIFRCQAMNRNGKETKSNYRVRVYQIPGKPEIVDSASELTAGVPNKVGTCVSEGSYPAGTLSWHLDGKPLVPNEKGVSVKEQTRRHPETGLFTLQSELMVTPARGGDPRPTFSCSFSPGLPRHRALRTAPIQPRVWEPVPLEEVQLVVEPEGGAVAPGGTVTLTCEVPAQPSPQIHWMKDGVPLPLPPSPVLILPEIGPQDQGTYSCVATHSSHGPQESRAVSISIIEPGEEGPTAGSVGGSGLGTLALALGILGGLGTAALLIGVILWQRRQRRGEERKAPENQEEEEERAELNQSEEPEAGESSTGGP

SEQ ID NO: 5648 - DNA, 556 bp, Homo sapiens
cagaaccaggcgaggaggggccaactgcaggtgaggggtttgataaagtcagggaagcagaagatagcccccaacacatgtgactggggggatggtcaacaagaaaggaatggtgagtggtggtggctgtgctctcaattttccctgtctccgtacaggctctgtgggaggatcagggctgggaactctagccctggccctggggatcctgggaggcctggggacagccgccctgctcattggggtcatcttgtggcaaaggcggcaacgccgaggagaggagaggaaggccccagaaaaccaggaggaagaggaggagcgtgcagaactgaatcagtcggaggaacctgaggcaggcgagagtagtactggagggccttgaggggcccacagacagatcccatccatcagctcccttttctttttcccttgaactgttctggcctcagaccaactctctcctgtataatctctctcctgtataaccccaccttgccaagctttcttctacaaccagagccccccacaatgatgattaaacacctgacacatcttg

SEQ ID NO: 5649 - protein, 96 aa, Homo sapiens [sequence omitted]

SEQ ID NO: 5650 - DNA, 931 bp, Homo sapiens
gatccccgtcccaccttctcctgtagcttcagcccaggccttccccgacaccgggccttgcgcacagcccccatccagccccgtgtctggggtgagcataggtggggagggccccaagctcacgtgagcacgttctggaagtctgacccttagggaaagagggagtcaagcccatggccactgggatcactcacaagtgtaactctccacctcaaaacccttccaactcccagagcctgtgcctctggaggaggtccaattggtggtggagccagaaggtggagcagtagctcctggtggaaccgtaaccctgacctgtgaagtccctgcccagccctctcctcaaatccactggatgaaggatggtgtgcccttgccccttccccccagccctgtgctgatcctccctgagatagggcctcaggaccagggaacctacagctgtgtggccacccattccagccacgggccccaggaaagccgtgctgtcagcatcagcatcatcgaaccaggcgaggaggggccaactgcaggctctgtgggaggatcagggctgggaactctagccctggccctggggatcctgggaggcctggggacagccgccctgctcattggggtcatcttgtggcaaaggcggcaacgccgaggagaggagaggaaggccccagaaaaccaggaggaagaggaggagcgtgcagaactgaatcagtcggaggaacctgaggcaggcgagagtagtactggagggccttgaggggcccacagacagatcccatccatcagctcccttttctttttcccttgaactgttctggcctcagaccaactctctcctgtataatctctctcctgtataaccccaccttgccaagctttcttctacaaccagagccccccacaatgatgattaaacacctgacacatcttg

SEQ ID NO: 5651 - protein, 133 aa, Homo sapiens
MKDGVPLPLPPSPVLILPEIGPQDQGTYSCVATHSSHGPQESRAVSISIIEPGEEGPTAGSVGGSGLGTLALALGILGGLGTAALLIGVILWQRRQRRGEERKAPENQEEEEERAELNQSEEPEAGESSTGGP

SEQ ID NO: 5652 - DNA, 1541 bp, Homo sapiens
aatggcagctggcaagaggctgtgaccccctcttcagtgacatccccaacggagggaccagggagtgttcactctgatacctccaactgatcttgcccctcagggtcacaggggtgggggctctcacaaggcgacttgaagaggacgcaggcttccagaggacaaaccccaatacaggagaagcacaagacagagaagggccaatggggtcatcccctccctaacgagactctctgtgctgggggtgctaattacatggcaggaagaatggggcctctaaggggagtgtggggtctgtctctcccttttttccatctttttcctctctcgctttctttcttacacagaaacatacacataccgagaaacctatttctcagacccctttttctcctctgtctttctctctccctctcccacacctcacacacacatactcccacttgcaactattctgtttctctcctgggctcccccactttcccttccccaccccacttgtatgctctggaattcagtaattttgaggaaattgaagatgccatcttcccctgtgagtgacatgtctttaattttttaaaaaactactatttgaaaattggagggggaagaatgggaagggagttattgccaaatatgttaaatatgggttggggtgcttgtatatgtatcttcctcaatttccccataaatgaggtatctttttgtcacaccaaaatcaaggggtagggagagggaggaggttgcaaaaagccagatgtgggggaaaagtaacatcaacactgtcccatcctcagccctgaactagctaccatctgatcccctcagacattctcaggattttacaagactgtcagagtggggaacccctcccattaaagatccgggcaggactggggacaggttggaagtgtgatgggtgggggggtgggaggcatgggccgggggcagttctctcctcacttgtaaacttgtgtagtttcacagaaaaaaaacaaaatgcagttttaaataaagaaatttcttttttccctgggtttagttgagaatttttttcaaaaaacatgagaaaccccagaaaaaaaatgattttctttcacgaagttccaaacaggtttctctcctgttccccagccttgccttcatgatgcaggcccaattgcacccttgcagacaacagtctggcctgaaccctattgatgcaactttgcgcaatcaagatggggctccagtgggtcaccaggcagccctgatggactgatggaataaataggatcgggggctctgagggaatgagaccctagagggtacactccccatcccccagggaagtgactgtacccagaggctggtagtacccaggggtggggtgataattatttctctagtacctgaaggactcttgtcccaaaggcatgaattcctagcattccctgtgacaagacgactgaaagatgggggctggagagagggtgcaggccccacctagggcggaggccacagcagggagaggggcagacagagccaggaccctggaagga

SEQ ID NO: 5653 - protein, 101 aa, Homo sapiens
MAGRMGPLRGVWGLSLPFFHLFPLSLSFLHRNIHIPRNLFLRPLFLLCLSLSLSHTSHTHTPTCNYSVSLLGSPTFPSPPHLYALEFSNFEEIEDAIFPCE

SEQ ID NO: 5654 - DNA, 840 bp, Homo sapiens
ggattcgctataagaaaaacatcggaaagttccaagaggaggttgcaaaaagccagatgtgggggaaaagtaacatcaacactgtcccatcctcagccctgaactagctaccatctgatcccctcagacattctcaggattttacaagactgtcagagtggggaacccctcccattaaagatccgggcaggactggggacaggttggaagtgtgatgggtgggggggtgggaggcatgggccgggggcagttctctcctcacttgtaaacttgtgtagtttcacagaaaaaaaacaaaatgcagttttaaataaagaaatttcttttttccctgggtttagttgagaatttttttcaaaaaacatgagaaaccccagaaaaaaaatgattttctttcacgaagttccaaacaggtttctctcctgttccccagccttgccttcatgatgcaggcccaattgcacccttgcagacaacagtctggcctgaaccctattgatgcaactttgcgcaatcaagatggggctccagtgggtcaccaggcagccctgatggactgatggaataaataggatcgggggctctgagggaatgagaccctagagggtacactccccatcccccagggaagtgactgtacccagaggctggtagtacccaggggtggggtgataattatttctctagtacctgaaggactcttgtcccaaaggcatgaattcctagcattccctgtgacaagacgactgaaagatgggggctggagagagggtgcaggccccacctagggcggaggccacagcagggagaggggcagacagagccaggaccctggaagga

SEQ ID NO: 5655 - protein, 38 aa, Homo sapiens
MMQAQLHPCRQQSGLNPIDATLRNQDGAPVGHQAALMD

SEQ ID NO: 5656 - DNA, 2947 bp, Homo sapiens
tgggcaacagcatagtgagaccaggaagcaaaaaaaaaaaaaatgctgtcactcacatcttattcagtgaaggacttcagaggcaaatgtttctacctgaccctcctttctgccccacaggtctccaactggtttggcaacaagaggattcgctataagaaaaacatcggaaagttccaagaggaggcaaacatctatgctgtcaagaccgccgtgtcagtcacccaggggggccacagccgcaccagctccccgacacccccttcctctgcaggctctggcggctctttcaatctctcaggatctggagacatgtttctggggatgcctgggctcaacggagattcctattctgcttcccaggtcagatgcccatctcctctcgaatagggctttccccaactccatttcctctactttaggatacaagacctctttcctctgaggcttctcttcactgtcataccttcctctgctgcctgcaggtggaatcactccgacactcgatggggccagggggctatggggataacctcgggggaggccagatgtacagcccacgggaaatgagggtgagtggatcctgaagctcctctctgtccagttctcacaggacagaggggcattttccctagtaatgttgtgcccacacagggttcccagggctttctctgttttctgtactctgtctctcctttcaggcaaatggcagctggcaagaggctgtgaccccctcttcagtgacatccccaacggagggaccagggagtgttcactctgatacctccaactgatcttgcccctcagggtcacaggggtgggggctctcacaaggcgacttgaagaggacgcaggcttccagaggacaaaccccaatacaggagaagcacaagacagagaagggccaatggggtcatcccctccctaacgagactctctgtgctgggggtgctaattacatggcaggaagaatggggcctctaaggggagtgtggggtctgtctctcccttttttccatctttttcctctctcgctttctttcttacacagaaacatacacataccgagaaacctatttctcagacccctttttctcctctgtctttctctctccctctcccacacctcacacacacatactcccacttgcaactattctgtttctctcctgggctcccccactttcccttccccaccccacttgtatgctctggaatctgtggagacgccagccctgcccaatcagagatgccaaaaatggggacatgacttctggacagaggacatgggccacgcccccatgcatccccacccccgcccctccggacggcttacttacctcatacgcagctcatcttaaaccaatagaatcgctcggtggacgagagtgtctgactcagatatctacctcggagggagtttctgctactttagggaattattgactgggctttggggttgaacttttttttttttaaagaaagaaaaagaaaccctgggatccatctgttttttttgttgttgttgttgtttttgttgttgttggtggtggtggtggtggtggttcttaatttttaatttagtttggggaagtagcttgtttttttttttataaatatgttgatttcttgtctttttttttttttatttcttactttcccatattaggggtgatagccaaaggggttctggtaagagaaagggggacaaacagaactggtaaagaggcccccctggctccaggcctgtccatcaggaagtaaattttacagggcaccaagctttgccccctaaaatcccttaggtgttctttgttcatgcaggcaggtttctgccgcatttgatgtggaggcagtgaagggcttgccctgctggcctctcatcccccttcttcccacaacccttgggcagggctggactcagtaattttgaggaaattgaagatgccatcttcccctgtgagtgacatgtctttaattttttaaaaaactactatttgaaaattggagggggaagaatgggaagggagttattgccaaatatgttaaatatgggttggggtgcttgtatatgtatcttcctcaatttccccataaatgaggtatctttttgtcacaccaaaatcaaggggtagggagagggaggaggttgcaaaaagccagatgtgggggaaaagtaacatcaacactgtcccatcctcagccctgaactagctaccatctgatcccctcagacattctcaggattttacaagactgtcagagtggggaacccctcccattaaagatccgggcaggactggggacaggttggaagtgtgatgggtgggggggtgggaggcatgggccgggggcagttctctcctcacttgtaaacttgtgtagtttcacagaaaaaaaacaaaatgcagttttaaataaagaaatttcttttttccctgggtttagttgagaatttttttcaaaaaacatgagaaaccccagaaaaaaaatgattttctttcacgaagttccaaacaggtttctctcctgttccccagccttgccttcatgatgcaggcccaattgcacccttgcagacaacagtctggcctgaaccctattgatgcaactttgcgcaatcaagatggggctccagtgggtcaccaggcagccctgatggactgatggaataaataggatcgggggctctgagggaatgagaccctagagggtacactccccatcccccagggaagtgactgtacccagaggctggtagtacccaggggtggggtgataattatttctctagtacctgaaggactcttgtcccaaaggcatgaattcctagcattccctgtgacaagacgactgaaagatgggggctggagagagggtgcaggccccacctagggcggaggccacagcagggagaggggcagacagagccaggaccctggaagga

SEQ ID NO: 5657 - protein, 115 aa, Homo sapiens
MLSLTSYSVKDFRGKCFYLTLLSAPQVSNWFGNKRIRYKKNIGKFQEEANIYAVKTAVSVTQGGHSRTSSPTPPSSAGSGGSFNLSGSGDMFLGMPGLNGDSYSASQVRCPSPLE

SEQ ID NO: 5658 - DNA, 3710 bp, Homo sapiens
acacacacccccgcttgggcctcctctctctctccggctccattttctccgccgccgggggccggggtctcctgtggggggcccagccggtatcccaggtctcccttcagtgccggggtgaacccccgggggagccgggagccgggggcagacgggcgggggttggggcggagggagcagcggccccagcgagtttggggggagaagtaaccaggcggggggaggggcggagcagggagggggcctcagggcccccccccagctatggacgaacggctactggggccgccccctccaggcgggggccgggggggcctgggattggtgagtggggagcctgggggccctggcgagcctcccggtggcggagaccccggtgggggtagcgggggggtcccgggaggccgagggaagcaagacatcggggacattctgcagcagataatgaccatcaccgaccagagcctggacgaggcccaggccaagaaacacgccctaaactgccaccgaatgaagcctgctctctttagcgtcctgtgtgaaatcaaggagaaaactggcctcagcattcggagctcccaggaggaggagccggtggacccacagctgatgcgcttggacaacatgcttctggcagagggtgtggctgggcccgagaaagggggcggctcagcagcagcagctgcagccgctgcagcctctggtggtggtgtgtcccctgacaactccatcgaacactcggactatcgcagcaaacttgcccagatccgtcacatataccactcggagctggagaagtatgagcaggcatgtaatgagttcacgacccatgtcatgaacctgctgagggagcagagccgcaccaggcccgtggcccccaaagagatggaacgcatggtgagcatcatccatcgaaagttcagcgccatccagatgcagctgaagcagagcacctgcgaggctgtgatgatcctgcgctcccgtttcctggatgccagacgaaagcgccgtaacttcagcaaacaggccactgaggtcctaaatgagtatttctactcccacctgagtaacccatatcctagtgaggaggccaaggaggagcttgccaagaagtgtggcatcaccgtgtctcaggtctccaactggtttggcaacaagaggattcgctataagaaaaacatcggaaagttccaagaggaggcaaacatctatgctgtcaagaccgccgtgtcagtcacccaggggggccacagccgcaccagctccccgacacccccttcctctgcaggctctggcggctctttcaatctctcaggatctggagacatgtttctggggatgcctgggctcaacggagattcctattctgcttcccaggtggaatcactccgacactcgatggggccagggggctatggggataacctcgggggaggccagatgtacagcccacgggaaatgagggcaaatggcagctggcaagaggctgtgaccccctcttcagtgacatccccaacggagggaccagggagtgttcactctgatacctccaactgatcttgcccctcagggtcacaggggtgggggctctcacaaggcgacttgaagaggacgcaggcttccagaggacaaaccccaatacaggagaagcacaagacagagaagggccaatggggtcatcccctccctaacgagactctctgtgctgggggtgctaattacatggcaggaagaatggggcctctaaggggagtgtggggtctgtctctcccttttttccatctttttcctctctcgctttctttcttacacagaaacatacacataccgagaaacctatttctcagacccctttttctcctctgtctttctctctccctctcccacacctcacacacacatactcccacttgcaactattctgtttctctcctgggctcccccactttcccttccccaccccacttgtatgctctggaatctgtggagacgccagccctgcccaatcagagatgccaaaaatggggacatgacttctggacagaggacatgggccacgcccccatgcatccccacccccgcccctccggacggcttacttacctcatacgcagctcatcttaaaccaatagaatcgctcggtggacgagagtgtctgactcagatatctacctcggagggagtttctgctactttagggaattattgactgggctttggggttgaacttttttttttttaaagaaagaaaaagaaaccctgggatccatctgttttttttgttgttgttgttgtttttgttgttgttggtggtggtggtggtggtggttcttaatttttaatttagtttggggaagtagcttgtttttttttttataaatatgttgatttcttgtctttttttttttttatttcttactttcccatattaggggtgatagccaaaggggttctggtaagagaaagggggacaaacagaactggtaaagaggcccccctggctccaggcctgtccatcaggaagtaaattttacagggcaccaagctttgccccctaaaatcccttaggtgttctttgttcatgcaggcaggtttctgccgcatttgatgtggaggcagtgaagggcttgccctgctggcctctcatcccccttcttcccacaacccttgggcagggctggactcagtaattttgaggaaattgaagatgccatcttcccctgtgagtgacatgtctttaattttttaaaaaactactatttgaaaattggagggggaagaatgggaagggagttattgccaaatatgttaaatatgggttggggtgcttgtatatgtatcttcctcaatttccccataaatgaggtatctttttgtcacaccaaaatcaaggggtagggagagggaggaggttgcaaaaagccagatgtgggggaaaagtaacatcaacactgtcccatcctcagccctgaactagctaccatctgatcccctcagacattctcaggattttacaagactgtcagagtggggaacccctcccattaaagatccgggcaggactggggacaggttggaagtgtgatgggtgggggggtgggaggcatgggccgggggcagttctctcctcacttgtaaacttgtgtagtttcacagaaaaaaaacaaaatgcagttttaaataaagaaatttcttttttccctgggtttagttgagaatttttttcaaaaaacatgagaaaccccagaaaaaaaatgattttctttcacgaagttccaaacaggtttctctcctgttccccagccttgccttcatgatgcaggcccaattgcacccttgcagacaacagtctggcctgaaccctattgatgcaactttgcgcaatcaagatggggctccagtgggtcaccaggcagccctgatggactgatggaataaataggatcgggggctctgagggaatgagaccctagagggtacactccccatcccccagggaagtgactgtacccagaggctggtagtacccaggggtggggtgataattatttctctagtacctgaaggactcttgtcccaaaggcatgaattcctagcattccctgtgacaagacgactgaaagatgggggctggagagagggtgcaggccccacctagggcggaggccacagcagggagaggggcagacagagccaggaccctggaagga

SEQ ID NO: 5659 - protein, 430 aa, Homo sapiens; identical to SEQ ID NO: 736

SEQ ID NO: 5660 - DNA, 1468 bp, Homo sapiens
taattacatggcaggaagaatggggcctctaaggggagtgtggggtctgtctctcccttttttccatctttttcctctctcgctttctttcttacacagaaacatacacataccgagaaacctatttctcagacccctttttctcctctgtctttctctctccctctcccacacctcacacacacatactcccacttgcaactattctgtttctctcctgggctcccccactttcccttccccaccccacttgtatgctctggaatctgtggagacgccagccctgcccaatcagagatgccaaaaatggggacatgacttctggacagaggacatgggccacgcccccatgcatccccacccccgcccctccggacggcttacttacctcatacgcagctcatcttaaaccaatagaatcgctcggtggacgagagtgtctgactcagatatctacctcggagggagtttctgctactttagggaattattgactgggctttggggttgaacttttttttttttaaagaaagaaaaagaaaccctgggatccatctgttttttttgttgttgttgttgtttttgttgttgttggtggtggtggtggtggtggttcttaatttttaatttagtttggggaagtagcttgtttttttttttataaatatgttgatttcttgtctttttttttttttatttcttactttcccatattaggggtgatagccaaaggggttctggtaagagaaagggggacaaacagaactggtaaagaggcccccctggctccaggcctgtccatcaggaagtaaattttacagggcaccaagctttgccccctaaaatcccttaggtgttctttgttcatgcaggcaggtttctgccgcatttgatgtggaggcagcatgggccgggggcagttctctcctcacttgtaaacttgtgtagtttcacagaaaaaaaacaaaatgcagttttaaataaagaaatttcttttttccctgggtttagttgagaatttttttcaaaaaacatgagaaaccccagaaaaaaaatgattttctttcacgaagttccaaacaggtttctctcctgttccccagccttgccttcatgatgcaggcccaattgcacccttgcagacaacagtctggcctgaaccctattgatgcaactttgcgcaatcaagatggggctccagtgggtcaccaggcagccctgatggactgatggaataaataggatcgggggctctgagggaatgagaccctagagggtacactccccatcccccagggaagtgactgtacccagaggctggtagtacccaggggtggggtgataattatttctctagtacctgaaggactcttgtcccaaaggcatgaattcctagcattccctgtgacaagacgactgaaagatgggggctggagagagggtgcaggccccacctagggcggaggcc

SEQ ID NO: 5661 - protein, 40 aa, Homo sapiens
MWRQHGPGAVLSSLVNLCSFTEKKQNAVLNKEISFFPGFS

SEQ ID NO: 5662 - DNA, 1037 bp, Homo sapiens
aatggcagctggcaagaggctgtgaccccctcttcagtgacatccccaacggagggaccagggagtgttcactctgatacctccaactgatcttgcccctcagggtcacaggggtgggggctctcacaaggcgacttgaagaggacgcaggcttccagaggacaaaccccaatacaggagaagcacaagacagagaagggccaatggggtcatcccctccctaacgagactctctgtgctgggggtgctaattacatggcaggaagaatggggcctctaaggggagtgtggggtctgtctctcccttttttccatctttttcctctctcgctttctttcttacacagaaacatacacataccgagaaacctatttctcagacccctttttctcctctgtctttctctctccctctcccacacctcacacacacatactcccacttgcaactattctgtttctctcctgggctcccccactttcccttccccaccccacttgtatgctctggaattcagtaattttgaggaaattgaagatgccatcttcccctgtgagtgacatgtctttaattttttaaaaaactactatttgaaaattggagggggaagaatgggaagggagttattgccaaatatgttaaatatgggttggggtgcttgtatatgtatcttcctcaatttccccataaatgaggtatctttttgtcacaccaaaatcaaggggtagggagagggaggaggttgcaaaaagccagatgtgggggaaaagtaacatcaacactgtcccatcctcagccctgaactagctaccatctgatcccctcagacattctcaggattttacaagactgtcagagtggggaacccctcccattaaagatccgggcaggactggggacaggttggaagtgtgatgggtgggggggtgggaggcatgggccgggggcagttctctcctcacttgtaaacttgtgtagtttcacagaaaaaaaacaaaatgcagttttaaataaagaaatttcttttttccctggg

SEQ ID NO: 5663 - protein, 101 aa, Homo sapiens; identical to SEQ ID NO: 5653

SEQ ID NO: 5664 - DNA, 2443 bp, Homo sapiens
tgggcaacagcatagtgagaccaggaagcaaaaaaaaaaaaaatgctgtcactcacatcttattcagtgaaggacttcagaggcaaatgtttctacctgaccctcctttctgccccacaggtctccaactggtttggcaacaagaggattcgctataagaaaaacatcggaaagttccaagaggaggcaaacatctatgctgtcaagaccgccgtgtcagtcacccaggggggccacagccgcaccagctccccgacacccccttcctctgcaggctctggcggctctttcaatctctcaggatctggagacatgtttctggggatgcctgggctcaacggagattcctattctgcttcccaggtcagatgcccatctcctctcgaatagggctttccccaactccatttcctctactttaggatacaagacctctttcctctgaggcttctcttcactgtcataccttcctctgctgcctgcaggtggaatcactccgacactcgatggggccagggggctatggggataacctcgggggaggccagatgtacagcccacgggaaatgagggtgagtggatcctgaagctcctctctgtccagttctcacaggacagaggggcattttccctagtaatgttgtgcccacacagggttcccagggctttctctgttttctgtactctgtctctcctttcaggcaaatggcagctggcaagaggctgtgaccccctcttcagtgacatccccaacggagggaccagggagtgttcactctgatacctccaactgatcttgcccctcagggtcacaggggtgggggctctcacaaggcgacttgaagaggacgcaggcttccagaggacaaaccccaatacaggagaagcacaagacagagaagggccaatggggtcatcccctccctaacgagactctctgtgctgggggtgctaattacatggcaggaagaatggggcctctaaggggagtgtggggtctgtctctcccttttttccatctttttcctctctcgctttctttcttacacagaaacatacacataccgagaaacctatttctcagacccctttttctcctctgtctttctctctccctctcccacacctcacacacacatactcccacttgcaactattctgtttctctcctgggctcccccactttcccttccccaccccacttgtatgctctggaatctgtggagacgccagccctgcccaatcagagatgccaaaaatggggacatgacttctggacagaggacatgggccacgcccccatgcatccccacccccgcccctccggacggcttacttacctcatacgcagctcatcttaaaccaatagaatcgctcggtggacgagagtgtctgactcagatatctacctcggagggagtttctgctactttagggaattattgactgggctttggggttgaacttttttttttttaaagaaagaaaaagaaaccctgggatccatctgttttttttgttgttgttgttgtttttgttgttgttggtggtggtggtggtggtggttcttaatttttaatttagtttggggaagtagcttgtttttttttttataaatatgttgatttcttgtctttttttttttttatttcttactttcccatattaggggtgatagccaaaggggttctggtaagagaaagggggacaaacagaactggtaaagaggcccccctggctccaggcctgtccatcaggaagtaaattttacagggcaccaagctttgccccctaaaatcccttaggtgttctttgttcatgcaggcaggtttctgccgcatttgatgtggaggcagtgaagggcttgccctgctggcctctcatcccccttcttcccacaacccttgggcagggctggactcagtaattttgaggaaattgaagatgccatcttcccctgtgagtgacatgtctttaattttttaaaaaactactatttgaaaattggagggggaagaatgggaagggagttattgccaaatatgttaaatatgggttggggtgcttgtatatgtatcttcctcaatttccccataaatgaggtatctttttgtcacaccaaaatcaaggggtagggagagggaggaggttgcaaaaagccagatgtgggggaaaagtaacatcaacactgtcccatcctcagccctgaactagctaccatctgatcccctcagacattctcaggattttacaagactgtcagagtggggaacccctcccattaaagatccgggcaggactggggacaggttggaagtgtgatgggtgggggggtgggaggcatgggccgggggcagttctctcctcacttgtaaacttgtgtagtttcacagaaaaaaaacaaaatgcagttttaaataaagaaatttcttttttccctggg

SEQ ID NO: 5665 - protein, 115 aa, Homo sapiens; identical to SEQ ID NO: 5657

SEQ ID NO: 5666 - DNA, 3213 bp, Homo sapiens
ctctctcacacacacccccgcttgggcctcctctctctctccggctccattttctccgccgccgggggccggggtctcctgtggggggcccagccggtatcccaggtctcccttcagtgccggggtgaacccccgggggagccgggagccgggggcagacgggcgggggttggggcggagggagcagcggccccagcgagtttggggggagaagtaaccaggcggggggaggggcggagcagggagggggcctcagggcccccccccagctatggacgaacggctactggggccgccccctccaggcgggggccgggggggcctgggattggtgagtggggagcctgggggccctggcgagcctcccggtggcggagaccccggtgggggtagcgggggggtcccgggaggccgagggaagcaagacatcggggacattctgcagcagataatgaccatcaccgaccagagcctggacgaggcccaggccaagaaacacgccctaaactgccaccgaatgaagcctgctctctttagcgtcctgtgtgaaatcaaggagaaaactggcctcagcattcggagctcccaggaggaggagccggtggacccacagctgatgcgcttggacaacatgcttctggcagagggtgtggctgggcccgagaaagggggcggctcagcagcagcagctgcagccgctgcagcctctggtggtggtgtgtcccctgacaactccatcgaacactcggactatcgcagcaaacttgcccagatccgtcacatataccactcggagctggagaagtatgagcaggcatgtaatgagttcacgacccatgtcatgaacctgctgagggagcagagccgcaccaggcccgtggcccccaaagagatggaacgcatggtgagcatcatccatcgaaagttcagcgccatccagatgcagctgaagcagagcacctgcgaggctgtgatgatcctgcgctcccgtttcctggatgccagacgaaagcgccgtaacttcagcaaacaggccactgaggtcctaaatgagtatttctactcccacctgagtaacccatatcctagtgaggaggccaaggaggagcttgccaagaagtgtggcatcaccgtgtctcaggtctccaactggtttggcaacaagaggattcgctataagaaaaacatcggaaagttccaagaggaggcaaacatctatgctgtcaagaccgccgtgtcagtcacccaggggggccacagccgcaccagctccccgacacccccttcctctgcaggctctggcggctctttcaatctctcaggatctggagacatgtttctggggatgcctgggctcaacggagattcctattctgcttcccaggtggaatcactccgacactcgatggggccagggggctatggggataacctcgggggaggccagatgtacagcccacgggaaatgagggcaaatggcagctggcaagaggctgtgaccccctcttcagtgacatccccaacggagggaccagggagtgttcactctgatacctccaactgatcttgcccctcagggtcacaggggtgggggctctcacaaggcgacttgaagaggacgcaggcttccagaggacaaaccccaatacaggagaagcacaagacagagaagggccaatggggtcatcccctccctaacgagactctctgtgctgggggtgctaattacatggcaggaagaatggggcctctaaggggagtgtggggtctgtctctcccttttttccatctttttcctctctcgctttctttcttacacagaaacatacacataccgagaaacctatttctcagacccctttttctcctctgtctttctctctccctctcccacacctcacacacacatactcccacttgcaactattctgtttctctcctgggctcccccactttcccttccccaccccacttgtatgctctggaatctgtggagacgccagccctgcccaatcagagatgccaaaaatggggacatgacttctggacagaggacatgggccacgcccccatgcatccccacccccgcccctccggacggcttacttacctcatacgcagctcatcttaaaccaatagaatcgctcggtggacgagagtgtctgactcagatatctacctcggagggagtttctgctactttagggaattattgactgggctttggggttgaacttttttttttttaaagaaagaaaaagaaaccctgggatccatctgttttttttgttgttgttgttgtttttgttgttgttggtggtggtggtggtggtggttcttaatttttaatttagtttggggaagtagcttgtttttttttttataaatatgttgatttcttgtctttttttttttttatttcttactttcccatattaggggtgatagccaaaggggttctggtaagagaaagggggacaaacagaactggtaaagaggcccccctggctccaggcctgtccatcaggaagtaaattttacagggcaccaagctttgccccctaaaatcccttaggtgttctttgttcatgcaggcaggtttctgccgcatttgatgtggaggcagtgaagggcttgccctgctggcctctcatcccccttcttcccacaacccttgggcagggctggactcagtaattttgaggaaattgaagatgccatcttcccctgtgagtgacatgtctttaattttttaaaaaactactatttgaaaattggagggggaagaatgggaagggagttattgccaaatatgttaaatatgggttggggtgcttgtatatgtatcttcctcaatttccccataaatgaggtatctttttgtcacaccaaaatcaaggggtagggagagggaggaggttgcaaaaagccagatgtgggggaaaagtaacatcaacactgtcccatcctcagccctgaactagctaccatctgatcccctcagacattctcaggattttacaagactgtcagagtggggaacccctcccattaaagatccgggcaggactggggacaggttggaagtgtgatgggtgggggggtgggaggcatgggccgggggcagttctctcctcacttgtaaacttgtgtagtttcacagaaaaaaaacaaaatgcagttttaaataaagaaatttcttttttccctggg

SEQ ID NO: 5667 - protein, 430 aa, Homo sapiens; identical to SEQ ID NO: 736

SEQ ID NO: 5668 - DNA, 2397 bp, Homo sapiens
acacacacccccgcttgggcctcctctctctctccggctccattttctccgccgccgggggccggggtctcctgtggggggcccagccggtatcccaggtctcccttcagtgccggggtgaacccccgggggagccgggagccgggggcagacgggcgggggttggggcggagggagcagcggccccagcgagtttggggggagaagtaaccaggcggggggaggggcggagcagggagggggcctcagggcccccccccagctatggacgaacggctactggggccgccccctccaggcgggggccgggggggcctgggattggtgagtggggagcctgggggccctggcgagcctcccggtggcggagaccccggtgggggtagcgggggggtcccgggaggccgagggaagcaagacatcggggacattctgcagcagataatgaccatcaccgaccagagcctggacgaggcccaggccaagaaacacgccctaaactgccaccgaatgaagcctgctctctttagcgtcctgtgtgaaatcaaggagaaaactggcctcagcattcggagctcccaggaggaggagccggtggacccacagctgatgcgcttggacaacatgcttctggcagagggtgtggctgggcccgagaaagggggcggctcagcagcagcagctgcagccgctgcagcctctggtggtggtgtgtcccctgacaactccatcgaacactcggactatcgcagcaaacttgcccagatccgtcacatataccactcggagctggagaagtatgagcaggcatgtaatgagttcacgacccatgtcatgaacctgctgagggagcagagccgcaccaggcccgtggcccccaaagagatggaacgcatggtgagcatcatccatcgaaagttcagcgccatccagatgcagctgaagcagagcacctgcgaggctgtgatgatcctgcgctcccgtttcctggatgccagacgaaagcgccgtaacttcagcaaacaggccactgaggtcctaaatgagtatttctactcccacctgagtaacccatatcctagtgaggaggccaaggaggagcttgccaagaagtgtggcatcaccgtgtctcaggtctccaactggtttggcaacaagaggattcgctataagaaaaacatcggaaagttccaagaggaggcaaacatctatgctgtcaagaccgccgtgtcagtcacccaggggggccacagccgcaccagctccccgacacccccttcctctgcaggctctggcggctctttcaatctctcaggatctggagacatgtttctggggatgcctgggctcaacggagattcctattctgcttcccaggtggaatcactccgacactcgatggggccagggggctatggggataacctcgggggaggccagatgtacagcccacgggaaatgagggcaaatggcagctggcaagaggctgtgaccccctcttcagtgacatccccaacggagggaccagggagtgttcactctgatacctccaactgatcttgcccctcagggtcacaggggtgggggctctcacaaggcgacttgaagaggacgcaggcttccagaggacaaaccccaatacaggagaagcacaagacagagaagggccaatggggtcatcccctccctaacgagactctctgtgctgggggtgctaattacatggcaggaagaatggggcctctaaggggagtgtggggtctgtctctcccttttttccatctttttcctctctcgctttctttcttacacagaaacatacacataccgagaaacctatttctcagacccctttttctcctctgtctttctctctccctctcccacacctcacacacacatactcccacttgcaactattctgtttctctcctgggctcccccactttcccttccccaccccacttgtatgctctggaatctgtggagacgccagccctgcccaatcagagatgccaaaaatggggacatgacttctggacagaggacatgggccacgcccccatgcatccccacccccgcccctccggacggcttacttacctcatacgcagctcatcttaaaccaatagaatcgctcggtggacgagagtgtctgactcagatatctacctcggagggagtttctgctactttagggaattattgactgggctttggggttgaacttttttttttttaaagaaagaaaaagaaaccctgggatccatctgttttttttgttgttgttgttgtttttgttgttgttggtggtggtggtggtggtggttcttaatttttaatttagtttggggaagtagcttgtttttttttttataaatatgttgatttcttgtc

SEQ ID NO: 5669 - protein, 430 aa, Homo sapiens; identical to SEQ ID NO: 736

SEQ ID NO: 5670 - DNA, 1512 bp, Homo sapiens
tgggcaacagcatagtgagaccaggaagcaaaaaaaaaaaaaatgctgtcactcacatcttattcagtgaaggacttcagaggcaaatgtttctacctgaccctcctttctgccccacaggtctccaactggtttggcaacaagaggattcgctataagaaaaacatcggaaagttccaagaggaggcaaacatctatgctgtcaagaccgccgtgtcagtcacccaggggggccacagccgcaccagctccccgacacccccttcctctgcaggctctggcggctctttcaatctctcaggatctggagacatgtttctggggatgcctgggctcaacggagattcctattctgcttcccaggtcagatgcccatctcctctcgaatagggctttccccaactccatttcctctactttaggatacaagacctctttcctctgaggcttctcttcactgtcataccttcctctgctgcctgcaggtggaatcactccgacactcgatggggccagggggctatggggataacctcgggggaggccagatgtacagcccacgggaaatgagggtgagtggatcctgaagctcctctctgtccagttctcacaggacagaggggcattttccctagtaatgttgtgcccacacagggttcccagggctttctctgttttctgtactctgtctctcctttcaggcaaatggcagctggcaagaggctgtgaccccctcttcagtgacatccccaacggagggaccagggagtgttcactctgatacctccaactgatcttgcccctcagggtcacaggggtgggggctctcacaaggcgacttgaagaggacgcaggcttccagaggacaaaccccaatacaggagaagcacaagacagagaagggccaatggggtcatcccctccctaacgagactctctgtgctgggggtgctaattacatggcaggaagaatggggcctctaaggggagtgtggggtctgtctctcccttttttccatctttttcctctctcgctttctttcttacacagaaacatacacataccgagaaacctatttctcagacccctttttctcctctgtctttctctctccctctcccacacctcacacacacatactcccacttgcaactattctgtttctctcctgggctcccccactttcccttccccaccccacttgtatgctctggaatctgtggagacgccagccctgcccaatcagagatgccaaaaatggggacatgacttctggacagaggacatgggccacgcccccatgcatccccacccccgcccctccggacggcttacttacctcatacgcagctcatcttaaaccaatagaatcgctcggtggacgagagtgtctgactcagatatctacctcggagggagtttctgctactttagggaattattgactgggctttggggttgaacttttttttttttaaagaaagaaaaagaaaccctgggatccatctgtt

SEQ ID NO: 5671 - protein, 115 aa, Homo sapiens; identical to SEQ ID NO: 5657

SEQ ID NO: 5672 - DNA, 2275 bp, Homo sapiens
acacacacccccgcttgggcctcctctctctctccggctccattttctccgccgccgggggccggggtctcctgtggggggcccagccggtatcccaggtctcccttcagtgccggggtgaacccccgggggagccgggagccgggggcagacgggcgggggttggggcggagggagcagcggccccagcgagtttggggggagaagtaaccaggcggggggaggggcggagcagggagggggcctcagggcccccccccagctatggacgaacggctactggggccgccccctccaggcgggggccgggggggcctgggattggtgagtggggagcctgggggccctggcgagcctcccggtggcggagaccccggtgggggtagcgggggggtcccgggaggccgagggaagcaagacatcggggacattctgcagcagataatgaccatcaccgaccagagcctggacgaggcccaggccaagaaacacgccctaaactgccaccgaatgaagcctgctctctttagcgtcctgtgtgaaatcaaggagaaaactggcctcagcattcggagctcccaggaggaggagccggtggacccacagctgatgcgcttggacaacatgcttctggcagagggtgtggctgggcccgagaaagggggcggctcagcagcagcagctgcagccgctgcagcctctggtggtggtgtgtcccctgacaactccatcgaacactcggactatcgcagcaaacttgcccagatccgtcacatataccactcggagctggagaagtatgagcaggcatgtaatgagttcacgacccatgtcatgaacctgctgagggagcagagccgcaccaggcccgtggcccccaaagagatggaacgcatggtgagcatcatccatcgaaagttcagcgccatccagatgcagctgaagcagagcacctgcgaggctgtgatgatcctgcgctcccgtttcctggatgccagacgaaagcgccgtaacttcagcaaacaggccactgaggtcctaaatgagtatttctactcccacctgagtaacccatatcctagtgaggaggccaaggaggagcttgccaagaagtgtggcatcaccgtgtctcaggtctccaactggtttggcaacaagaggattcgctataagaaaaacatcggaaagttccaagaggaggcaaacatctatgctgtcaagaccgccgtgtcagtcacccaggggggccacagccgcaccagctccccgacacccccttcctctgcaggctctggcggctctttcaatctctcaggatctggagacatgtttctggggatgcctgggctcaacggagattcctattctgcttcccaggtggaatcactccgacactcgatggggccagggggctatggggataacctcgggggaggccagatgtacagcccacgggaaatgagggcaaatggcagctggcaagaggctgtgaccccctcttcagtgacatccccaacggagggaccagggagtgttcactctgatacctccaactgatcttgcccctcagggtcacaggggtgggggctctcacaaggcgacttgaagaggacgcaggcttccagaggacaaaccccaatacaggagaagcacaagacagagaagggccaatggggtcatcccctccctaacgagactctctgtgctgggggtgctaattacatggcaggaagaatggggcctctaaggggagtgtggggtctgtctctcccttttttccatctttttcctctctcgctttctttcttacacagaaacatacacataccgagaaacctatttctcagacccctttttctcctctgtctttctctctccctctcccacacctcacacacacatactcccacttgcaactattctgtttctctcctgggctcccccactttcccttccccaccccacttgtatgctctggaatctgtggagacgccagccctgcccaatcagagatgccaaaaatggggacatgacttctggacagaggacatgggccacgcccccatgcatccccacccccgcccctccggacggcttacttacctcatacgcagctcatcttaaaccaatagaatcgctcggtggacgagagtgtctgactcagatatctacctcggagggagtttctgctactttagggaattattgactgggctttggggttgaacttttttttttttaaagaaagaaaaagaaaccctgggatccatctgtt

SEQ ID NO: 5673 - protein, 430 aa, Homo sapiens; identical to SEQ ID NO: 736

SEQ ID NO: 5674 - DNA, 1387 bp, Homo sapiens
tgggcaacagcatagtgagaccaggaagcaaaaaaaaaaaaaatgctgtcactcacatcttattcagtgaaggacttcagaggcaaatgtttctacctgaccctcctttctgccccacaggtctccaactggtttggcaacaagaggattcgctataagaaaaacatcggaaagttccaagaggaggcaaacatctatgctgtcaagaccgccgtgtcagtcacccaggggggccacagccgcaccagctccccgacacccccttcctctgcaggctctggcggctctttcaatctctcaggatctggagacatgtttctggggatgcctgggctcaacggagattcctattctgcttcccaggtcagatgcccatctcctctcgaatagggctttccccaactccatttcctctactttaggatacaagacctctttcctctgaggcttctcttcactgtcataccttcctctgctgcctgcaggtggaatcactccgacactcgatggggccagggggctatggggataacctcgggggaggccagatgtacagcccacgggaaatgagggtgagtggatcctgaagctcctctctgtccagttctcacaggacagaggggcattttccctagtaatgttgtgcccacacagggttcccagggctttctctgttttctgtactctgtctctcctttcaggcaaatggcagctggcaagaggctgtgaccccctcttcagtgacatccccaacggagggaccagggagtgttcactctgatacctccaactgatcttgcccctcagggtcacaggggtgggggctctcacaaggcgacttgaagaggacgcaggcttccagaggacaaaccccaatacaggagaagcacaagacagagaagggccaatggggtcatcccctccctaacgagactctctgtgctgggggtgctaattacatggcaggaagaatggggcctctaaggggagtgtggggtctgtctctcccttttttccatctttttcctctctcgctttctttcttacacagaaacatacacataccgagaaacctatttctcagacccctttttctcctctgtctttctctctccctctcccacacctcacacacacatactcccacttgcaactattctgtttctctcctgggctcccccactttcccttccccaccccacttgtatgctctggaatctgtggagacgccagccctgcccaatcagagatgccaaaaatggggacatgacttctggacagaggacatgggccacgcccccatgcatccccacccccgcccctccggacggcttacttacctcatacgcagctcatcttaaaccaatagaatcgctcggtggacgag

SEQ ID NO: 5675 - protein, 115 aa, Homo sapiens; identical to SEQ ID NO: 5657
